United States Patent Application Publication US 2026/0058010 A1 - sequence listing, part 31

SEQ ID NO: 382 - DNA, 427087 bp, Homo sapiens
  source 1..427087: mol_type = genomic DNA
aagtgtcagcttgtggaggtctataccagacaggaagggcccccaactctcgccttgtgagggacagaataaacacgcaggcagcagaggccacacggcattggactgatggtcagagggtgggggtggggtgtagcctggtgagtttggcacctctgagacgctgatgtataatgaggggattagattaggaaaggcctttctacctaggatggcctgtggttctactgtaaaaatcccaaacacaatacaattagctctgttgtctgcattttgtttagaataatcaatcataataaacaatcattgtaacaactggctgttcaacacatgagaccccagatgatttgggaaggagcttggagtgacaggaaatgtttgggtttgtggtttaaagccttagagcaccttctcaatatgattatattgagtagtgattgataataaacacgactcaggtttacagtgaaaaaggaacttttacaacattggttcacttcagcctctcaccttcaccacatcaatcctgtcaaggaggaattactgcaatttagggaacagggagactgagggtctggtcactcaaggctatggctggtgttgagattttcccaatattccatttttccaaagcccacagtggatttggttcagttttggtgttgagtgtattcctttgtctcctaatcctatgaaaattaatggaaaagtgttaattgggcatcaattcatgcttaacattaatctcagtatttgatgaaccacaactttatgttgcccctcatgccatattaactcagtttattgcaacaatttaaaacgatacagatttaaaacaatatgggtaattgtatccgtattgtttcaaatgccccataaattgaaaccagcccgaatttgggcagtctggaatctgccggagaaactttcatgcgatgcctttggaaggctacagacattgtctttttggagttttcagtgcatgaaggtatgaaaccgcatttattaagcacctactgtatgccagaacccgtgctgcacaatactactgctgctaaggtgggagtgattctgaagccttctgccaccctagctacctctgcaggtcgtgaggggtcttgggctatttcagtatcatgcactttactatcctggcatacaaaggctgggtgagaaataaaatatataacgaacggattacacaggggtttcctgaaataaccacccttcccatccatcccagagacaccccaaaagtacttctcgttatatacaaacatttgctttgaacctcaatcatgtgaccttgactcctataacctatcttattacatttttaaaacactgtatgattaacgcggaaaccctttcttcggcactttctcgccactggaatcgcgtcagtttctcaaagttccaaaataacctttcccgggcacggattggtacctctactggggaagggcggggaaccgcgcaagacgtgccggtgtggagccagagccagagagaacttccagcgcaaaaggaaaataaaacttgtggctggtgtttgtgcaggagggtctccgccatcctgaagccccccgatcctggggcgtctcgggggccgccaaaggagcgccagggtgtgggtttgctcccgacgtccttgacctaaatttctgagcggtggctggaaacagggcacagcggagggcgggcggctggtgccattcccggatctcggcggcaggggccggcaaacttgaatggagagggcgaactagagagggtggggggcgtcttctcccaggtccgggtgaggagccgcagcaagctccccgcgcctcccctcccccgatccacccgccccccgcagcccatgtgatccagggaagtcggggtgcgctccccctcgccctgcgccctgccggcccggaggcggggtcccctccgcccgcggggttcgcgcgccacccttgtgggtccggccgtggggggccgagtgtgcgcgcgcgggcaggcgggggccgcacgggggtgcgtgacgtcaccggcattggttacacgacgttctagaactccgccccacgtgcgccggggaggagggggaggaggaggaggagatgggggtggggaggaggagggggagaggtggggatgggccgggggggcggggacgggggggtgtgcgaggcagcggggctgagctaagccgagcccacgtgtgacggctctcgccgctgccccggctccgccgctcgcagagagattcggaggagcccgggcgggggggaggaggagggggaggagggagcggagatctcggggctcggagccggccgccgctccgctccgatcgctgtggggcttggttttttgggggtgggggggcgggggggctcagatatggaggcaaatgggagccaaggcacctcgggcagcgccaacgactcccagcacgaccccgggtaagtttccagccgctgcccaccgcgccgccttgggctcgctctccttgcagcggcggggacggcggtgcgcggagccgggcatctcccgcgcccccccgcctctcccgcgcgccccccccgtggaagttacacacctttggattgcatttcgccgtcaccttctcccccaccccacctcccggctctcgctcgctcgctcccccccgctttccttttagcttttgtaagttacacgtcaaaatggccgatctgacatcggtgctcacttctgttatgttttctccctctagtaaaatgtttatcggtggactgagctggcagacctcaccaggtaagggagggagggggggacgcctgggtcccccccttcttggcttctttattgctctttgttatcccggtgtaggagcccccccccccccgccattggctccccacttctcctgtgcaaggttattttttttaaatagcaaatcctttctgagccctctatgcgacctctgttgccgaatttcccccgcgtgtgcaaaaaatgcaaaaacaaaacagaataacaacagaaaactacttttggattttgtccttgatcaaaatttgcattgctttttttttccacaccttctctcccccccccatctctctctttctctctctacagatagccttagagactattttagcaaatttggagaaattagagaatgtatggtcatgagagatcccactacgaaacgctccaggtaaaccattcccttctggattttgtctttattttagaacaaagtttaagttttatttttggaggtgtcttcggaagtagctaagcggattagaatggggctcaggcgcgtggctgatctcgaacggcgctctataccacccccaccgccccctagtaaccccagaggttattgttaattggagctgaactctggatacagagatacccatctctctgcttttaagtcattttcccgtcgcttctttttctctgtttaaaatgacattcagcttcatttactttcgcatagtttttttttttcttttgatcttaatgtgtgtttcccccacactcccagctccccaaactcttaagatccctcttagaaagatggtggtaaatctcttctaagtgccgggctttcttcggaataaaacaaagcgttaagaaagggaaggggaggaggagaggaaactgaggtggccaaagagtggaggcaccagcattttccaagttacctccaccctccctgcccccgttccacttcccccgttaaccttgatgttttttcttgcgaggtggagggctgtaggcaggaggggaattggaggaggggagtgggaggtgggggtgcgtggggggcaacttttgctcctcattcagccttaggtctcactcctggttgctttcaatggtgtcacattttcttgtttgtttttctccctctttgtctcctttcagaggcttcggtttcgtcacgttcgcagacccagcaagtgtagataaagtattaggtcagccccaccatgagttagattccaagacggtaggttgctttttgttgttgttgttcgccccttttcaggaacgatctgggcattgacagccccatttaaagggacagtgccttcttttgcttctgtgctagaactgggtagttttaaactgagctagcgagttggctcaaaagtttgctgctgtggctggctttggggttttctttttagagcctgtcccattgcagcttcagaggctgccaaggttaggcttggggaggagagggttcggctcctggagagtctgccttcccggcctggggactgtgcagagaaactccaccagagagcaaatgcaacttttctttgtcagccaagcacagcacgcgttaccaactgtggctgtggggatcagctttgagaaggcacagcctgctttgtggccaagggggacagcagtgggaaggaggggagagggcgctaattacaggtccaggcaacaggtttctcttggggcacttgggatttggaatgtgctttgggaagggaaggggacgctggcggagctgagctgggcatccactggggtgactccagatggcatgaaatctaaggctgataaggcctgggggtttcaaagtgatttttttttccttccttttctttctcagatcctttcatttgagtatgggtacttttatacatcacaagttttaaaaatccagagtagaagggggaagagtctccaggcagaggtcagaaggggaagggaagaaagagtgtctgtatataacaatacatttaatgggagggggagtgtgcagtgttttatttagcccctgtgtgggcttcctgcctctcctcccttccctttatgtctaccagagtttccccacggtttttattaatatatatctgccccaaacagaggccttaagatgacattgggctgtagtgctgggttgcatggaacttcactcctctgtgatggggtagtgggacaaggccagaaatggggctctacttccatccgcctcttatgaaagtgagcaagacattccctacctctgggtctcaatttcctcttctgtaaaataagtggaccaaggtgatctttcaagccccttttggctttaacattgaatggaagagaaggaaagcaaataaagaaacctggcaaccttcggtgcacttgaattgattttgcaaattcaccctctttctctgatcaaagagatcaggaatgcgtgccttctcctaagaaagaaacccacctacactcttagttgctttattaattgtcctggacttgtcatagcttgcatgcagcccagccttttgtacttttagataatttaatttcagaaatgatttgtaggatgataacagatgtctgaaaaatttttctctccttgatttcgtggctagccatttcaaaaagctagtgaaattaaagaggaaaatcttttcaaggcaaatttgggaatttatcatccaccccctcttgctacctgggtgggagaaacagtatttggtttctgtggtggctggtgggtcatattcctctgtatcaggtgcaaagcctgcagtttccctctctgattgtttatagacatgttttggtcactattatttagtgtaacctagcttttgactttgtttcaacgttcagtgcaggaggcagaagcggttggtttattgacatggaaacgaggatcttgtttactgttaccttaaaagctttgtttaggtaacggccattcacatccaaaatagtaccctagtcttttcctagaggacttgtagatacagtaagtagagctgtacctaactaactaatgttttaatttttggtagttttcttttttgtttgttttttaaaaaatagttgacagggatgtgcaaaaggttgggatttgccatgcttaacttgacccttcctctccttcagagatctcagcgtgtaaactttgcacactgaggaacttcgatcatgatataatgctctgatacggccacacaccatccaggagttctgaattggctttttcgttttgtgatttaaattttctttagtacttcactttcttcattgcaccttacttcttccagctcctggcacctccctcaacataccccacacctgttaccccataaacaaggtgatttctgattgcaattgtgtgccggccaactaaaaaaaacaccctctggggagtatttataaaaagacacctctgtcttacgtacgtcaacagaatggaaaatccacacctgttgtatttctcttgtagacaagcgctagtcagtgctggacacacctgtagatgcagtaatgttaatctttatgaaagggtagttttctagatcagagatttttgtctattttagtttttgaaaagtaatctctcatttctcaggtgatgtttaaaggtagggaatgcaatgcagacttttattaggtctttaagcccccgtaataacagcaggaaatcctcatatgtctttctggctgggaccctaggtgatgtaagtcagggaacaaatgaactatcctccgtgcttcccactccccacccccacctccctactttcctccacagcattactcttttctcccctgctccttctcatggcagaagtgaaaacaaagctcagatttactttttaaaaggaaaacattttaatatgaaagccaaagcctggaaataaataactggtagcatgtttatactatctgtgttacatttttacccaaagatttgtgacatttagaaattcaatgaaaaccgacaacgggaatattttcacatttctttcctcctctttttatctgtgcagtcacttttttcctccctcacatcagcctgttagattcacatgcttccaggagaactgttctgagctgtacagctagaccctgattgagcatcatgcgttttgcaagtgtgtgatttggactggaggatgtttttccactcggattgaggttggggtaggggaattccctacttgttgcactagattctgactacttcttgtattcagtaacttttttttttttttggtgccctccccatgatgggatttcttttctaatttgggtttaggttgcttatagatttttactccctgttgtttttaaaatccaggtggatttagctcacatgcttcattttctttacttcaaaaaattattttttatcttttgaggtatagctacagaacagatgatctttttggttaatcctgggtaactttacttttgctaaaatgaattaattaactcaagcagagcactgtgttggatgtctgtggggagtttttggatgttgttgatttaaaaaatttttggaagctcctttccctcctgtgttgtttagttatcatcagggagaagaaataccatccaattacctactgctagagaatacttacatttaattttcaggttatgatttttttcccaatgataatgatgctcccatcttttctcccagccacgcatagcaaattagatgtagataccatttaatattcagtgtctggaagaagaagcccttgcctaaataagaattacatgagatctggtttattaagagcatcacacactgaaatgcatggtgggtcatttcagaaaggctagctagctatgttagttacctgatctgttggagggatggttaaagttgagatcaaagtttaagaaacttttgagttgcctgagaagttactaaaagctggattataagcctgagaaatgagtgattaataattaggtgattaatcatatattttttccttaaagtactttattgactcctgcttttctattttttttcccagattgaccccaaagttgcatttcctcgtcgagcgcaacccaaggtaagtaggagaataaacagtaggattttagcactcagagatgattgccaagaatttcaaatttcaaacagcattggccatgaactgttgaagcctggtattcactgttccttcggggtatcaggacaggctgggcaagtagtcctgtgagataaccatgcgtctctaagttagccatcccaaggtggcttctgaacatccacctgggggcagggacaagtctgatgcttagtgggaggacgtgtttccatcgactgcagtattttttgcaaggattctatttgttttttaagcatttccaatatcatatcaggaaaagtcgaacatttccttgtgactctttcggagggtactctttgaggctttacaacttggagttaatgcagaggagtagagtttgactaaacagctgatcctttcttggaaaagacaacttcttaggcccataaagccttaaatctgggagggcaagcagtggatatcttggttttaggttggttggataagtcagggcatacttgaaaccaacagtgcttcttatttgtgcaagtgctggtgcctgggtggagaagtcctgaaaatgttgtaaccttgtaggagtggcactacaagacttgcttaaagaattgagatagggcttcacttttttagaagtgtgtcgttaacatagttttcactgagcttgccaggtgtggctatgagaacacagttgcttgaagcctaaggttaaattggaagggcttatggcttacatgttacatttacactttttagttactatttttcttccttatgtagcactggaagaaatgctttttatgtatcttcgggatttgtcattcttttagggaaaggggaaaagttgaagcttctaagtcggaaaaggttgtggctttagcaaattcagtttatttctttatgcacagtctcccagaagtggaaccttttaatcgtgtaaagagaggaatggttttgcacattagtatagaaaaagttggtgattgtgatggtactttgagaatttcaggtctggggcataccacttgattgattgattccttccttccctccttctttctctccctccctccttgttctcttctcccttttttaaagatggaaacacaactttttaagtaaatacaatgaaatattttcttcaggcatttttttgtaatgcttaagcaaatgataggaattaatgattaggttatttttgtacttagcacaaactttggaattgcccttattgttttagttacttcccaaactgtctgtgatccttcacatttcagagggcttcccagagttagcagtatttcctgggtttggaggaattgctgtttcttccataagtgtgaatcttcaaatttccaggttagtcatttgatcactcagagcttggatcagattacccaagagggaagctggaaaaatcccttacttggtaaaaccatgggtttgacctgtttttctctcccctttgttgtcccccttccttaactttgtttttaaatgagaaaagcaatatttcactttaatacactctgcagtgatgcattcaacttgaaaacgagacagaatgtttctcaaacttgtcaaagtgtgcattcctttcccaaccctcaactccacatctggaatgtttgtaggtgaattaacatgaaaccacttgggggagaacatctttccatgaattctagggatttaataataacaccttactgtgtatgacatacttcactttacggaggacttggctgttcattatctccatctgaattccatctcctggggcatttggctgttgtccctaaccttctctcagtctcagtgtgctcatctgtaaagtaggagtgatgacatagctctcccagaaggtttttgtgtagagtaaaagagcatggtctgcgacaaaggtcttcgtcattgtcattatttttcttgtcggttttctcatcattgttccggttgttgtttgcaagtgggacagcctgggttcggatgctggtggtgccactccttagctgtgtgaatttgaacaggtcgtttaacttccttgaaccttcgtttttccatctcatagagtttttctgcagattacgtaaattaataaaggtaaagggactgaaaaaaaaaagacgttgcatggtaatgccatagaagcgttaacctgctatcttatttatttatttatttatttttgagatgggatctcactgtgttgcccaggctggtcttaaactcctgggccaagctatcctcccacctctgccccccagagtgctgggattataggcgtgagccactgtgcctggccaacctgctatttttttctgccatttttattaagtcctcacatcaatcctgtgagaggttgagtaataataatgatactagttgaatttatatgccaggcactattgcagagactttattaatccatttaattctcatgcagccctatgaggagagtactagtatgagctcattttgtaaatgaggaaacggaggcacagatggatgtccaggagccatacccaggcaacctggctgtagaactgggcccttcaccactgtgccatgctgtgggggtacctcaggggatggcccctctgctatgcgacaggagatgggctcggagaggtcagcgggctgtgctgagggaaccatagccagaggcccagtactttgaagttctgcgttcctgggcctaggtgatttgccttgccccatcatgttataccagtgtgtgacactgtcttgtatcttttgatctgacccctcaggccatcttttcagatggttctggagttactcaaccccagtgaggcaacagagtaaatgccaaggttgtatggtggttgggaattgggacagggtggggagaaagtgtcttccctgtctacggttattttccaatagaatttgagcctggccaccgggatttcagactggagttagcgctgggggccaaaacccaggagcatagaactttaagtcgaccctgatttatttatcgattatctcccttcaataaaacttctgtgtttttgtgttcaggtcacagtggcagagggaaccctgcccctcctcgtgggatgggcgaggagcttgtaaatgatatgtcagtgtgtgtttcagttaaaatgagtttctctgctttctggctgtccctccttgctaacgctcgccagagaaatattccgtggaggtgttaaaacaagactagtggaaagaaatggtaacttaaaaagaaagaaaatccatggcagtgaagaacagatttcatattagtactgtcataatattctctaatgtatcatataaataaaaatctgtttagaccagaattttaataagtcaccaaaggaaggttttgaatcctacagtttatgtatccccctttgcgatgtaaatgttcacatctcaagtgaagtagagtggggagacgcttcggagactagaggctgttaattagtgaggtatattttgatcagggcaagaagactggttcattctatatcttcgtatttctctggatgattatttcattttgtaaaatatgtaagagttcccccccagccccttatctttttaaaaattaaaatggtcatgctcttctaaaaagatgacttaatttgaaggctttggagacatgaggatgatggggatccatcactccctgttctttgctccctttggactggagtgttggctgtctggaagagttttgcttgagctcgtgggttattttcttctatgtggaggaaccaagagactctttagcatctttcagcaagagcgaggtctgggtgtactcaccatctgtcttaattatccttgtgtataagaaaacattcccatcttttcccaattgccatttccttccttaacttttagaggccagaacctcatctgttgatgcagggagatctcacttctttaacctatttctagttgccttcagtcacagcggggtggccaggggcgagtcacttaagcctccccaaggctcagtttcctcctttgtaaaagagggagaattatagtactcactgcctgcagttagttgtttggaggataaatgcaaaattcttcactgggagtctggcataaaacagcactccgcaaatgtctgttgatcttattattatagaattattatttttattattattatttttaagacggagcctcactctgtcgcccaggctggagtgcagtggtgagatcttggctcactgcaacctccgcctcccgggttcaagcaattctcccgcctcagcctcccgactagctgggattacaggcacctgccatcatgcctggctaatttttgtatttttgtagaaatggggtttcaccatgttggccaggctggtcttgaactcctgacctcaggtgatccacctgccttggcctcccaaagtgctgggattacaggcatgagccaccgtgcccgaccagataattattttaatagaataaaaaaaagtacaatggtgaaatgactgaaggaaaatcttaattggaatgtaagctccctgagggcagggaactgttggtggctgctgtttggtaactaaatgaacgaactgagtccagcctgcttttttcaccgtggaggtagctgctacccagtaaagttacgttggttgcttcagatccacacttaggttgtagcagggctgagctagcagtcaggttttcctgttcctgtcttgtcctctgacgtggcttcagggccctggaaggttctctgctaagcacgcatccagatgggtgcaatggcagcccgagcgtgtacacgcacacctcctgttctgggggagtggtttcttggcagcttctcaagggcgaagggtgagttttcggcatctggccttcccttgctgctgtgggtcgggtcattctagcatcttgccatcttggatgatctgcagctgtcatctcggcagccaccatgaactggcctgccagtgggttttctcgttcccagcgaggatgtggtggtgtgtctgcagcccttttccacagcagcgaggacctgggaggattagtggcttagcttctttcttgtcggtgagcaccgctccttcctatgttccaagtcagtagcaggtgtcagcttaaggaggaggggcaccttgtcctacaaatgtcctttccctggattttgccgttcctcacatgctttcgtttcattgttgaggtcagtctcctaggactatgaagctcctgtgttctttgtcagatgatttttggcagacaggtgagcctcctctgctgcccgggaagggaggagaaggcagtctcggaggaaccagctgaccatctcaggtgccgcttggggcagcgtccattctttgtgtcctattttgtatttttaaacccggacaatcttcggccgaaaaccccgagaacacacaggggagatgtagttcatcatctctctcttcccgtttgatctagtgtgttcatttaacaagagctgggttaatccttgttcattgccaactgtatgcgtgcacccacttttggagggattcaggaaatactcggtgcttcctgatgtgcatggaacacagtctcgacgtcttagcttggtgcttaattaaggtccttcaaaatctgtaccagggtcttttccaccttatctctcaattcttctagtttttgctgccttgaaactgaatgctcacccttctttgagaaacctgtccttttgcagatttccctctctgcactgcccttcccttctctgtacacaacagaccctctttgaaagcccagcttcatcattatcttttccacgaagctgtccctgcccctttgtggaaacagtcatacttctttggatttccacagcacttaccttttctttggttaagccccttccaacaataataaattagcagaaacttgtggagcacatacatctgttgcatgttgtgctagacattcactcattcatttattcaccaaacaagcaccgaccgtttgccagatactgtgcaaaattcgggggatagtgtggagaatatgacaaagttcctgctgtcaccaaacttttgctctagtggggcaaataagcagtgagcaaacagataagtttatgacatgctctcaggtgtgatcaccaaagccagggaggagcgatggcgggagtggggtggaccatatctatggtacagtcagttgccactttcagtagttcagaaattatttaccaagtttctgctcagcaccggggattgcgttaggtactttgttctgagttttatggtatttaggttcatgccttatcttctccattggacacaagcatattttactaataattaaaaaaaaaaaaaacccagccaggtgcggtggctcatgcctgtaatcccaacactttgggaggccgaggcgggtgggtcacgaggtcaggagttcaagatcagcctggccaagatggtgaaaccccgtctctactaaaaatacaaaaattagccaggcatggtggcgggcacctgtaatcccagctactcgggaggctgaggcagagaattgcttgaatctgggaggcggaggttgcagtgagccgagattgcgccactgcactccagcctaggtaacagagcgagactccatctcaaacaaacaaacaaacaaacaaacaaaaaacaccccatccttagcccttacttctgcacttttgtacatcgtggacttccatttaggtagagcgaatgaaaaatgccagaagaaacacagttcttgtctttaagaacatcattagctccaggttgggaggagggggtgacctgtgatactggaaagggtgggataagcacagtagaagaggtaggaacagcattttgaggaagggcaatctaagcttctaggaagaggtggtctttgccccaggtcttgaagatcagataggaaggaataatggcaggaatgctgttcttccttccggctaggcactaggaaaggtcagggtgtgcaggtgttgcaaagggtatgtgctgcagagtggcctggcatgaggcttgcaaagtaggttggagccagtttgtagaaggcctcaagggcccaataaggcaaactgacaggtgctgtggggaacctgttgtgtgtctgtgcgggtgtatggggatgccctgtggaatgttctgagctcattcagacccatatagaagctggggtcactgataggaccatggcggatgctgttgcctggagaacttccaacctgggcttgtggcttaagcttaatgcaggctatgttctctctggccagagtctctcttgccatagactcttcttcttcaggagtgatgctcttagcagatgccacctctacctttggggtgtgtggctgcttacaaagagctctctcattctcttgtttctaccttctgttctctcctcttttcctccttaacaagggaccatgatatagatacaattccaaagtcctgtactttgtccttgtttaagccgtgatcgtgacctcaccatgtgtagacagtgagatgtcatttctcaatgtggacatcacagattgcctgtataaccccagtgtgtgtcccgtggctcagagcagtctgacctgtgacttcatagatggtatctgcttggggtcgcctttggctgagtgtctgcttggtgaagaatatgcatttttggaatcatgatctctgctttccgtgtggtgtgaagtgcgcaggtgtggtcttggggctgagcaccctgtggtatgttgtagcagcagcctcacttggtcggtccagctgggacagttgtcccactgggtccagagtaggataagatattttccattctcccttcttttgaagatagcaccaggcttccaaccatctggaatgttagccttagggtggatgcctggctgctatcttgctttattttagctgtgagattttgaatagttaaaaagaaaaatcctaattcagaataatgactgtcatttattgtgagtttatatgttataggcatagtaccgagactatacacttagtcttctttaatccttacaacaatcctttgaaatagttggtattatctccgtttgacagtgggtaaactggggcctgagagggcagacagctttctagaaccatagaactagtaaggttcagggttggcctttggaccaaagtctctctgaatcccaaggctttgttctcctctctgctaagccttgctgcatccaacatgagtgggcagagttgaggttgccactttgcctgatggctataaaatgctcaggctgaggaatagaatttgtgatagtctagctggaaagcttcaggttaatttttgttacctgttttctgagagcttgtttagcataggtaagtgccacttaccagctatggcattttagacaagtcacttagtggttttgcacctccacttgtacctgttaaatgggatagcaaccgtccctccattgtagaattgctaagggtaagatggactgagctactgcatatgaatggcctagggtgatagctgcatgttgtgggtacagtataagcattcatcatctgttactgtccccgaaaaatgtccctgcccccatcatcaggggaccttataaccgagcagctcgtgggttgattagcactgttgctcctttctagggtgagggatagaacagcacattgagattggaaaattctgtgtcagtggcttggcctgctcatgaggtcctggctctcgaggcgagatagcatgcagcctttatcttggggatgcttgatgggcattaggaattcatttccttttccgtatctgatgcctgtgtttttgctgcctctgagagtaaagtcccggggagcagctagggaacagctgagacactgctgtgtgagaggtctccccatgagtcttctctctccctgtactggtctttatctgcccgggggtagctctaccaatgactgatctgaaagcatcacattcatttatttgtcactggctgtgacaggcaagttaatgctaatggattctttttttagcctgttgtctgggatgagtttctctcaaacgtcctgaaatctaaggcattaggagaatgtgtaacttttatggcaggggaggatttataaaataaatagggttttgtgtgcaaggaccttaaatttaggttaggggtatgagcagccaaggagcgggggtgtcgggcaagcacagagtcttctttttaagaaatccattcaagagctctaaattgctgtttctgtttcaattatgtgacaatttcaagggtttagaaaaatctaataaaatggtcttgatgatgcattctggggagagagtgcttcagaagatctaggagaataaattccttgggggtcaagagattctcgttcctgccaccttgggccttccttcatctgggtttttacatttttattgttttgaagggcagaaaatggtgtaggaatgtattcagggcttcatccataccctccaccgaaatgaattattctcttttggcaattgcaaaatagacgggccactgcaatctttttttttttttttttttttttaagctgacatattgtaaacgactttcagaccatgatttgtgtgtgtagtgatgttgaataaagcaccaaagaaaagaaactgaaggaggggaaagagtgaggagggaggcgctataaaagtttttttcttttctgccatcaaagcttttgatagtttcctaaagcacagaagtttacaatggaagcgggcttttgggccgcctaggggaacagagtgcagaaagacctagtgtagcaaaatgtgatgctgagtgacattaatgaggtgaccgctctggtgggagggaggcaaggaaccagccaagtagcagttcccatgacttgctctcagctgagtgtttccttctgcatgcttgcatgggcgcctgtgtgtgtttgtgcatgcacacgttgtgtttcctaagtcttcagatggaatttttaacaacaaaccctgtttggtttactgtggtgttctccaccctaaagaggccgtgaatgttgagttttgtcctttattcccacctgctgaaaagtaaagttttcaacttagcggcattttgtttttactttctggatacctgccggagcctggctgggcggcgtgtcaggccaacatcacagagctgggcactgttggaacaccaaaccaagagtgtgaaaagtcaatattctcatttctgaaatgaattccagggagaggggaaaagaaaacctgttggtgtacagatcccgcccctccaaaggccctagatcgataacacttcatattggtggcataattaaacatggcaacaactgcttcttaaatatttcagtgtcttggaaagtaatccgtatttccatgttgctcttgtgcaagaatttccactcactcaagaacaagaaaagctgcaaccttgggggtagaagaaggtgagaaacctaggtcttgctgatttcctggataggagctcgagagtacctggctcagttgcgaactagtttcagaaaggaagctcgtattttcatcccattcctcgccatggcattagagtgaccattctaaacagtactgggcgagtgttctgaaaaactgctgcgacatcttaagaaaaatagccagatagggcctggtgtatagtggagtgggtggaaacacagtgtgtatttactgatacactctattttttaaatccctttcaactcagttccctctgggatatctctcaaatgtgtcctttttgtagctagaggcaaacaagcaaaaaatgtttcaactttcagatatactacttaataaaaactaactagtggattcatcatgtcttctacctggggaaaaaggatcaaattaggatgcttgcacctaggagagaattgggttgtgaatctccacgagattgctacatgtatatgtttcctcttctgttttccaaagaagataattggttttagtaagaacttctgacttgattagggggcccttaggaaattagagtgtgtttgaatttcacaagtataattttaattatacaaattttgcattttttcactagggagccaggttcagaacttgttttcctgtactaataggggtagtaaagctgattatggcagaatgctttacttaaattgctttgaaaataaaaatccttggatttgatcattgtttttccctgcagtacacgatgttcaggttaatgtccatacacgtcccatattcttgttaaaaatgatttttttttttttttttcttttactggattcacacaactgcagaacagactgacatagtggggatgtgggtggggggggggacctcattatgaatttttctgctgcacttgctgaaagaattcaattaaagttcttttgagcacaagtcctgcctgggcagtttgcgtttggcaggccatcgccttagcatgttgtgattgcctttattgccacgtcatcctgtttgctcaaagcctgtgcattcacagcattagccctccaagcggcccctctgcagcatgaccccagtggattagagtagaaggtgccgtggaaacagtcacctgggtctttccccaagctataaagagacggtggagtgaggatgatcagaccccctgggcatcccaagagaaggactgattgtgttcatgggaaataactgtttttttcagggctatccagacaaaacccccaagtgtcagagcgggggaactgctctgagagtttgaactcaagcatcctcaaacatctaccccagtgtggggctctaaaaagcttcctagagacctgctcctggggccttctgggccttgtctcagatattgacaggagagattcaatagaagaattcgttcacaatagagaaatcatgaaaccagcttgtgaatgacgtgatgccacataggccggggcctgagaatatgggaaaacaaaactgcaaatagaggctggatcctactcaccccccatcaccctgcattttacacattgaagtaaaatgttatttttactgtcgttatttttattactttctctccaggtgttctagctgagcgtttaagagcatggactctggaaccagactttgaatccttgctctgccactgcagctgtgtgaccttgagcaagctatctaaatattctgtgcctttgttttgtcatctgtacaatggagatgatgatggtatcaccttcatggggttgtcataaggattatgggacttaacataataaagtgtttagaatggtgtctgcaacataaggaagtgtatgggtgtgtgagttgtggggttgttagaaaggagcacgtcctgtggcaggtttgggtaagtgctccgtgcctgccttacgtagtagttggagaacgctaagtactgctgtcttctgccttacgtatttttccttaagtaatgtttgagaaatacaaaagaagacacacacacgtggttgtgcgtttatgcatataaatgtatgtgacacgggtagaattgcagtgtaatttggattcagacaaattcatgtgccataacgaagtgtgtggtttgttggcagcacgggctttggactcagagggacctagtttgaaacttgataactgccactaactctgtgactttaggaaggtgttccagcctttctgggtttcaattctgtacttaaaaaaaggggaatagtagggttgtggggattaaatgagccagtataaataaggcaccaggtgtatgatgaatactgagaaaatgtgaattcttttctccataaacaacaaaagaaaaattttaaagccatctcgaacatgggaaagatacaaagtgttctgttcttgctggtgatgagagtatctgaagttagttgataagtccttagaggtctgagtagagaaaagcaggccataaaagagggtgttgtcatccttaatccacatgccaaagggctgttttagcaacttcatttcacaaaagccacattttcaagggcagggaaatcatttcagttaggaaccttagatggtgtccccagcctttgaagatgcctttgttcctttgacacttggtaggaactgggagcacagggctggatggtccaagaggagagagtaacttcagagacatgaaagagccccagctaggagggagcgagggagaaccttgggattgagggcaagggttactttttcatagaaacttttgcttggggatatggaatagtaggttttgatctacaaacccatgagccctgtcctgtgagtgggaagaagattggtagagctcaggaaatgaacacagttcccagccattggcctgggagatgctgacgctcagacctattgtcggggctgggaaagcccccagaccccttggggcatcccctgtatgtgggtccctttcacttcatgtccactgggtggaatttaccaggtattgctgggaacggggaacaagatcatgattataagtggatcctggacaggggatggagtgcgtgtgaatgttagtgtgtagaggacggaaagggaaggagagaaggggtggccaggaggagggaaatagcagtagattacattgactaattatagggaaaaagccatatttgctgctccattaagtgatcactaggctatgaagcagtttattgtaattaatgcagaaacagcaagtaagtgtttgagtttggagtggagggtcttcaggaccccctccctccttcagttctctgtgctcactgtctccctcccctccctcaaattcattatccttggagagaaagagtcttgggggagcatctctttgggaagggctgtttagcacagtcttggaccagttttctactggtttattttgacaaagaaggaagatcttttacctgacctccttcagaagattctgtaggggtttttatgttttctaaggctgaaggaggagggacaaacccatgtcatcattgctattcttgccacaatcattttaatttcagcacatgaaagtggcaggttacacatccaagtccatcgagttatgggccgtgtggagttgtgattgctttccttgatgatttcttgttcaaatcagcagtgctcttaattttccagatgaagtaaaaagaaaattggagactcccctcccgcctggcgtctcttcatccaaggttttctgagcatgactctgatttggagggttaatattaattaggagccagtttagacctcagttgcttgatgaggtagcttcaactgttgtcacgaatgtggctcctttttgcttgtgcctgcttttggtgaaagtttctgggtttaaaagccaaaggaagaaatatgcagagaaagatagaggaggggacaattactaaagaagtgcaaagcattctcttagaacttgagggaggaacaagaccagagtgcctgggtgggtgtgggttctgagctactgtgtttcccggcgtgctgccgctgctgtttgcctcagtttccttttttgtaagtaaaggtcatctctctagcttcctaaaagggccatgactcatttccttggtttccaaattgggtgacgctagaatttctctgaggcaagtccctggtgagtgccaggtaacggaggcgcctcatttttgtgccgaggctcaaggtttcctggctcccaagttttcccagggctgactcggtctcctggggaacggtggcagaaaggatgagaccagagacagtgagtgagccccactgcatagtcaggggaaaggagacctggagaggaagggacctgttctccttgggttgtatcatgttagggacctttcttctacggactgggggtttgggttggttttcttttcttttttttttttttttttttgagacaaaattctgctgtctcgcccaggctggagtgcagtagcaggatctgggctcactgcagcctccgcctcctgggttcaagtgattctcttgcctcagtctcccaagtagctgggtttacaggtacccgccaccacacccagctaatttttttgtatttttaatagaggcggagttacgccacgttggccaggctggtctcgaactcctgacctcaagtgatctgcctgcctcagcctcccaaagtgctgggattataggcatgagccaccgcacccgggctggttttctttttgacagggtggtttgggtcgtgagggagtatggcagaccatgggtgtgaaagttccagtcctagcaggagagacttgacttctgtctcttggtctcttagcccaatgctgatgtgctgaacatgacctcaggcactttgccttgcagctccatgtttcgatttccccatctgtagacgggaagaatgaaggcatgtggtgggaagcagtgctgattagggcttaagagaagaggcttaggaggcagacagtcttagggtttctttctggcataatagtttcctagctgcttgaccttggggagttcacttaactttgttagtcctcaatttcctgatatgtaaaatgggataataccatatgagcatctacctgacaggattgttgtaatgtttacaggagacagtgttcgtaaagtacaccgcctgggaggtggctagcacattattcctgggggctacttttactattaacagctccatagtgatttgaccaaaggtttctgagagttgagccaagatgcggactagatgggaccacattgagaaaacatttgaggctggatgcagtggctcacgcctacactctaggaggtagaggtgggaggactgattgaggccaggagttggagaccagcctgggcaacacagtgagaaccctctctacaaaaaatacaaaaattagccaagtgaggtggtatatgcctgtagtcccagctactcaggaggttgaagtgggaggatctctcgagccaaggaggttgaggctgcagtgagctatgatcacaccactgtactccagcctgggcaacagagcaagaccctgtctctcaaaaagagagaaaaagaaagaaaacatttgagctccatagattgacattctgatttgaacagtttcccatagagggagaattgcggcgaaagaggcaaggcctgcccacaatgcatggtctgggacttagctgatgaagtgctctgcaccacccagcttcgaggagatggggactggggtttccccttgcttgacatcttaactacttcactgcaggaaaggggaggagggacaagaggaggaccaatccccaagggacacggagacccacattaggttttggaacccacgcctggtactatctgaatttaaaagccttgcttgactcaggcggggctgatcaaaggccatttgctgttttagagtgttcctatgtgtgcttggcagacagagttgtctttttattgcttccattcccactaagacctccatccccccactgcccccccaaccccttggtgagcttggtgagatgtgtttttttttctttttttaattttaagttccaggatacatgtgcaggatgtgcaggtttgttacaaggtaaatatgtgccatggtggtttgctgcacctatcaacccatcacctaggtattaagccctgcatgcattagctgtttatcatgatgctgtccctcctgatgagatggttttaagttggcaccagcacctgtttctcatgccttgcgtatgcagcaggaactgtgaactagggacaggttcatgccctttggccactgcagacgtggagctgtggacgccagtacttgtgtggagagtcggtgtctgttggctgtatctcagctttcttttcagggcagacctgatacaggtgttctaggtgggaaaagccttagcacttgttgtgaactattatattgttactctctggaagggaaggtggaaaggggaatctatgccagtgagcacaacacaggccgcatatggacacacatgaggtcgctcggcatgctcttaggcccagaggagacagaatcagatactagcctatcctctggctgctcccaggctagcagggaggtaggtgtctaaaccaggatgtgagctagaggggactatagccgtgcacaggaggggcacagaggacggagcaagcagggcaggcttcacggaggagggcttgtgagctgaatcttgagagagaggagatcctccaagttgagggaactgtgggagcagttagacagcttggattttggggggtgtagcacattgctccttatgggctggggtgtaatgtgcagaggagggcagagggaagattgatttgctcattatgcaacaaatgtctggagctccagtcctgaaccaggcccaaagctggggaatagcaactcagtccctgcccttgtggagtctgtggctggcaggggcatgttcattaaacaacttattgcatgattcactacttttctttttctttcttttttcttttttttgtgagacaagatcttgctctgtctcccaggctggagtgcagtggcacaatcaaagctcactgcagccttgaattcctgggctcaagcggttctcctgcgtcagcctcccaagtagctaggaccgcaggcacacatcactgtgcctggctagttttttaaattttttgtagaggtgggtatctcactttgttgcccaggctggttgaactcccgtgagctcaagtgatcctcttgccttggcctcccaaagtattgggactacaggcgtgagccacagtgcctggcctgattcatgattgaagtaccattaccataaatgctatacatccatgcattggatgttaaagggatcataacaaaaaaaaaaaaacagtgtcctttgggttttgggaaggcttcctggagaaataacgttgaggctgagcttgatgtagggagggaagtagcagggtgcatttcatgtgctgagggaagagagggtggctggaatgcagagagtgaggaggacagggggacaggcgaggtcacacttgcgttggcggggataaaaattcttatcttaggagggttggggaagccatccatttaaaagtttaagggatgggatgggaaatgatcaggtttgcgttttgaaaatatctctctgacagtctacacgaaaagtggcttgtgggtaccccagggggctgtgggggaatcagtgagtaagttgttgtggtgatccacttgaggaaggatggctgcttagctgagttcttggaggtagtgatggagaccagtggatggatttgagatgcatctgagaattggagcagcagcttggtggtttggttagttgaggagtagcaagtgttaaaggtgagaggcaaatttgacttctcattgatgtgagcagagcccccaacccccacctccgtgagattgagagtgttggcccatgcaggggacaggcagggcaggtgtgcctggctcagggggttgagtgtaaccccttggctggcaatcggcatactcttagtgacggacccctattggtaaacttgtttttgagcttgcactgtatacatatttatttataaatgacatacatatacttctgtactaaaatagcatgctcctaataaggcaaatcattaaaaataaaataggatgagaaaaaaagctaagcacacataaacattttaatctttttcttctaaaccctacttcggagaccactgcttttggccatggggagcacttaatgagttttagggtgggggtggccaggtcagatgggtgttggggaaagagcactctgcaatccaggggctctcccgtgagttctgcccaggccaggggcccaaggaggaggtgctcttgcagtcttgtcgtgtgtggcctggtgagtcagggacatgaaattgtggcataattgctatcccccgagaagtgatgttggcaatatcataccaggtgtgtgagggcttattggtgtttgatgtttgctagtctgtgtgtgctcaacctatgggaatatggcaaggcccactcccctgtggtccagcaggttcctgtctagagggctgaaggccatagttagccagggagagcctgatcttctaaagagagcatcacgtgagggatatagtgtcagttctcagcacctctactacctgcaacgccatcaccagccaattctgagctcatgtgggccactcttccccgtctctctggtggattgataatcatacttccctactgaactccaaagactgaaaatgatgcaaagtgaattgtttctatctttgcaatccaaacgttcctcttcgtttactctccagatcccttccagcaaattggtattgccactctccctccatccctgggttctcggggctaattctgttccagctcgctctgtttagctctttcttcgagcagaacccaagctaggatcttgccttccagagaatgctttaaaaagccttgtttcccaatatactgcgtttcagttttccacgagtgcagccatgctcgggagaggcgtacgagctgcttttacatgtgagaggtgaacaaatcaaaggtgagcccgttctgcctcagtgaggccttttgtgtaaaaagggccttctggagtaaagcaatcaggttgactgacaactgccgaggctaccagtgacagtcctgctccgtgggataacttggagaaaaatcagggccaaaagcagacaaaaggatgtccagaaactggaggtggggaagcctgagtgagatcaaacaacctgaaaatgtgtcttccatccatttagggctttatgtgcagcgaggttggagtggctggctgaggatgtcaacattttaaatttgtcactgctttgacttccctagctttatctcccttcagatcaaagcggggagactaggagttgtcactactggatttggtttcagactatgttggtgtacccttgctttatgaccttggggtttcctgtctttgcttggggtgacgggttcatttcaaacaagtgagatgtgtgttgtggtcttttattcagagtggggagctcttagaagcacccacagaggctttgaaaggactgggaagcagcttggagggccagttgcgtattttccaaggattcctgaatatcaggaatccagaagtttctatttgttagccttgctgctcctccaaggagccatcctgaaggcagtttagtcctgcactgggagacaaggcacaggcctgaagaattcctgccccctgctgtataataaatctgatactaaaattagtgctggcctcctgagccatatttcttgctgagatgataaagaagtgtgtgtgtggcaggctcatctttcaggattggaggatgttgctttatgtcagataagtgcccaggtctcgagatcatttttttatggcagcctctcccccatttccctgcttcctctccctgttctgttttgttaggggtaggagtaggtaggggtggataggggagaaatattttagcttgtcttctggttttgtgtaagtctctgtcaccgtaggtagatgttccttgagaatctttctgaaggttttataattgagtcttttacctccgtgacaagatattattcactttctctaaagcgtttactttatgcttgggctggggttggggggtggggggcagactttttttttttttcagggaactctgtctctagaagagacttgccgtcagggcagttgaatggccagcttacgactttaataattgaggcggcatctgggccccttgctgaacggcagtccttctggcagggcgattttgcttttaaaataaccatgttcacctttaactgcaaacggctgtgacgagagttgtatttaattttaaattgcccatgtccagtaaccctctgtacctctttaaataataaaatgtttttaatcttcctgcagctgtgttctctgtgtgggggcttgccatttttggaagaggagggggcttctgtgcctcctctccactccctttcttttccctttcaaactcaccgggacttctagaaaatgccatttcactaagggcggaatctggcccgtaaagtctctggagtgagtgctgggaagtttataagcagaggccgcacagggtcagtcagtaatgtcagcccctggggctgaagtgcttcctttgtgggcagaaccccagaagtccctttgtatcgctgacccattaaagactttttctccccattccccgcctccaacttcaggggggcttgatttgtctgttataatcggaaacagattttgggctcctgatccattatagatgtgtttgagatggatgccaaacctgaagccacttaaagagcatgtgaaaatgtgtttagatataaaggaaagaaaggaagagagaggatgaggaaagaaacagcctcttccaaatcccccaactagaaacaatactgaaatgataacacacaacaaaaaacaaacaaacaaaaaaactcgatttaggccctaggaaagcatgggaggagaaaattaggctccagagtcagccaagttggtgcttagtctgggatgaacagcccagtgaaggaggttaaaggaggcagaagaccacacgcgcacgcgcactcccggaagcgtggttcaggtggggcctgccgggtccaggggaatgtgtgtcccaggcttggagcagagggtggcaggtgcgtggggacgcatgggaagcactcacgttgtgcccagcaggtccatgtttctatcccggagacccttgggttaggaaatattgattgctctgtatttgtaaacaatctttaaggggatctagtgccaacacaaatagtcaacttcaggcgaatcaagtggcctcctctcaacagggaagcccattgctctgattttctggatcgacacagccccagatttattttcctttttaattctcaaaaggggcccgctgagttgagcattgcccaagtattggtttcttttcatccctgttgaattttttcccttctttaatgaaagagttggattggctgtgctgggccctccacccggtcatggtagtcctggtgacgcctggctgcagggtttcgaaggtggccctcatttcagctgtccttgaggctcactcctgtgttccccctgcccctgccatccaccccgcacccgccaccccgaaacgtttgtagtacagctgctggcctagaactcgaactgatgtgtctctcactccaaacaaaaaataaatctgtgtgctttatgtatgtgttttagaggtgtgcctgtgtgttttttctcttgacaagctcattccctacagctgtgcagtcacagcccactttgaaatctgcagcatatatatatttttaagtgaataagtacgaagagatgggaagatgtggtttgactgtaatcccacgtaaaacactctgaccccaatttttaaaaaagtatttcattaaaatgttgtaggagactattactgagaagaagaaagtttctaagttgatgggactcttgtgtctcctagtgtagagttgattttgttttttggggtcaccatggagatgagaagcatggggcttcatggcgtcatctgcccccattgggggagggcttgttggcacaggtcacctctggatcaacctcagcctcatctgctggggatgggagaagctcaagttggccaggggtttaccctatgccctcctcaaccagaattaaaatgaccttttttttttttttgccttcgaagacaacattggtaacaatttattgaaactatggagcttagcagtgatcagtttttggattttctctttcttcaacccctcccctttctggaagacttgtaggaggataggggaggtttttctgtgcatagattggcgtcggtttcttagaagtttcttcttttcaccttaaaaaaaattgtttgcatccttccccttagataaggaaccgtcaacatccttgttagagcccagtgcggaggggaccctgaggcacatactgttttcaaggttagatagcaacaaactttcagagtagccggagtttcaggggagggagggttctttgggttcaaggttacccatttttcccctgctaggaagaaagcctttttgttttcttttgccgacttcttccaatagcttagagcaaatagattagcaacccagcagaaaccaaaccaaggaacaaataaaggggaagtttgcagagggcccttggctgggggctggctgctgctgaggaggccaacttgcggttttccattttcacggtgaaccgcattgtctcagcgttcgctggtattcacaaaatcagaaagaaaggaaggtggtggtgggagggcgcacttttcaggagaggctggggtgtggggaaagtatgcccagctgcatgttattagcagccttcaaataaagtttgtggaaggttccggcccccacagtcatgcctgggaagcttctgtgttcttagtaggtgttttgaattctgtgggatggaactgaatgtttaaaaacagttacaggaacgtctccccaagtaggtattcctgagaatttctgtgtacatggaactctattttcttagcaagcatcattatatttttagaaatgttttcttttctccttgcccgtcagttagccaagcctcctaccactcactttctgttgtgtagttctgattttccgaacaggtgtttagatgatgaggggttatattaagaaagtactaaagaatacgtcttatcacgtgaatcagtatctttttattcaacatggatggagtgggagtggagaccaatctgttttatattcctgcaatctgatgagggtaagaaaaagttcatgctgttcatattagctagccagcctctttctgtctttccctcccttccttctttcttctttattttttctttctttcttttgtctaatacctaattccttatctcatttttgggattttgagagaataattttcatgtggggcgacagaactagtggttgtagtttcacttgtttttttgacattaaggaaacaacaaatagtctttttttttttttcctcagactgagcacacattttaagtgttttagggggaagctctgaaggcagtttgtggtgatttttaaaaaaatgtttttaaagctttagtctctcctggaagctttgtgtgtccctgcattttcctcgacggtcgctaataagaactgctggtctaaatcagtgtctctgagagtcattgattcactaattgctcatcatcgagtcctggcttccccctcctgctgagagcacttttgttttctgctattctgcaaggacttggacagatttctggagtgtttaagaggtaaccaataaaagagtttggcgtgcccctgttggtaattgtgcttctcggaggtgaccacgtcattggtatccgggctccataaacaaggggctgccttaccagtgacctttcccgcctaaaaccgaaggccccaaggtcgcttgtctgatggagaatgtatttcccggctcactgtgagcctcgacttaatttgttcctttcctaaggcaaaatgaccttccagtaaacccacaccccctcccccgcttattattatttatttatttttctggtgaacaaacagaattaggaaaggtgtgttcttccaggagagagcgggcagtgtgggaggagatggcagtctggctcattaaaatgccgaggtaggtttaagctgattgccaagtgcgggtcctgcaggtcagagtgtgatgcccagaaacaaagcaaggcctagggagaggctggcctggaggcaactggctcgcgccgcagagagttttgaagccacatttcttcattggaaatttaaaaagaaagaaaaaaagcagccccttttgctccatatttatcatctctatagtaccctacaaataagtggtctcaaaaagttgtttttttttttttttaatttgctgaacctttataataggaccctttctgagggccccgtgagcccaagaatgcctccttgcaatgtgagtgtgggaaattagtgcaggcccaaggaaaggaagtgtgaaactgcttccctcagtgaacacccagcctggcgaggctgtcctgtgtgtcttggaagccctgctgggcctgagtttgggtgccatataatttgctggcctagcaccccttccatgggtccctctcggccagcctcaaggaaggggtcctgtgggggacagaatagtgtgtgtgaggggctgtctgcgggtggaggactgccggggcttaccatcctaacttgttgctcagtcgcggagtcttgcatgttgactctcctgggcttggttggccgctgctgctttcctgtggttgttggtttgtgttaggtgtttggtcctctggtttgctttgggtactgggactttagcccagggaagaggcctgtggtgcttctctgcctttcggctcctacgtggggcattggaaagccctttccctgcctggttgaaaccttcgcaaactgcacacctggccggcctggcagtcaaatggattccatggcagcccctgcctagagcggagcaggatgtctgtttcggccggttatgaatgaaatcagagtcctgtgctggcaatgccattgtgcgtaaggagtgcaaggaatgcactgggccatcttcccagagagaccctatagacgaaacagatgtggtcagatgagcccctggagacagcagtagtggggagtgtgggagagcaggccagggcggcaccaggaggagcaggaggagctccaggaggattctgagcctcctcctcctcctttattcctccatccctctgtctggggtgggatgtttgggagaagagaggcaatgtggtatggtagataggcctgttctttggagacagttctgggattgaatcctggctatgtgacctggccaagtgacataacctctctgagcctgatgtgtgtcatctgtaaaatggggataataagacttgtgtggcagctctgggaacagacagaactttctgtagagcacgtagcacaattcctggcatctgttaggtgcttagtcagtgttgattatgcagccagcctggacccagctgttgtcgctgggacagggaggaggtcgtgcagttaccgaaccctacaccattgattttactgctttggaccgagaggcccgagtgtgctgtttagccttccaggccctgaaaggttagttgtacccttctgactttctctacagaatcttccccctaaccttcctggtgtttgctaaactgagagttagcctcacagagtcccagcttctcctgggtcatcatccttttctctggcctctgcctgagagcagcgtgcaccggagactgagggaggttggctgtaatcagcacagacccttggctctcagctgagggtggatcccagtgtctagatgatagatggtgcagtttggtttctaattcctgcttgatttagagaggtgctgggagtgagtggtgttacagggaacggaggctgtgggaaggctgggagtgtgagcgtttgattaccttctgtgctctaggccaggggtccacaactttggcactgttgacattttgagccagattattctttgttgcaagggtggaggttggggaagtgggggtgcattggagtgcattgtatctgtagtaggatgtttagcggcatccccggcctctacccactagatgccagtagcaatccctccctggttgtgacagctagcaattgccacgtgtctcctgggggacacagtcacccttagatgagagtcattggtctagcactataggtcacttctctataagaaggggaaatatttgtatgttttctgaggttctgttctgcatggattggaacctggacaatgaaatattcatgaaattcaagagcaggaaagtgcctggagagatcacctggtccaggccccagcctcccgcaggtggctagccacatgccctgggtttgatttccacggctcctgctggtcttcccttttggttaagtgaaagggcagggagaggggacgtttccacccaggccagcatctctatagagctttttggagtgggaacttcttttagcagaatgactctgcactcctgggctcttggcagtcctgtgtttgggcctctaggagtttggttgcaagctccacgagtttgatttgctctctcatccctggcacacacaaatttgtcactcagagggactggcttttctgcatgcactgaatggatttttatttgaaatgaattcattaaaaaaaaaaagttttgcttgccaggactctgccgtcctctcttcccttttatttctctctgtcgtctgtaagacgagcctggaaggagctgtctggtgggattggttggccagggatttttctaggccctgattaaaggtaaattatcagatgaaagttggaggttgctgctgtgcttgtaaaaaagtcacttgtgtgccataaaatccatcacagctcccttggtgagaaggaggaggccgtgaaacactcagtgatgctacttcggcttccagtgatttggcttccctctgctgcaggagtgctgcccggcagcccggtgcaccctgctcttgtgagaagctcgctgaatcacgttggtgggaagctcagagacagaactgtgtgttgccggcaagttgccatgaagtagttttagatgttggacttaggagaaccagatggctttatggagtagaagcggagcccatgatgtcttggtgacttttgcctctcttttgcttagaaccaaagaaggtggttgtccagttggagagggtgtggggagtctggccttggagaggcagtatagcccatggttgacagcatggatgcagggaccagactgcccagccagttatagaggtgggactgtgggctagttatttaatctctctgtgcttcagttttctcatctataacatggggatgagagtaatagtacctactctggggtcatcttgaggaatttgtgcaagaaaagggctgagcctatagcctggccaggggtaaggaagtcatccttaattatattatcattggttacactattctttttaatttattttagtttttctttttagagacagagtctccctctgttacctaggctggagtgcagtggtgtgatcataactcactgtaccctccaactgttggactcaagcagtcctcccacctcagcctcccaagtattggcactacaggcacatgccaccatgcccatttaatttttaaaaattttttgtagagatggggtcttgttatgttgcccaggtgggggtctctaactcctagccccgagtgatcctcctgccttggcctctccaaatgttgggattacaagtgtgaactactgtccctggcctggttatattattctataatagatggttagcctggctcctgaggctttaggaaagtgcttctcagactttactatgcagaaaaatcaggtgaacccattcctgggcatgctgaaatcggtgtctcagtcttggggcccaggactcagtgtttaatatctcaggtggtgatattgcagggagcccgcatataacctggtggctccttcaatggcagtgttggtcagattcttaaagaatgaagggcccccgtgtcatcacaaggagaagtgtcttccaccttggattatctgggaaacagttctgcccacgctggggggcctgatttgggccctgcgtcagtgtcctgggtgtaaacctctgcgagatgcccctgggtgtcaggtcctggctgcaccccatcgttaggactgggggcagcagcagatgagggaagacttgtctcctctggcccatggagtgtccctgtttttcagctcagccagcatcccatactcaattctgccggcgagagctgtgggcctgttttgcaggttgtgtcgtttcagcgggtaactggtatgtgtgtgcatgcgtgcaaaagaaaacatcaaaatgtttggggagtgttttaggaaaatagcaaggagcagattgccaagattcgcttatatgtttctttttctttccttttcgctgtgtacatgtgtgatcagcatcccggagtgttctgaaatacagctttggctttcttaccccaactattcttccgtatagcagagaggatacaattcaccaccaataataccgagcaataaataacccagagaagatgaatagccttgtgtggtggtaaattaaagttgatttattgcacataatatatacaggtgctcctaatgtaattaagcagcgaggcttttaatgttgcagaatctgaaagaagacccaagaaaattgggtcttaataaggcttattgaaataacagctaaacatgctgcttagtaccattaggggatgctgaaagatggatcgactctgctgctttttcttatgtgtggagatgacacacctgacctgttgtcagcaggtcccgcacttgaattgttttctctacggtaggactggattgttttgagctgtcaatataccctggccttgtcctgcttgtggccagaagtttaagtggctgcctattgaataggttttttttgagtgaaggacgggggagctggaactgaagaccccactgtctacagccataccaccctgaatgtgcccgatctcatctgaagaccccagcctcattctcccccgccattctaactaaccaggccaggcaggagaggatttgttcatggagtgaactcactgattgagcctttaccatgggcagagtgctgtgctggagattgggagtcagggatggaaacaaaagctagacagtccccctcctcaggagggctagtgggcgagacctgcgtgaaaatgcaggatcgtagaggaggggacgcattcaccgagaaggtccagtggattgggggctagggagaccctcggacagctgcctgggggaaggggctagagaatgggaggggaggctggactggtgatttaggggcaagagcaggaaaagttctgcattccgctcaagagatagagactttgcctgaaggcagtctggaatcctggcggcttaggagccagggcatcatcacattgatattttagagagaaaattcttggcagtgttataagtcatggactgggggagaccagggagctaagagaacagggcctggaccagagcagggggcagagtgagtatgaaaggaggaggggtgagaggcaaactctcccatgtgccttagacctggtgactccagtggggttggggtggcagggtacctggaggaagggtggatttgtgagcagccagtacttccatcagaacccctcgggggtgcttgttagaaatggaggttggtggggggtccctcacctgtggatctccagttgctaaggtgcctggacatctgtgactgaaaccaggtccccaaaggatgctgaggcctggaaaccttggtctcacctggagatgtggctccacgatgcccttgggagcgagcgagtcatttcacaaagtgttaggagggaaaggagcctttctggggccagcacggttggaagagttcacagcctttctgtgagttgctttaggggcctaagactttggttgctgaaggaagtataaatgtacagtgaccctccaagagcctccctctcacaggtatgccccactttaagaaaacccgctagacgaaaaccctgacttttggagtaagatttgtcaaggagagagagttcttcccagtaccaaaggtttcagaaaaagacccgtttaagtagtaagctgaccttctgaaccaataaataagacagtggtttctttcttttgtagaggtcacctgttgtaaatctgagaacatttgaagaatttactgcattggctcattaaggttaaaaaaaaaaaaagtcagtcgacttggtcagcattacccagtgcccatggttttcagagccacccctgggtgaactgagaatggtgtttgctccagagcctggggccacaggggaggctggggagagactcagggccctactgttggaatggccttcacatgacttgtcctgcttccggcttggagtatgaaaccaccaagaggtatgtacagctcgcattccagcatgggaggcggggaggctcctggacccacggggctgtcaggttgaggcctgctctgaacgcctgagcactgcgatcctgatgtggagagcttccttccacctccgcctcctcctcacgctgcaacagcgcttggctgtaccttgccattacttgattatttgcagaattagaaaaggctcaagtatctgatcataattttttcctggatatatagcacatcctctgaatatgtaatcagtgctttattgtttttttgtttttttttttgtttttttttgttttttttgagatggagttttgctcttgttgcccaggctggagtgcaatggcgcaatctcggctcactgcaacctccgcctcctgggttcaagcgattctcctgcctcagcttcccgagtagctggggttacaggcatgcgccaccacacccggctaattttgtatttttagtagagatggggtttctccatgttggtcaggctggtctcgaactcctgacctcaggtgatctgcccgcctcagcctcccaaaatgctggaattacaggcatgagccactgtgcccagcctgtttttttttttttttaaaggaatatgggctgttagatgttgtaaatggataggcaatgcatgttcactttttctgaggcttgttcagggaaactgaaaaaagttcctctgtcaccttgtgtgcatctctgtggtactgtctctccagggtagtgtgggatttagaggagaggggctggaggggaccctgcagatgtccctatgttctggaggcggacttgtttatttttgacagaatgaatcttggacatgggaggatctggctctgaccagccacaaattggatatttgtttgacctttttattccagtgagtgggaagagatccggtacctcctttatcataaatcttgccttgttgtttgctccagtatagcacttcatctgggtgctgtttgagcatctggctttcatttttaagtgccggcaggtgcaggggcaggcatatctcagggggccgtggcagatgaacgagatgtggcaaaagctggcgtggcactgttgggggtgagtttcacgggagaaaaaggagttgagcttattcttgggcaactctttgccttcctgctaatgtttccaagtataccatgcaagaatcaactccaaggggctagctgaagctggggaaggtgaagaagtgagtctgagttgtctagaacttgattggtaacatctcagggtactgccagctgctggaccaatgtggttctcctccttccctgcctctcaccccttcaagatgagttgtcttgtctctgacccatcctacaacagccacaagtcagtcgatcctgtgtttgtgctcccgaaggacttggcgacttggctaacaaggagacatttgttatttcatttcctcatccattattcatgcagtgagaggtaattagcatttagtaatgtggtttctggggtaggtgagttgggttcattcattgagcaaacatttcttgatcccctgctctgggttgggtgcaggccagggggctagggttacagagatgagggaagggcctagtttgcctttgagtgtgtgtctgtttggggaggcaggtgatcagcgggcgaaggatgctaaaggtgtttcaggaccaccgagcagagagtcgtttctggggagagccagggaaggcttcatagaggaagtggcatttggcttgggccttgaagagtgaacaggaaagaattgggatggggggaatgtgcccaccctccagtgcaaactgggtcctggggtttagcttctgatgatggatggtcatggtcatgtgtctttctgtgcagcgctgcccacttctttccccaagcctctgtcactcaggagaattaatacgcctcctgcccagcatctggtggccctgccgccctgcttgcttagggagatggctgacagttggcaaggaggggagctagaagggtgctggtgagtcatcaggctccccatggctaaaaagagagcatacttcaaagcccagagcatatcaaagatgggttgtgtcacacccactgagcattttacacaaataagaactcagtttctgactctgcagcaaaaagttggtcagtttttgggggattattattattattattttttatacaggtgcggtaggttgagaaatattattcatggaaataggctaagttgaaataggctctatctgttaaggaatagacttattaaggtggtgggtgtgccctgtgtctctcttctttaaactccgtttttctttgttctagccaatgttttattgctgatatgaatcactgaggggcttggagggagaaaggaaagggtttctgtataaacagctgtcttgctgattcaatctacaaagtggattttatagctaaagtatttgttcttgctttaaaatgccaaaacagcaccgtcatttcctcagcgaaaagaagggtctttgagaatatggggctttctgctcccgtcacaaatctttgcttgggggagaggaggaaggaattccatagaacttttctttgaactggtctttctaaaagaatctcatgctcagaggagaagaattttctttacaaagtttgagttaccagttcacgcagccttccttttttttttttttttttttttttttttttttttgccttactacatgttctggtttaaaaaacaataataatcctctctggtcatcacagctgactacctgcttaatgtttgcatatagatatttcattttctttttttatgcaagatttcatcgttgcattatctgagatagttggttgccctgagattattaataaattgagacagttaatggtgtgtgactcagaacatacatttaaaaacaagttggaatagaaataggtcttttacaaaattaattttttgttaggctcctctcttgagcctttttgtttgaagccggctggctttgtagtgttcatatatggccgactgcaattaacataaattacttttaaataccagttagttgctgtggagagaggccagggtggtggctgcttatggaaggttaagaggcttggtcattgtctgggtttttatctcactgtggatcaaattctgttccctttggaggccagaagatcgtgtcaaagattgctttctttgacgatagggagaaggattaagtctttgcccagagtaccagtacttaccaaggaagaataaataatcataaaatgtttacatatttaaaaacaaataatattaaaatgcaacatgtatcctggattggatccttgaacagaaaaaagacatcagtaaaaaaattgatgaaatccaaataaaacatgtagtttagttaatagtattgaatattgaatcagtgttaatttcttagtttgatcaatgcatcgtggttatgtaagagatgaacattaggaaaagctgaatgaggggtatggggaactctaagctatttttgcatttcttctgtcattcaaaaattattttgaaatattaaggcttttttgttttttgagatggagtctcactctgtcgcccaggctggagtgcagtggcgcgatctctgctcactgcaagctctgcctcctgggtttacgccattctcctgcctcagcctcctgggtagctgggactacaggcccgcgccaccacacctggctaatttttgtatttttagtagagatggggtttcaccatcttggccaggctggtcttgaactcctgaccttgtgatccacccgccttggcctcccaaagtgctaggattacaggtgtgagccaccaccatgctgggcccagtttttttttgttttttttttttttaagtatatttgtaatattgcttttggcttggttgagattatacaggcacaccttggagatattgcagattcagttccagaccattgcaataaagtgaatattgcagtaaagctagtcagatgattttttgtgtgtcttagtgcatataaatgttatgtttacactatactgtagtcaatattaagtgtgcaatacattatgcctaaaaaacaatgtgcatgcctcaattaaaaaatacatttgataaaaaaaaattgacaaaaatctgagcctttagcaagtcatagtctttttgctggtggagggtcttgcctcaatgttgatggctgctgactgatcagggtggtggttgcagaaggttggggtggttgtggcaatttctttaaaataagacaatgatgaagtttgctacattgattgactcttcctttcacgaaatatttctctgtagcatgcaatgctgtttgatagcattttacccacagtagaacttctttcaagattgcagtcagtcctctcaaaccctgcagctgctttttcacctacttttaggtaatattattaatcctttgttaccttcccaacaacgtgcacatcttcaccaggagtagattccgtctgaagaaattactttctttgctcatccataagaagcaactcctcatcattcaagttttatcatgagattgccgcaattcagtcacatcttaggctctgcttacagttcccttgctctttccaccacatctgcagttatttcctgcactgaaatcttgaacccctcaaaatcatgcatgagggttggaataaacttcttttaaacttctgttaatgctgatttttttttttttttactttctccataagtcacaaattttttaatggcatctagagtggtgaatgctttccagaagggcttcctttcactatgtccagatttatcagaggaatcactcactatccatgacaggcatagccttacaaaatatgtttcttaaattaattgaaattacccctgatccacggttgcagaatggatgttggttagaaggcatgaagacaacattaatcttcttgtatacctccatcagagctcttgggtgaccaggtatgttgtcagtgagctgtaatgttttgaaaggaatctttttttctcagcagtaggtctcaacagtgggcttaaaatattcagtaaaccatgctataaagagatgtgctgtcagccaggtgtggtggcttgcacctgtaatcccagcactttgcgaggccaaggtgggagtttgagaccagcctggccaacatggtgaaaccccactggtgtggtggcacatgcttgtaatcccagctactcgggaggctgaggcaggagaattgcctgagcctgggagttggaggctgcagtgagccgagattgcaccgttgcattctagcctgggtgacagagcaagactctgtctcaaaaaaaaagagatgtgctatcatccaggctttgttgttcaaatttatagagcacaggcagagtagatttagcataattcttaagggccctaggaatttcagagcggtaaatgaggattgccttcaacttaaagtcaccagttgtattagcccctaacaagacagtcagcctgtcctttaaagctttgaagccagccattggcttctcctctctagctatcaaagtcctagatgccattttcttccaataaaagacttttgtatacatgagaatatctgttgttgaatgtagccaccttcatcagtgatctcggctagatcttctggataacttgctgtgtagcttctacatcagcacttgctgtattactttgcacttttatgtcaaacaaatggcttctttccttaaatctcatgaaccaactttgctgcttccagtttttcttctgcacttctcagccctcatagaattgaagagagctagggtcttgccttgggttaggctttggcttaagggaatgttgtggctggtttgatcttctatccagataattaaaactttctccgtatcagcaataaggctgtcttgctttcttatcgttcatgtgttcactggagtagcacttttaatttccttcaagaacttttcctttgcattaacatcttggctgtatggtgtaagaggcctggctttcagcctgtctgggcttttgaaatgccttcctcactaagcttaagccttcctagcttttgatttaaagtgagagacacgtaactcctcctttcacgtgaacacatagaggccattgtagggttattaattgggctaatttcagtattgtgtctacaggcctgcgggaaggggaagggacgtgggggaatggccggtcagtggatcagttagaacacacacaatatttattgattaagtttgccatcttatttatttatttatcttaatcaatatttatcttaatatttattaagtttgccagtttgtggcaccccaaaacagttacatcaaagatcacagatcaccattacaaatattattataataataatgaaaaagtttgaaatattttgaaatgtgacacagaaacatgaagttagcacacgtggttggaaaaatgatgctgatagacttactcagctctacaattagtaaaaaatacaatattagcacagtgcaataaagcaaggcacaatgaaatgaggtgtgcctgcctttggtttatgggcattcatagtgatgacctctagggagggcagattatttccttgctgccttggggactgggaaactaaggccttcggggatgcagggagaccctggcttctggcttgtcgcttccttcactctgttcatctctgcccatctctacacagcaccgtggacccacgcacggctttactgcccacatacccttctgaaactggtatctagctgatctctcctaactccataggcactccttgcctgagatgggcagatggcctttggtgacgtgctgtcattctcctctaaggaccaagcagtgggatttttttttaatgctgtcttgtttactctcattccaggtgtcttaacttttagcagccagattggaagcttcctgagggtgggaatttttatcttgcttgctttcttttaaaatccatttaaaaaatgttcccaattacataaataatgcatgtgtttaataaataaatattagagaatttatagcatcaaaagtaaaggtttccgtagggctgcctccttgctaccaccactgttaatgaattagagtatatttctctatattttttctgcgtgtactacaaatatgatttacaaatgtgagatcctattaaacataccattttgtactttccactgggaatgcctcattgtcaaaggaaatgctgagtgccacctttaagatgatgtattcatgggtgtattagcccgttttcatgctgctgataaagacatacccgagactcggtaagttataaagaaaaagaggtttaatggactcacagttccacgtggctgggggagcatcacaatcatggtggaaggcgacagtcatgtcttacatggtggcagacaagagagaatgcaagtcaagcaaaaggggtttccccttataaaaccgtcagatcttgtgagacttattcactaccacaagaacagtacaggggaaactgcccctacgattcaattatcttccactggatccctcctacaacatgtgggaattatgagagctacaattcaagatgagatttgggtgaggacacagccaaaccatatcagtgaggcaggggacagagtgtatctctcacttgttaggtcctagaaagtctttgtaagctcctgtttcttctctgggagaggcggggctgtgaggagttcttagacacggagaccttccttatgtaacaaaacatcccagaagccttatcagtgttgttacaaccccagttagtgaagtggtgtggatacagggatttttctagaataaatcttgctttgtggtatggatggattgattcatttccctttgattttgtgtctccttgatagaagtttgacttgacacaagggaaaaaggtggtagtaagtactgagcacccttaagaagtaggtttctttagagcggatgcaaggtcccagaaggacagtgatggtgctgagaggagaggagtgcaacctgagtttagttgaattttccttcctcacatataaaatatcgcatacatacaaaaacatgtgagatctccgtgtaaataggaatactcacatagtcaccatccggcttagaaggagaatattaccaatacctttgatacccctgggtgtttcttcccggttttacctgcctgccttcctatcacatttgggtttgcctgcttttcacccttgtattagaatacttttttccattcatgtggtgtttgtggcattcattcatgttgatgcaggcaactgcagctcatttgttttcattgctgtagcgtgttcattgaatgaatgggccaccccttgtcttttcttcttttaagggacatttgagttgccgagtttaatttttggctagctcaaaccgtgctgcagcgaatattcttggttttttttttttcaccgtgaatattcttgtatatatcttctggtgtttatacatgagtttaccagaatgtgtatctaggagtggaattgctgagtcttagggtatctacaacttcaggttaactagaaactgcattgcaaagatccccttctttctgcacttgcaccttttgtgatatattgtagttttcattgctctgcatccttatagacagttgttattttcagacttaaaacattttttccaatcttgtggaatctcgttgtggttttatctagcatttccctaatcactaacaagattgaacttcatgcttattattgatggactaactgattggtgcatgatacttttacatacttttggggtacatacgatattttgatatgtgtatacagtctgtaatgatcaaatcagggtcatcgagacatctgtcacctcaaacatttttctttgtgttgaggacatttcatttcttccagcgattttgaaatacctttatttatttgtttttgagacagggtcttgctgtgttgcccgggctggactcgaattcctgggctcagtagggcctcccactttagccttctgagtagctgggataacaggtgtgtgccacggtgtgcccggcctagttattttgaaatgcacaataaattagtgttaactatagtcacttgactattctgtcgaacactaagacctgttccttcttcccaagtgtatttttgttcttgcttattttttagggaaaggaatccaggcacacttaaacacacttattaaatgacacaaatggctgctttggtaggacatgttctccccagtgctgttttcttgtctggggatggaatcagacaaatcttttcacttactgtgagaattttgggagtgtctattagcttgcagcacttttcttggattctgtgtattacattttgagaacccagctgatgcctggttctgttgaaacccctaaatccacatcctcttttgaggggagcattttattacttttcatgtaaataggcaaataaatgggacttcaggcagagtccctgggtgtttggtggcagcagatcgtgggcaagggagtggctttggggaggagttgggggacagccccaggcaaacatcaacacctaagatagaaaccccaaggtagaaactggccgagtgaggaggagagagggagaaacagcaacacacttttcatagggagggatgagggaaaaaggaccaccaggctccagctggtgatcagaggccagagcggggttgggcaggactgctggagcacaggattccctgtccggtgttcacggggaagtccccaaatctcaatgagggacccattggccagggagggttctgctgtggctgtagctttggcgggggcggtctgttttactacatgttcagctgagtgctttcctgtgaaaatagacctttgatgttctggaaaatctgctttaacacttgggggagagaagctgcctatggaaggggaaaaaaaagttatgttacgaaagaatggaattgcacagctcgacatatgctgggttggttgttctagtaaccccatgagaagaattgcaggaccaaacacaggctttcattcccaagtgagaaagcatgtttagaaacgcagtgtgaagggggaaaaatatcagaggctaacattgtgtttctgttgtgaatacaactatataaatattacctgtgcttatggacaaggtccaggaggaacagggaaaaataatagttgatttcatttgtgtggtgggatagtgggtgttttaaaaattattgtattattattattgtacaggaaaaaatctttactcaaataatcctggcctcagcggtctgttattttgctacatcactcggaatacctgtcaacacatttatttattgagttcctaatatgatgggccctttgaggaagaagacactagtccctgcctccaagaaacttacaaactattatgggatgctagactgtaaatacccaggatgtgaatgatagttcagtagcgtaatgggccgtcacacaaggtgtcgtgtggttaattgtcaaaggaagtagaaaacagtacaggctcttcctggggtctttcaggaggatttctcagaagaggtggccttgagagagtccctcaagcatgggaggacctgaattactagagggaggagggaagggagtcttggagggaaggagcagggagggagagctttatccaaaggggaacacccagaaaaatagttgggagccatattaagagcccattgatggctgtgcgccatggctcacgcctgtaatcccagcactttgggaggccgaggcgggtggatcatgaggtcaggagattgagaccatcctggccaacatggtgaaatgctatctctactaaaaatacaaaaaatagctgggcgtggtggcgtgcgcctgtagtcccagttacttgggaggttgaggcaggagaatcgcttgaacccaggaggtggaggttgcggtgagccgagattgcaccactgcacttcagcctgggcgacagagtgagactctgtctccaaaaaaaaaaaaaaagaaaaaagaaaaaaagaaacccattgactatcaggataaagagtaattttttttttttttttccttttgagaccgagtctcactctatctcccaggctggagtgcagtcgtgtgctctcggctcactgcagcctccacctccccggttcaagcgattctcctgcctctgcctcccgagtagctgggactataggcgcctaccagcacgcccagctaatttttgtattttgaatagagacagggtttcactatgttgggccaggctgatctcgaactcctgacctcaggtgatccttctgcctcggcctcccaaattgctgggattacaggtgtgagccatcgcacccagccaggagaagctattaagagtttacccagaattcctccctgagattcactatttgtcagtagtcttaagctatttttgggtaggtcctctttcagcatagggtgaaacctctggaccctctcctaagaaaaatccccttagaactacaagaggtctcccacagaggggttttcttaaggaagactccccacagcccatccttggcagtgtagcaaatatgtatccagcatctactgagtgccagatgttttgtgggacggggggatacagtaaaaataagacaagccaggtcttcgctctcagagagcttatagtctaaatggaaggacagatgctgaagacgtgattacaggcaggagagtgttattaggaggtagaccagatgcttgggaagagtgataggtggccccagcctttaggaaaggccccctcagttgggattcagaatgaggatatttaggggtacagaatcccacggtgtgagttgcagaagggcccgagcatctgtctggtggcaccttctcaggaggaacctcactgaccggcatgggtgaaccgttcagctagggtcttggggaaagtcaggcatctctggagcctccgatgttgaggatagggtaagagcagcattgttctctggggccctttttccttagtaacacacactcacccggagccagttgtgccttcttgcaaacaaacagctttcaagaagagttaataaattaatcttctgggaaaaagaatctgctctgcgccagcaagacctctagcagccagggccagagacttgggcaatgtagtcaaaacacacgctgatcactgtgtgttactgctgacgaggttttaggcagccagttcggtgcgtttgatatcgggcagttcaggcagggtgaaggaagataaagtgtgttaaatggagctctcacaacaaccctggaggatctagtcccattttacagatgaggagcctgacacacagaataaaatcgacttaaggtcagctacgagtccctggaggctagggttgcgtattctgttccttctctgccattgagttggctttccctttatccttttcttccgcttaataataataggtaacatgacccacaaggtactgtgaaaagctctatgtaaaccatcacttcttactagaaaagcatttcaaaccatctgctcaatctatatttaaagagggtgtaatgcccatactttattaaggtctaactgtattaaggtctggatatactgattcattcaacacatatttattgaatgtctgttatgtgcccctaggacatgtcagtgaataaaactgacaaggatcctggacctggtggggctttccttctgcttggccatacagagtagagagaagcctggcctttgcttgctctgggggttggggaagcaactgggagcctctggggacgctgaatcaggtcccactggctcctctggctgatgaggaagagcttctctggctgcctcttgtgtttccttctccttgtgccttaccacctgcagaccttctggggcttggagttcactgccgcctatagagaagatcccttccttcctactaatgagagagagagaaagagcttcccactgagatctgcttgttaaaaagttagactcatctgcaatttcaccaaacagatgaccttacagtgattaagtcacaaaacgaagtcctgtccgcccctttatgttggcttcctttgtagacacgtcctccccacattatcttccctctccccagtgtagattctggagttcccatcagggttctgcaacttgctcaaatgaggatgaggttggaagattcaagggtgtgacactgtcatttgtcctaaatggaggggcaggaaagagatcctgtcacccctcctgttcccaggaactgggggtgtacctggtgacagttagatgtgtatacatgtcatcgctgttcacatgctctgctgccaattttattttgttttatctatttatctatctatttgtttgtttgtttatttatttatttatttttgagttggagtttcgctcttgtcgcccaggctggagtgcaatggcatgaatcttggctcactgtgatctgctgccaattttaatattccttagtatacacaatgtgtctgccctcatgaaaatgtggtgtgaggatacccatatcatattcaaaagcaaagtgatgggctaagtaattatttggtgttcagaaagattcactggagctcctttaactagggggtccccagtttgtttacatgaggacttggtctttgatacatttgtgcagtttttgaggaacattttgagcttcggatgcctgcttattccttgggctgtccaacatttcctaaatccttaggagtttttcctctatttcctaacactctgtgcaaccccctgtgattaatttcatatgtccacttggttaggcctatggtgcccaattgtttggtgaaaccttagtctatgtattgctgtgaaagtatttgtggatgtgattaacatttctaatcagttgactttaagtaaagcaggttactctccatgggcaggagtcacccagtctgttgaaggccttaagaacaaaggccaaggttttcccaggaagaagcaattctgcttctggactgcaacatggaaaccctccctgaatttccagactgttggcctgccctaggattttttttttttctctttgagatggagtctctctctgttgcccagagtggagtgcagtggtgcaatctcagccctccgcaacctccacctcctgggttcaagcgattctcttgcctcagtttcctgagtagctgggattacaggcacctgccaccacacccagctaattttgtactttttagtagagacagggttgcaccacattggccaggttggtctcgaactcctgacctcaggtgatctacttgccttggcctcccatccactggccttggcctccttgggattataggcatgagccaccgtgcctggcctgccctaggattttcaggcttgccaaccctccacaatcaaaagccaattccttaagataaatttctctccctctttctctctctctcctgttgattcgatgtctctggagagtcctgactaatacattccctatcatagcagttgcttgtttctctttttctctctcttggaccataacctgtatgagaactggaacagtgtcttgttctctgctccattccaagtgccttccatagagcctgacagacagacgatgctcagtcaatgcatgaagaatgaatgaaggcatctgtactcactgagaggcagtggatttttgaccctttgtggtcagacagacctgagttggagtcctggccccaccattgattagctgttggatcacaagttccttatttgtcacagaggaggagtaatatctgcctcccaattggctgtaaggattaaatgagacgacgtgcctggcatgtagtaagtcatgcgaggtaaatcaaataatgttagctactcctgataccaccaccgccaccattttccaaggttgttttgaggattaaaggagataatggatagaacattcctagcacataataggggatcataagtgctagttctcttctaaatatcaagctttttcatgtgtatgtttttgctaagtgtataatatctatttaaatcccatgaagcagttttaattgccccatgttaatgctgagaaacgaaagcatagaacttaagtggcttacccgacattcagtaagcagaatgttttattgtgtgccgacttaacggttgggatttcctctttggcatatgatgtttgaccctgcttttcccctgaccttgtcatttcattaccatcagcttttgcttggtatggacaggtgtatacttccctaccacaggtgagcccttggttccttagcaggctctcctttacctccttggtgtggtcccagggacccagcctgctctctcttcctctggcactgccactccatccctgagagtcttctcagagactggctcttgagaaggtacaacccccctcatttccacttccacgttgtccttgaggaggagctgtttttcctggtgagttttattgttcatcattgaaggcagaagtttcagtgatgccacaggcgagggtacagttgggctattttcttttgtccgtggtaccatggaggaaactgagttcagttactcgtgcaaggccacagagctgtcacctggcaggcttcccaggttgagggctgcctgtattttcatcagcatgaggggatatcacctcctcagctattagctcatgtgatcctacaggctacaactgagtcttctttgtagtctcaacgcaggttttctgtggactggagaaagcctttggaaagaaatgttaatactctttaataagtgaaaatgcactgtagaagaatctttgaacataagtagttctatagatcatctattctactgggcttaatcatcataggggatttttgcctcaagtttggggctaaggaacttgtaagcatttctgtcttacccatgagctggaagctgtgttcagagcaagcttctcttatacttggatcatgcccctggtgccagctttattctgaaattgctttgggctttctgacagctcatattccccctctgccaccagttagcttccaggatgggcttgcagaataagtggctttaatcgtctgttggccacttgttatatatccctaccatggggaaacgtgtgtaataaaacatgaatatattggggcgggaggactttgtatgtgttaaacatattgtgtaggtgtataatggtgaaagaaaagtgcatgcaataaatattgggaaatgtttgcacaaatgagcaaggatttagtctttgtgacttgatcatccttgaggggaattccttctcaggaaagcaggtgttagtgccagatggtcacgtgtcagtttcctgagatcctgctcaggaaggagtcgttggggaagaggaggcagagagggccctacttggggagtctcaatggatgacacagccagaagagaggagagagggaggcacgactcagtggcagaagggttctcgaggcccgagtggagtgctattagtaatcaatagattcagaagcagcctgggcctgccacgagaagctggcagtgttggtctctgtccgctgggcctcagcttctctcctggcagacggtgatgatgggggtgcaggggctggggagtatgaagggtttgggctttgatgagtcagtgaatttagcatttgtgtgtcagttcagacccggctggcctggaagtccaggtggcagagggcaagtcaagccctttctggtactgtattctccctctttccggcccagcaggcctgcctggacctgtgttctgcttctgtatcctggactgagaatcactgtgctgcctcctgaggagctgctgctggagtggaccttggggcagctagcacattgcctgtcttcctaaaggcatcggtgcacagggcacctgggaatgacagcgggcctgagagcagagctcagtggagatgctggacccctgaaggttgtgttattttttttttttttccgagttggaatctcactccgtcacccaggctggagtgcagtggcgtgatcttggctcactgcgacctctgcctctcaggttcaagtgattctcctgcctcagcctcccaagtagctgggactacaggcacacaacaccgctcccagctaatttttgtatttttagtagagacggggttttaccatgttggccaggctggtctcgaactcctgacttcaagtgatccacccgcctcggcctcccaaagtgctgggcatcagccactgtgcttggccgactgtgtcattttgtacttgcagcacaggaaggaacttgtcttttcctcgtgaagggttagaggcactttggttcttcattgggcctcagtttacctaccagtgccacggggatattaatgagtgcctcacttgactctttctcccacatggatgctgtgcagatagaggttggtcctagagaggcccgagagccttcacagatggtgtggcagcaccgcagagcgccttggcatcagatagacccaccttcaaatccttttctgccccttactatctggggacccttggcatattgcctgttctttctcggcctcagttttcttgtcaatttaaaaggaataacaccattttttgaacggaatggttatactcatttgacaacgttgttgtgaggatctgatgggtttctctgcaacatgtgtcaaattcctgtagtgcccaggacacagtagatgctcaatatgtggtggctctgattactattattggtgttgtttgtagaaaattgggctttcgggtccatcccactggtggcttgtgcctgggagtttttggcactcagagaaactgtgggagacctttagctgttgagaccagtcatggatgtgtgtgacacatagggtctatggtgacttctcagcagatgataaagtggtgctgggtctttcttggacagctcaaggatggaggtgcttctttgccagaagcagggttccctggattctgaaatctcattttgcaaaggattaaagataaaagagagaaaccacagcagttctacatgcggtaaaacactccccactgttcaaggaagttcctggagaggtacctgaaagaaaccctatatgctgggagttggtgctgttaacctttggctcaggggaagtgggaaagctgaaaggacagaatgaaagccatagtattggctatatatatatttttaaacaggccctgttctcttgcccaggctggagtgcagtatatacacattgctcattgcagcctcctattcttgggcttaagtgatccttcccaccttagctgcccaagtagctgagactacaggcatgggctggctgctatgcccggtaatttttaaaatttttttgcagaaatggggtcttgctatattgcccaggctggtctcaaactcctggcctcaagcgatactcccaccttagcctcccaagtagctgggactaatgcaaccacacctgattaattttgtttgttttgtagagactgtggggatggggagtggttctcattattttgcccaggctagtctggaactcctgggatcaagtgatcctctcaccttggactcccaaagcgctggaattacgggcgtgagctatggcatccggccaggtattgccttttgatacctgctttctctggagacaagtcatagcactcaagcctggaagggtgatcactgtgttcaggtcggagacagagcacagtcccagcagccgagccatcaaccaggatattgcagggagaggcccttggccttgctgtcagagagttatggagagtgcaatgtcaagagaactacattattgtatagtttcttttcgagagaactacattattgtatagtttcttgatgcctgaaggcaactttgcaggaaggaaaggccttaaatcttaagactgtgttgggttgtgtagcaattcctgcctaccttctatacttccttcctaatttttctttttcaaaactgccaactggaggaaacctggtgtggtggtgtttgagaggctccgggtgggtgctgacctctggcttcaaggctgcaggctccctggggcccgggttgggatgcctcccctggggaggtgcctgatgagagagaaagcaccctgctgcagtttcaaggctgaccagccttgtaaccttcaaaagagcaaaccctgcagtcttccagagtgtaaattgaagagaaagtgaccctttcatatttcaggtcctgtgtgagaaggaaaagaaaattctctgaagatgcctgggctgtgtttttttacaggcttggaagccaccataacttttaacttgactccctcctctctgctctttgcttgtgaaggattttaggattttgtatgtgtatgaattaatgggcctgttttggatctttcttccttagaacacagatgtccagggcaccattatagttccaaggggggttaagatttcccctttgcaaaggtcgacattggatttcttttttgggacagagtctcgctctgttgccaggctggagtgcagtggtgctatcttggctcactgcagcctcagcctcctgggttcaagcgattctcctgcctcagcctcccgagtagctggaactacaggcgtgtgccaccatgcccggctaatttttgtatttttagtagagacggggtttcaccttgttgaccaggatggtcttgatctctggacctcgtgatccaccagcctcagcctcccaaagtgctgggattacagtcgtgagccactgcacccggccggcattcgttttctgatgtctcatacagactttctctgcttgccttagggctgcagctaagtttaaacccagtgggtttgtgcaaatgtctgtccctgtagtatgcattcagaatgtgttggtctgactctgtttggtctccttttctagcataaaacacgtccacactcggaagatggtaaagcaacagtccaaatctgctttcactccctgcccagcatttagtcaccgctgccttttgacaaaagaattactttcccttcctggttttgaattgaagaccttttgtgtatttactgcaaatatgataaatgctagtctgtagaaaccagctgcctctgagggctgggggcagcatttctaacacctggcagtttgcatttcaatatggtggcttaaagaaaactcacacacaccagaaaaacaaaacccagctcaaaacaatgattattcttggctgcctagtgggaaacaagagtaggggaggctcagtgggccctggcacaggcaggggaacttgctgagaagttactgcttgcaaggtgaggtccgctttcagttcggtccggttcatgtttatcaacgccttctgtgtgtaccgtataaggtgctaggcacagagacaggtgagacagggctctaccttgagctcacaagctgttggttgtcagataagcaggtcagggaacctggaggctccaaggatgaccaaagaggcgggcctgctggggtgggtccgggcagtgtcccagaggaggctgtacctaggattgggtcttgaaaactgatgtatttgtttgctagggccagtgtaacaaagtaccacggactaggcggcttctacaacagaatttttttgcttcacggttctggaggctgggaaattcaagatggaagttttgatagggttggctcgttctgagggctgggagggaaggatcattgcaggtctccctccgtggcttctagatggctgttttctcccagtgcccatatgccatccctttgtatgagtgcacatgtataaattgtgcccagatttcctcaaggacactggtcctattggattagggcccaccctaatgatcctattttaatttaattacctctgtcaagaccgtatctctaaatacagtcatattttgaagtaccagggcttaggacttcaacatgattttttcaggggacacagtttggcccataacagatggtaggagtttttcaaggagatggagtaattgtggaaaggggtttcccgccaaagggaaaggtaggggtacagccaccgggcaaagtagagcatcatgcattggggagcctcatgtattgtggggtgtaagagtgggcagtggcaagagatggaaaagggaaaatatagggtgagatcatatgtgaccacctgttcagtcaggcacctggattttttttttttttttttttttttttgagatggagccttgctctgttgccaggctggagtgcagtggcgcgatctcggctcactgcaacctcccactccctggttcaagtgattctcctgcctcagcctcccgaatagctgggattacaggcacgtgccaccacacccagctaatttttgtatttttagtaaaaacggggtttcgctatgttggccaggatggtctcgatctcctgactttgtgatctgcccgcctcggtctcccaaagtgctgggattacaggtgtgaactcctgcgcccggccgcgcctgcgtttttagaagatgccccaagtaaatcatgtgcacagtgaagtttgagaaacatgagtccagagctgtggttctcagccttggctgcaggttagaatcatcaagcggagggatgctggtctctgaaactctgatttacttggttgggggtgtggattgggctttaggagcttttgaaagctcaccaggtaatttttctgtgcagccaggattcagaactgctgtttgggcagtggggagccaggaagagtttaaagcaggggtgcgatgtggggtggaaagtatagaaactgttttctgccctctcttgaccaagagcaggagctcatggtctttggagccaaaagcagccctgccggataccaatgtcttgtcctggtgtcctttgcctggggcaggtcaggcgagtaaaggagaaacacaggcccagctgatttgcctgtcattgggggtgagggctctgatttgagtgtgtcctgtcgactcaaggaccacagacgtggggcatttgactccattgctggcagcgtttcttgggggcttgggggtcggtggaggggagcctgtgttgggggaggcagggcagatatgcgggtggaagaggggagttcccagccaggttttctggaaatggtacattcttatttcccatagtaccaaaggttcttgaaggctgggcccactcctcagaaaggatgctttttgtggctgttgcatgcaccagataagctctccaaagcccactggtggtaaaggtgatctagagcaaacaaacatcagtgaaaaagcaaacaaacccgaacacccaaacagcatttatcccagtttagcggcgagacttggattaggcaggtcacatggcccacaactttccttcaatccttgggagacttcttccgtggaaacctttttcggcagctttgcaattctgattttcagttaattagatttgtgctgtttgggagacttggttaatgcatttcaccccacagagctaatttgcctctgtctaaattaggtccttgctgtggcggagggtgtacacgggctgtgtgaatacagactcacgtggggtattgagagaccattagacagtaaacaggagagggctttgaaatcacatttgtcatcatcatcattattatggaatatctgaggtcccaccgagagaatagaggtgttcttcagagaaaggccatcatgtgagtacacctggtcttgttacatgtctcttgaaatacaaccaggtgccctcttgtactgttaacccagggccatagcatgaaggagaagggaaatctatctggagggtacaaagtagtagatactgctaagtaatacatttacaatctctaaatttttagggctgagagggaccttaggagctatcttagccagtccctcactttataagcccaggaatctgaggcctagggttattgctactttttttttttttttttgaggcaaggtcatctgtgatctctgtcatccaggctggagtacagtggcatgatcatggctcactgtacccttgacctcccgggttcaagcaatcctgcttcagcctcccaagtagctgggaccacaggtgcatgccatcacaccaggctaattttttaatatttttgtgtagacaggatcttgctatgttgtccaggctggtcgcaaactcctggcctcaagtgatcctcctgcctcagcctcctgaagtgctgggattacaggcgtgagccgctgctcccagtccattcctacttttgagtttggaaaatcctgtgcttttctttcctttcccatgtgtacttgcccccttccccatggtctttggaggcatgtgagggatggagggaggttaatctaatcgcatggatatatttgggaggtgactatgggaactgagtgaaggcttgaggtccggttttgtggattcatcacaaatgctatcctttgttccctttctcctgtgtcagaaattacagactctgttggtgatgggacactagaaattataatttaataatttgcatgctgatgatcttctcaaaagactttgaggcaggaaaaaaaaaaaggcagggggcacctagggagatagaatcaggaatcaggctctttgtttccattgcccacaagagtgctcaaaagccatttgtggaggtgggctgtgttttcagaggccctgtcaatagttaagatctgtacatgtcagaggccatgcatgccacctagactagggggcctttcacctctttgccatctctgataggttggaagaagcttgactgctggagtactgatcagtgggtgggcatatgcactcgattagccacgcctgccatggccagggcatgggggtggcagcatgcttactgtctgttgccatctcttcagcttataccaccaactgagatgatgacgatgcctggagactcttatttcaggcattttgaaaaaaggagacataacttctgtccctgggaaaattttaaccccatcagaaaggcagaatatatgcacaaggaggccttaatgcctaaagaatctcaacaatctcaattagcattagcattattagcataatttagtaataaccacccattacactctatcccatgttatagttttgcttttttttttttttttttttttgagacggggtctcactttgtctcccaggctggaatgcagtagcatgatcttggctcactgtagcctacacctcctgggctccagtgatcctcctgcctcagccccccatgtagctgggactccatgttatagttttgacacacggaatagataggacagaaatgaatatataaggcagagaaagaagtcaggacactgagatagggacttatttcctgaggttacacagccagcaaacgcagagcccaggataatgtgtatttggggtagtggtgccccagcctcagaatgtgcctcttgggaagggtgctccagggagtggttgaaagcagaatgtgggccaggcacagtgactcacgcctgtaatcccggcactttgggaggccgaggagggaggatcacttgaggccaggagtttgagaccagcctggccaacatggtgaaaccccatctctactaaaaatacaaaaattagctgggagtggtagcacacacttgtaatcccagctactcgggaggccgaggcaggagaatcgcttaaacccaggaggcggaggttacagtgagctgagattgcaccactgcactccaacctgggtgacagagggagactctgtctcaaaaataaaataaaatggaaggtggaaggtgagaaggtgagaaggtgggaaggtgggaaggtgggaaggtgggcaggtgtgagcatgtcctggaagaggaggaccatagaggtgaggtgggagacccggggaggtttttcactgttgatggactctgtgctctgagtgctctttcatcggagcctttcccccattccggattcttcactggttgtctgtgtctctctcatgggaccgtgtcctgaatgtcagtctgaagactctttcctcacttctgaggctacccctgggctctggctttgggggagtgctccagttttcattttcttcgcctgtttagagagtgtggccaccatatcacagaggactgggaatgggccggagaaattgtgggctgtgtcagggttggggcgttggtgctgctcataagaagcttgaaggcagagggtgctgggaccttctgtgtgaaacccgggtctgaaaaggtgcctgttgtggggggtgggggcggagggtcccggggagaaaaggtagctgacatagaagcacatacagcacgttcctgaatccaggccttggagtccgaggagtgcctttgtggcaagtttccccctttttaattttcttgtgtcgtttctcctgttaagtgcaaagaagatgcctcgctgcaggaacatctgtgctccttaggattccgtggctgatttgttacatataaatttcctaatgtaggttatggagctgttgagggagagaagcagggaagcaggctagggaaacatccttctccactcaacttaatattggtgcctgtggctccagggccagcccaggccccctgcctttaggtgtgtgggccctgaaaggacaacttttgtgcccactggaaagtgtgtgtggggagctgtggccgtagtcttgctctcttctgagctggtgatggggagcagccggtgattatgcagagcagggccttctgactctgggcgggctgagacaattgcttagatggttgtaaaggaggtgttcagaaatagtgcgacaggggcgaagcctgtgctgtcactggtgactggggatgcttgttagcattttctagggctgaactggttatcatttctatctcttcatgccaaggaagctgagattcagagaagcgaggtgaccttctcaagatcacacatgtgtttcggtggcatggccaggacgggaacatgaatgtccagattccccctggaaacaccatatttcctcaattcagaatgcacttttgttcacatttgcacttgaaaatccagtgcatcttacaaatggatggcatcatgtcagaatgatgcatcttatgatccacctgtgttagattcaatcaaatatggtagagacttttgatcgagagctgctttatggctggtattgggctttgaacacattttctcaattaatcctgaacaaaacaaaaccctcttgagtaggggtttgtttttgacagggtctcactctgttgcccaggctggagtgcagagacacgatcatggctcactgtagcctcgacttctggggcttgagcgatcctctcacctcagcctccctagtagctgggaccataggcacatgccatcatgcctggcgaatttttgtatttttttgtagggatagggtcttcccatgtcatccaggctggtctcgaactcctaggctcaagcaatctgcccaccacagcctcccaaagtgctggggttataggcacgagctactgtgcccagccgagtaggggttttctgctcagtggtaaagtggagcgagaggggcgactgcagctctcagatcccttattgttcctcaaatgagtgagctgtgagtcccccacccctcctacttggcccttccctttgcatcgtctcactctcagcttctctggaatgacagtgctttcttcctttgagtgggcaccaggctgctgccttgagttttctggacacttgctgctgaactgtgttccgatcgaaagaaatacaattactctctgagatttgaggggcgattgtgagctcttgcagtcaccttcttgttcaatacttgcttggagtgtctctcttgagaggactggaaatgcatctttgggtggaggttgatctgtatgaggactggctctatcacagggacagggatggtctgctttttgcctctcttggggagggaggagagttatttttatttaggtgtgaatgcgggggcttgaatccagggcagaggtgatgtctcacttctttcaggtgcaagccagtttgtaggaagataatagggaggattgttaggtatgctggggctgttttggagaatcctcaagggagaagccacgaagaggaggcactgtcagatgttcctcactagtttgcagagtgcttggaggtaatattttaagacagttgggaagggtcagaggtttctacccttagagtctcatcaaagcgctgagtgatgcccaaaggggatgaataattcttccagaattcggagtcctaagctttcctcttgctttcttgttgaaataggcaggctggttgagggatgcccctggccccgtcttagggtacatacagaaagaaatactaagcggactcttgctgtctttgcaaccaagcaaaggggtcctgcagagggtgtgtcaggaagggagaaagaagagacatgggtacaaagggctctggcagctgtctcagccatatatgtggtcatttcctagagatgagagtggacgtcttgtcctcctgcagcctgctccctgccatgctgccttccctgcatctgggcccctttatccctccttgttcccctcctacctttcatccagccctctagattctgtaccactcacctggagctaggtgagaaggatttaaggatatccactggctgtcttactctgggctataattggcggtgggggggatggatttgggggcctgggatggtctagcttcttcccatggactctgagtacccctaaaccctccaaacgtggctcagccagacaggctgggaaaagtgaccaggagtctcttattccagcttctgagactgctgtgttcttggtgagtctcccgcccgcggcttccaggcccaatctctccgttgttactgtgcaccaccaagcagagagggatggtaattatagatgctttaggagccgccatttgcttcacatggcaaggtgactcagaacattagatcagaattagagaaggagaaaaaagtgatcaaagaaagcccccctcccacgccaacctcccgtgatatcctagcactctagccttccgtcccaaataatagttatggaaatgcctcggcttctctggaaacaggaggacaagggaactctgttgcaccagaatccatgctgagctttctcttggactaggccagaagagctccctgcagccgatttgtcttctagcttgtgcctgctcacctgaggagccattgaatttgggctaaagaggtgcctggggacaagggtgagctggaaagggagatttggtcaaattaggaagggccctgctgttggatgttcttattttttcagtcttgggaaacagcctccaaagaaatccttttgtgttgggctgggcaactttgccatggatttaaacaaatttttttttttttgagactgggtctcattctgtcactcaggctggagtgccgtggcgcgatcttggctcaccgcaacctctgcctcccggattcaagtgattctcatgccccagcctcccgagtagctgggattacaggctcccaccaccatgcccggctagtttttgtattttcaatagtgacgaggttttcccatgttggccaggctagtctcgaactcctgacctcaggtgatccacccaccttggcctcccaaagtgctgggattacaggtgtgagccaccgcgcccaggccttgggtttaaattttaagctccatgagggtaggggcagggtgtgtcatgtttatagctgtccccacagtactgagaccagagctcaggagaatgtggtagctgaatcagggaatggacccagtatgtggtagccatgaagcagggagctgaggccaacttctttggtcctgagcgcaggaggcagacacaccttgtcttgtctgtttgggtgtcctctgcactttgtggtcagggtttggttctcagagtctgattaggagaacttgaatggaaaaatttattcctgtttcaggaaagggcagtaaaaatatttatttccataatcaaaatggaaatttaagtcaatgacaatggaaactatttttggccatttgcagactagggaggggagtgagagggcagaataattcagtcattgtaaattttaggggtgaaataacagcatagaaataaaaactccccaaggaagcataaatcaacccttaatcgaacataaacaacaaaccacgtaccactcactcaaaccaggagctgcatccctggccgtcagatttgtgcttggctgttggagtgacgtgccgcccacaaggtcttggctactaagggacaagtattgggttttctctcttctcctgaaaggctcttgttgacagcagacagcttctcagagcctctggtcaccgacctgttcttcccttcctttctcctgtgctgttttcaagacagaaagcccagctgtggcaactgcaggtctttggattagtttgacacctggggggttcccaggtgaaaatgagggctgcagggcagggagcaaagcccacttgggagttatgtgttgtgttggtgagaaacaggttgagaaagaagcagctgctgagaataatctagtgtatattggggcggggagcatattggtggggggagagggactgtgttggtcgtgagtgaccctgagtgatgggtaccgggggttcattctctcaatctcatgacttttgtgaaagtttgcaaaggtcagaagccagaaagaaagatcaaaagccaaaaagaaagggagcagctgaccccaagattcccacccccaaggcattacccccttgaatcaggtgtaggtctgtttcctcatctgttccacacagattgagtctacaaagacccaggtctcatatcctgcaggaaagtggagaagaaaaaatgtgagactgattttttttcagagttttgactgagagagtccgttttcccatggacttctggacatccatgcctgagaagcaccttgggttttccctgctcccaagtcggactgagctcagggaatctccagggaaatgcgggggtccgctgggcacttgggccctcccaaagatccaggttccccattccagtggaagcctttgccctcctgtccctgcagcctccttggttggtgccgcctccctgggacaggtgctcctgcgtccctggcagggccaggattgggctccagagggcctgcatctgcctgtgctgcgctgccaagctccgtggaggagcagttgcctaggtcagcgtcctgtggcctcaccaggggagacttgtcttagttgccaggatgggcagagaagaggggatggagcagacacactgtctgccgctgtgggtgtcaacgggggcattttaggtggatcatggggtagctatgtgtggcatagacacccactgatttgaacggacatctaggtcttaatttcttgcacgaactcattatttccccatcaccctcatttgttcctgctgtatgaggagcattcttcccacaggttctgagatggttttatttttggtgatggctggatttcccaggttatgcagctgtatgttaggtgacagtaaaaggaagactaggttgtccctgtccttaaggatcacacacacaaaaataaggccaggtgtggtggcccatgcctgtaatcccagcactatggaaactgaggtgggagggtcgcttgaggccaagagtttaagaccagcctgggtaacatagcaaggccatgtctgtacgagaaattaaaacaatttttttccctcattttgcgggtggagtctgaggccttggaggaggggtggccgggagagtctctgagcagcacaacatgggctgaggcagcgccccgccggagcccacaccctggtcctgcgagggatgcaggagtgcctgacccaaggaggggtaccgcatgaggtggctgcacagacaggaggcagcttttcctcatcttacccgctggctcccgcggtcatatactccccggtcagtcacagacacctctgacctctgatgggacattcagtgacacttcccttgtagcccttggcttttcagttcctgaaggagccagcaggtaagatggggaaaagctgcctctgctgtcttccaagtggctgtgcatgttggcccatggatacttatatctatgtcaccagctgacacctctcttcttctgcctggctcggaaggtgttttgttttagtttggtttgtctttaataagggagcagtggccatttcagagatgggtggctgtagatcctcctcctgaaccagcagaggccaactccattccatcctggacctttccctcctccttcactttcttccagcctctcctcttgacctgtggctcagaagggcatgtgacaagtgctgtccccacctcactgacccactgattgctcttaccagatttgcttctttgagccactggggcagggactgactgggccacatgcacctgactgctgaactttgccaacctgcttgtgagctggaggagagcaaggcaggcatgcagaagaggagggttgagttgccacagctcagagcccagtgctgccaaaatcaccactttgtcatttggtacatcagaaagtggtatctacctatgtttatcacagcacagttcccagttgcaaagatatggagccaacctaagtgcccatcaactgatgaatggataaagaaaatgtggtatatatgcactgtggaatactacccagccataaaaaagaacaaaataatgtcttttgcagcaacttggatagagctggaggccattattctaaatgaagtgactcaggaatggaaaaccaattatcacatgttctcacttacaagtgcaaaggcacacagagtggtttaatggacattagatgctcaaaaggaggaaagtgggggagggtgaaggataaaaaaactacatattggatgcaatatatgctattcagctaacaggtgcactgaaatctcagacttcagtatgcaattcatccatgcaactgaaaaccacttataccccaaaagctattgaaatacaaaaattattaaaaacaaaaaaagaaagtggagtctaaaaaagggacgtgtttgagtcctgaacacagagcaaatgagtgtgggctgtcttcttgcaccggttgccccctcggccctgttaagaggccaagcctgggcaccactgggtgtgcagcggctattcctcttttttaccccctttgctgaccgagttggtgttgtcatctcttccctgaccatttgacccacctccagctggccacctccttcctctgttcctctgcctgtccatttaccaggcacctacccagggggattttaggaaaatgtagatcagatcaaattcttaaggggctcccatacggatgcctgccgtaccaagcgtgatgcttcagcatgacttatgcacaatttgggatctgccccggcctcattttctggcgtctcctcttgctactcctgcacacacatcttagactgcgctccatgacctgttgtgtttcctgaacattcttcactgattgctacctcctgcctttgcatctgctggtccctctgctgggaatgcccacctgcctagttcagtggggctcccttttttccttcaagcggcagcttaaaccgtgcctttttagcaaaacatttcccgtcacccccattaggttgtttgctgctgctgcttttgtagcctctaatgcttcgttgctgtatggtgcaggttacagacccttagctacaattctcatatcccccaaattttgaaagccaaactttttttttttgtaattcatctggctacaaaatctgaactgtcttcagacacttggtagtatttcttgatcccgcttagtgtggctatctgtgggttttgcttactcccagcgggtttgatcacaggtgctgttccaagccctgggggagaggaggtgggtactgtaggctatgtgatacatgacttattacctgtctgcaagcagaaacacctacatccaaaccgatttggccccagggcttgggataagagatataggtctgtatttcttggttcaagttggcctcttcctactaaactgtagggccttggactatgtcctagtcaatatctttgtgtttccttagaggcctcatgattaactggcactgtgagagtaaatacccagtgagactgtcttggtgaatggataatagtagctaacatttatgaagctctcactgtgtgtcaggctgtgttctaaatgctttacttatttccgctcatttgatcttaacactagccctatgagaagttacttatcttatccctgtttgatagatgggaaaaccaaggcagctgctgctgaagtagcttgcctggggtcatgtggcttggaagtggagagggagatttgaattcaggaagcctgattttaaaccacggactagtagcaattggaaggactataccttgtcccactgcagtgtttgtgccttctggctgtcacagttggaatagaactgctcatctgagagtgtttttgatagggtgataaaatgactagacatgagagttaagaagggaaaaacctcccgtggttattgagtgttttactgagtgccaaatggagctcggtacttacagaaacagaccatccactggaagtaatagctgtcttcatggtcatcttgtccaacatctaaaaagatgacaaaccacagggctgggcacggtaatccaccgtaatccaagcaacttgggaagctgaggcaggaggatcacttgaacctaggagtttgaggttgcagcaacctatgattgtgccactgcactccagcctgggtgacagagggacaccccatctctaaaaaatgagaaaaagaaaaagtgacaaatctgaggcccagagaggtaacgtgactcatctgaggtcacacagccagtgtacatcgcagggacccagatctaatacagtgggtgccttttctcttgcttcagcaaggtacctggaatgagtgctgagtcctgtggctttcagcccagaattgtggaaactctacccttggttggctatcttcttccagctgaccatgtgatttgtgaattggtgtcagacaaacttttagaacacaagaagtgttctattcaacacgtctcttctttgtggcatcaagggataatgtggtgtgtgggggccccaatcctttgctcctactctctgagcttcgggtagacaaaacaggattgattgtgtctctttcaccagttagtgtgatgactgctttcacaatcttgtcgcaaaaaccaagccactatgggatgcctccaaggtcattggctgatggtgttgtgctagggaggccctagtttgtgagtaaagctgggatatgagggacttgtagttcaggctcagccttctgttcagggtgagacatttgcccttgactgcttgtgtgtgtgggagcccattgtcaggcaggcccgtaaatctggtctgagtttgatacttctttccccctccatctgggacaggtgagttgcatttcccaggagtagctcagatgtttttggcttcaccccctataatttagtatgcaaaggcactactgttggggggagtgggtaggggacacagatttctttctttttattaatttctttaactatctgtttatctcagcaaggttcatgttctaatagcaaaataaccagactcaaaggtaactacttctttatggcaaaaatcccaaaatgtgcctgtattggcttctgtccatctgtctctttgtccttctgttcatccatccatccatccatccatgcatctacctagccatccatccatgtattcatctatccatccatccatccatccttcatgcagccatccatccatgcatccatttatccatccatccatccatgcatccatccattcatccatccttcatccatcaatccatccatccttcatccatcaatccatccatcttgtcccccatctggtgaattctttctttccttgtaggctttctgatgtaaatgtagacataactttgtatatatttctcctcttaaaaaattagatcacattatacatttagatcacattataaaattagaccccactacagaaaacatgttgttttgtaagttgctcccagtgcagtttttgccggttacacacatcaacagcaacattttcaatggcagcagaatgctccattgtatagatataacctaatttaactaatcctctgtggttggacagctgtgtggctcagctttgcctgtataaacagacaatgaacatctttgaagagtcttttttttttttttaaacccacttgtttgattattgcctgaggagacattcctctatatggaataggtgggttaaagtttgtgtgtttggtttgggttgggtttggtggagggggactttgaatacattttggtggtttatgtggctgaattttagttgtcttgctgattcctcagtcattaggttttgggggccccgataggaatataaattcattttaatatttgtgaatgattaagaaagtagatctcttgggaggctgaggcaggagaatcgcttaaacctgggaggcggaggttgcagtgagccaagattgtactccagcctgggtgaggggagtggagactctagctggtgtgtgccctgagatggtatttggacagtagtacccagtaatgacatagaagatgctgggattgtgtgttgtttcactttgcaagaatgcattccaggggtttatttgaatttctccctgcaaaacagctctacattttgtagaaataggattattagaggaggtttttagcaccttcaattacatttggaaaacactgtatttcttttggcttggttgttaaagacaagtaaataatttttttaaaaaggtaaatggtaatattttgcattcccaagagtgtgttctgtcctttaaagttgctgtgttcaacagtaaattatttgattccttctaacaatacccctgtgtgggaggcatgtataaacttccattaatggcaaacaacatggtaaacccaagctcagaaatgtgtaatttcttacccctctgggtgggccagaaactcatagtggggttttactaggatgtaactgtgggtgtttgtgtggggagggttagggggtgtgtgtcactgagggtatatagaggttttctcaaagacttatttacatgagttagtgaaaaaaggtttgtccttcttctctccctctttccccggtgtttgagtcccttgtgaggagctgatgtgcacgatgaattcatctcagccagcaggctgtttaaagtataatcaaatcagaacccctgttttccgagttacgtaattttgcagaacggacacagaggctcctgggaaaaactgcctgtccgcctgttaatattaaggtccatttataaaattagaagctatgttgaacagatgaatctgaaatggaacttgcctattaaagttttttgtttttgtttttgttttttttttttggtcagatagccttatttaacctttctgtgtctcagaggttggtggcctttgcctatggtgccttcatggaaaaagttctaaatatagctcctgtttgttgttgaataatgacttgcgagggcggatggtagagtttccaacttctttaagtcagcaaactggacaagagggcatctagtccgaaggaaagccatgtgcctgagtgttcagcactgctgctgtttttactgtggtcctgggtttagtggatgttcagtacactgtgcctgtctctcttgattgtccttctcctcccagtttttacctccaaaagcctgtaactttttcttttttttctttttttttttttgagacagagtctcactctgttgtccaggctggagtgcagtggcgtgatctctgctcactgcaacctctgcctcctgggctccagcgattctcctgcctcagcctccctagtaaccgggattacaggtgcttgccgccggctaatttttgtatttttagtagagatggggtttcgccatgttgtccaggctcgtcttgaactcctgacctcaggttatctgtctgcctcggcctcccaaagtgctgggattatagtcgtgagccactgtgtccggcctcctttaattaattcctaacttgtaaagggtacctgcatgattcagatcctgtgaagacttttgtctctcaggcgttccgcatccatagacccttggccattatcctaacagagtgttgaagtgggtggatggtttcaaaaaaaacacttgggtttcattctgtctgtttcaaggaagcattgtgcagtggtagaacgagcaccacagctggggtggcaccctggggttcaagtttctagtgtatgtgaccttgaacaagacttcagtttctgttctcggtaaaatgggggattagattatattcctggccttgcccaaagaggttttattctttttttttgtgtgtgtgacggagtctcactctgtaccccaggctggagtgcagtggcgccatcttggttcactgcaacctccacctcctgggtcctagttcaagcaattctcctgcctcagcctcccgagtagctgggattacaggcacgcaccaccatgcccagctaatttttgtatttttagtagagacagggttttaccacgttggccaggctggtctcgaactcctgacctcaggtgatccacccgcctcggcctccgaaagtgctgggattacaggcgtgagccactgcgcctggccatgttctttgtgtctcagagcagtttaaattaaataatgaaacttcttgaagaactggcccaggacacactgtccagtcttctgtgtttccacgtggttcctcgatgaacctggaacccaacgcagacctcttttttgaggcctctgagctggggagggggcagggtgagggagtgggagcttgggttttcagtaacttctctggaaacttaagtggaggagagcagagatatcaagaaaggaaatatgtgagatgagtcggactgtcaccctggtgaggaccatgggtgagccacgtgagggttgatcatctgaatagctgctgttttccttctgcccctcctgagcgagatctgaaagctttgaagactaggacacatctatgcagtatagacgtgcatggaagccccagcggattcctgaagctgcatttcatgtgaccggcatgtgactggaggtgcttggcatgtaaccttcctttgtgttcaccagcgtcagtgttctgcgtttctagggtctgtctcagaacagtgaaggcgtatcagccaccccaaggatctgcctgtttacagagaattttttttaaatattaaacttctctctattttgtaagtttacaccagtaaagctggaagttacacacaatatgaccctagctctttatagaattgctactctcgagttgcttttagtgttacaaccttgatctttaaaatcgtactcaaaaatatcagtgatgacattcattcaccacctcattgtggtctcttaaactaaatgagaaaatggtatggaaatttaataatagaaaagtttggtcctctcccaggcactgatgaacctttctccttttgatgaagaaaagtttgtaattggtcatgttgccattttttttttttttttttgaaatggagtctcactctgtcacccaggctggagtgcagtggcatgatcttggctcactgcaacctccacctccgcggttcaagcaattctcctgcctcagcctccctaggagctgggattacaggcgtgtgccaccacatctggctaatttttgtatttttggtagagatggggtttctccatgttagccaggctggtcttgaactcctgacctcaagtgatctgcccgcctcagtctcccaaagtgctggggttacaggcatgagccattgtgcccagcctatgttgccatttttatttgggctgccaggaagctgagagtccagtgtgagagtcacaatctgttggtccagttattattgtatttataatacatcctttccatggacatgattttctgtaattgtaattttactgttggttttatgcttcttgttgttagccatctcagagcctttgtgcaaagaactgggttaagaatactttaaaaacaaacacacaatgaaagagaaagagcaaggatttcatgctgttagcaaagctttagaatgtaaaaacttgcttctcttgagagagagaaagagagcgaggctgattagcatggtatttaagagtatggatgcaggccgggcatggtggctcaagcctgtaatccccacactttgggaggccaaggcgggtggatcacgaggtcaagagatcaagaccatcctagccaacatggtgaaacctcatctctactaaaaagtacaaaaattagctgggcgtggtggcacacacctgtagtcccagctactcgggaggctgaggcaggagaatcgcttgaacctggaaggcagaggttgcagtgagccgagatcatgccactgcactccagcctgggcgacagagcgagactctgtgtccaaaaaaaagaaaaaaaaaagagtacggatgcaagagtcagatgccagggctcaaatcctggctgtctcactttagtggctgtgtgacctggaaaagttgctaaacctctttgttcctcagtttccacatctgtgaaatggaaatgatatcccctccctcctcatagcgttgctgtgagaattagatgggttagttaataccaaagaccctgggaaaggtgtctagaacatataagcagcctgtaagctttatctattactagcaaatgactactttttggaattatttttcccccctggaaagttcccagtggcatttgagctcttcctcttctctcccattctcccagctctgacttttttacagattaattcttaatctaccaagccaacttttccctgctgtgatttgtaccgttttttttttttttgagacagagtctcactccatcgcccaggctggagtgcagtggcacaatctcctctcactgcaacctctgcctcctgggttcaagcgattctcctgcatcagcctcctgagcagcttggattacaggtgtgtgccaccacacctagctaatatttttttgtatttttagtagagacagggttttgccatgttggccagcctggtctcgaactcctgacctcaggtgatctgctggcctccgcctcccaaagtgctgggatttataggcatgagccactgtgcctggcctggtttgtaccttttaaacgtattattattattattttaaataagaaagggaaaaaaaaaacaaaaagatttgccctctaggatctgcatactttttttagaagatcaagaaaaagatgaagtactttctcttgtctcgagctacagtgtggcatgtctggcccaatccatctgtgtggtttagcaatgagggctttaccccagtttgtcatcttggaagatgactttgcttctccatgccttagtttccctatagtaccttggtgatccgtttcactccattgttgtctccaggaaagcatggtttctgtctcctcctgtccttcccccatccccaaccgggggccattcagtagacatttgctgaacacacggatgcgtggagactgaagcctctgcttggctgccttgtgcatttcttcggagtttgaaataagataaccaaagtgagagtaggtttagaaaaagccccctcgaatggaagggtttttgattcctgtcttttccctactctttgatgatggcaaaatgctgataaaatctgagggttggatgaaatgaaatagcccttcagggtcctctgccatctgggtaggtggtgattaaaaatggcaagcctcacagcttcccttggagagctgtctgaggcactgctgaaggtggatgtgcaaaggggcttggcattaggggttggctgaggactggcagggcagctggggaacgcctctgaaagcaacactccccaagatctcattaaaatgcttcctctggccgggtgcgatggctcatgcctgtaatcccagcactttgggaagccgaggtgggaggatcgcctcaggtcaggagttcgagaccagcctggccaacatggtaaaactccgtctctactaaaaatacaaaaattagccgggcatggtggtggatgcctgtgatcccaggtactcgggaggctgaggcaggagaatcacttgaacccacgaggcggaggttgcagtgagccaagattgtgccattgcactccagcctgggcaacagtacgagactccatctcaaaaaaaaaaataaataaataagataaaaaaatacgtcctccaatggactgagatggaggaaaagggtttgggaagagagacaacctaaggctggtaggagactctgaactatgaatttaatggcaattaaagcagaaagacttgagcaagtagcttttttttttttaaccgtgccctgtagttatgatttgttctttgtagttaatttaaaataagcataatctttgtctactagctggctgtcctgccagaattgcatatatttattttcatgactatttttttgcactgaccaggaatccgtcagtgccaggagatttctctctggacatattttggctttgttggtgtcttcccgaaccccagcccccaccatccctgtctgccatttctttgagaagccagcaagtatgaattgttagcttttcctctgaagtggataatatagtaactggtggatgttctagcagctgtgcgatgtgctagaatcttagaccatacctgccttgcagtcctcaagactgtgacagaagtgagctgacccccacctgcctttacaccagccagctcttaaacgggcaggccaaatctggcccaccacccattttcacaaataaagttttattggaacccagctacacacatttgtttacgtatggcctatggcagattttttgttacaacagcagagtcaagtagttttgacagaggttataagggatgcaaagccaagtgttgattacctggccatttatagcaaaggatgctgactcctgacatacataatgagcctactgtgtgccaggcgctgttgtaggcactggggatggagcagtgaacttaacaaaatgctgagatgtgtgtatagtagtcaattagcgataagtgctgtgactgaataaaacagtaaaggcatggagactgaaacggggtgaaacggggagtgttattttaggtaggattgtcagacaaggcccttgtgagtgctcttcagggacagtgctccaggttgggagcacagtgatggcaaaggcctagaggcagaagctggcatgtgtgaggagtagcagggaggtccaggtagactatttggggctagtggaaggagctgaggctggacagacaggaagatcagatcctgtaagactctcataaggacttgggcatttattcggtgtgcaaggggaagccacagtggggttctgagcagagaggacttcagagcagagtttgacaagagaggacttctgtgtaggaggcccaccagttactgcatggcatagaaacagcagagggcacgggtaacggtgaagagggcaggtgggagctgctgcacttatccaagggccagggtggtggtgaggacggtggtgagaagtggttagattccagctatgtcttgaaggttgagctatgggatctgctgaagactgggatgtaggaagttctgggaaaggactattaagagtaaggccaaggcttttggcctgagcaaataaaagccttttcctatgatgggagaagactgtgaggaatagctttggaggtgaaagtcagcgtttggaaacctttccacattcccagttttcttcttctcttactcgttttctttgggaaagagttggaggaatgactccatctactttactgcttcttttttcggggtaatacaggacttgaatagtagttaaatcacctgtgttaccaatggtctttaaaccaaaactgcattactcaatcaggaaatatatacaggtaacctgcctttccttcattctgagacttatttcttgttcataatgcttgtgaaatctgaatgcatttaaataatgtacatatttaatatgatggcatttcattcttgaaaaaggtgttattaattggtgttgcatcttatggttgttataacatacagtaattaaagaaatattataggcattatatattgagctcttgcgtgcgaggaactaaaatgtgtgttatttgcctactgccgcgtaacaaattaccccagaatttagcaacttaaaatagcaaacgtttatcatctcacggtgtctgagggtcaggaatctggagtgggcttattagctgggtggttccactcagggtctctcatgtggttgaagttaagcagctgttctgggctgcagtcatctgaagacatggccaagcaggagcttcgccttccgggatcccttgcagggttgtttgctggaggtctcggccactctccatgtggggccctccagaggctacctgtgtctgcacagtgttgtcattgtctcctccagagcttgggcaccaccatttcttttggctcttaaaattctcttctaggcttgggattttaacccaggtttccagatgaggaaactgaagctcaaggaagttgattaccttcttcccaacttacagaagccagtattagactagggccctgaccctgatcagcctgacaagaaaacccttgttttcttttccacggccccacagagtggcccatgtttctcaaatgctgcaatctaggattgaccccaggaacccctttggggtcattacattttacttccactgtctgatggcattggtgtggtccatgcgaatactcacagctttaaaaccatctgattgtctctgagactcattttctctccactttctcggcctctagccttcacggctgggtgtctcagaggctgggctctctcctctgggaaggctgttgtctctgtgtcgctggctagcctgggtctcaggggcagtgagaatccctggcggctgtccctgtcgtgtttaccaccttggcaacaagcgctgctcttggcaccacggtcgagtccttagctggacggtgactcgggctgggggctccttcttcacatcatgaattggtcttttgccaagccaaaacagcggctgcttgcttttcagaaggaaaggttgttcatatttattttttaattagaaaatgaatgcatgctccttacagaagattcaaaacatatagaaaagtgcaaataaatgaatgttttggtatattatcatttttgtgtgcatacgtatttaaaaacagaattggaaaagaacccagaattagaatcacgctgtgttgtgtgcatgtgtatgtgcttttgcatttactagtacttagtaataattttcacgtgttactagatggttgtaaaaacatgatttttaattggtgtgtaacgttctctcatctcaatgtaaaatacagatacgttttaaatataccttaccgccaaggacgagatttgtatgggttttattttgttttttatttatttttgagacagagtctctctctgtcgcccaggttggaatgcagtggcgtgatctcggctcactacaacctccacctcctgggtttaggaaatcctcctcctcagcctcctgagtagctgggattacaggtgtgcgccactatgcccagctaaatttctgtatttttagtagagatggggtttcaccatgttggccaggctggtcccgaactcctgacctcaaataacccacccaccttggccccccgaagtgctgggattacaggcatgaaccactgcactggcctgttttattttattttttgagacagtcttgctctgtcgcccaaggctggcgtgcaatggcacgatctaggctcactgcagtctctgcctgagaccataatctctgcggtctctgtccatgagaccataaataaagaataaggagcttggcaggccccacgcagacttgttgcatcccagttgcttggggaccctgaaggctgcataactcgtagccgggtctctgcctggaggagcgggctggtgttaattcactgacccggggagctgtgcctgcctgtcagcctctccatcttgttggtgctgaaaacctctcttcctcattttggtccctgctatggctttttattcaaggctgtggtttgagttctaccacaaagcagataatgtggcatgagcagctcacgcagggactgccctgcctccctgtcttcacctacaggggctgccgagatggggaagggccccacccctgagttcccctttgtcttccttgtctcctttgcaaggagagtcctttatttgttcttttaatgcaactggcctctctgaagaggctttccagatcaatttggcttgtcaggggtgccaggcttaagttttcaggcatctaaagaagtggtgggggagaggggatcagacttttctttctctttgtggctttcaaaagaaaatcacggacgttaaaataaatgacgcaaatatctgtattttttgtatcaaagagacaaatggcataaatgcagattatagggtattccttagaactgtccatcacacaggagctcctgggaaaggcaagcagcccgcgaggcaccacccggtttcactgagcagagggtgagtggtggcttcgcgtttgggcagcctccagggggtcggcatatttagatcatcgtctcacggattgattcaggattgtcttaaaagccaactcggtttccaagtgtttcattcttgcatgcacgcttaagaaagtcaaagccatttccattgtcttctgtttgatctgcactgaccatccttcagctcctgcctccacttgcgtgatgctttctcttctggttgaagaactggcagcgttggtttgggctgctcctccctccctcgggccccctccctgtggcacggacttgccctgctgtcgtggatgatggtctgtgtgcaaggggttgagtcccgtttgccatgctcctggtgtttctaacttctcagcctttcgtttcacaccctgccatgatgacagtatatccatttttcattctttgggacattttctctccaaggaaagatgctcatgcacgtttgcagtgggtgaactgttgccttcctgtgatcagtcattggtagggctgcttctgtgtctccacccgtgagtctccatcaccagttgaggacctttgggtctcctgactcccagaaacttttccagcttcccatggtctgtgcttagggtgtattctgggccatggcctcctggaaaaccattttcccagctgagatggattccccaaggtccctggcctccagtgtggcggtccctcagaagctcatcagtgaccgggaatggaactgactgctataaagttgtgagcctgcccaaaactgggcagcagaggtgttggaattcagcccacctgggctcaagtgtgggttccagcccttcctagcttgttgaccttgagtgatactgactaacatttcttgaccatttgccctaggttggcttaccttaactccatgatgtctcatttagtcctcacagtagccctctgagaaaggtattattcttaccttactaggcttcaaagaggctcagatccatggagctagtaagtgatgggccattgtgcaaacccaaggagtcggcctccagacgcacctcctcccagccactacactgcactgccttaacccttgtgctgtacttaacccttttgccagtacagccaaaggttcatttcccagagcctccacttctgcatctgcagaatggaggtacagtgtcaacactgcagggctctttggaggctgaaatgagatgaaatataatggatcaagctctggcactaacaaatattagttccttccttttgttgccctggaacaaagggtggggcatgagaaatagaggggcattgatgttctgcctggcaaccttgattgtaaagagggcaggacaaggaagggaaaatgtagaggatccccatcattgtggctgagtcattttaccgcagaagcctccccagcaatggcctgtggttctgggggatgggagggtggtgtgacactgggaagtgttgtcaggtagacacttgagtcttgattgggatagagattgggtacttgaccttctgactctggggtagacatgggattgggccatggggaccacgcaggtacactctctgccgatttccagcgtgccagacattcttatcagcgcatctgagcccagcagcagggaagcccagtccctggtcactgtttgcatcttggctgctcctccttggcttgaagccctggcagttgcacctgcagggagcctcagcaggaatacaggttcacctccgacctgggatctgcattgctcccccggtatccattctgtcctggggtgtgctcaagtgcaggtccatgtagacaaattcagatgctgccccagggctggtgtgagagagctgctgcacctttccctagccctcttcttttagaacatggatgatatgagagtagagaggggctccccagtcagaaccagggctggggtgggccagggaaggaggtcaagtcaggacagagctgggaaggatgctggcagctcagtgtggccccagcatcacctaggaacgtgtcggaaataatctgcatcttatccagctcgcagtggtgtgtgtgcagaaggaggtctgagaagaactgggatgtgcccttctacctacccacctgcatttaaaagaaaggtaatcacgtatttagaagatggaagtgagttaagtgtaactaaagtggggaaaaaccaaacagtgcctgagtgagaactggagttgggtacatcctgggttggtcctcacactgccgcctggctggggaccctgtaccatctaaggccaggatgtcctgtgtacgaccaggttcctattgtcagtctgttggcccctctgccaaggtgagccctcctctttcactccctggtacattgtgctgagaacatgactttttgggagagtgtttgtagcaagtggtagcactacgtaaatagctttgttggcagcttttgcttttcttgcttgtattgtacaccttagtgtgttttttcttttcttgctttattttttttggataacggcaaaatcaccgcttgtgggcaccgccacagataatacaaaaaagccatttgaaaagagctttatgtcagcacagagtacttggaattgaagacctccagggatttgcctttgttgctcaacttttctctctcctctccctctttttttccccctttcttttcttcctctccttcttcctccttgttctctttctcttttcttccttctaacttgccatggaaccagagtgagctacatattgccctattttcagctgatttgcatgttagagcagagtaattggtgtttaaccagaacaaaagaggatctgttttctaaaagaaaaaagaatttttgaagtagatcctattgcatctactgcctttgtctctcctctcattaggaattgaataggatggccccgtaatgagaatgtgggagatactgctttggttgtgatgctttttgagctaattggtttgaaaattatatttgatacagatctgagggatgttggcaaaacacctctttgatacatggacatccggtccctccatcagcaggaggatgggtagtgagaggcagggttggaacgctgtttaccttcctggttgaacgctctgagaggccaccccctgagattttggtctttctccaaatcttcatgttggtctgtgcctggatgaagaaagccagggagcactggaggacaaagtttagtagaaaagtttgtagctcatgatttgacttctagtgtgttttagcgaagacatgaagttgaagaatgacttttcctcttgttcagaggaaagtctaaatctggactagaaaattgagaggatattagttaaaaacttccagactgtccgttcttcattttatatgcagaaatcactttgtcagctcacagttgcagtctctttcttctggagttaactggcatctgatggtatcatgtctttttgtgaaaattaagtgaatttttgaagactttcagtaatgtttcagtgaccacaaaaccatcttaaaaaattagaaaccaaaatactactacatgaacttcgaatgatagaaggggaaaatgagttataatcacatcattctaaataacagctgttttaaattttaatgtattaatattaccctgtcttttgccattataagtcttacttacatacacacacattttgaaatagtcattgattactttggggattgtgtttaagcaaatatttatttaataataccagttaaagagttctgtgacatttattccttttctgaggtcacccaactttgcaaaagttcaatattatcttgcaaaatctgatagcagattttaaaaaaagagacacgggtcatgatgacttctctcagaaaatgtgactacaatcaattttgctgtctgtacgtttgtttgttactttatctttctgcacagcctgtgaggtagggaagggttaagccctcttgacccactttgcagatgaaatggagctaagcttagaaggaggacagcaactgagatgagcaaagttcgaagccaggaggtgcagtccccagctttatctaccaagtcaactgtctttccttctctcccttttgctttttttttttttatttggaggtaatttaaaacttacaggaaagtttttaaggataagttcaaagaacatccttgtatgctccactcacatatatcctttatcagcattttaccctctttgctcaatcagttgctctctttttcactaatagggttttttccttgagtcattagggaataattgtacgcattgtgaccctccactcctaaatacatcagtgttcctaatggggatattcccttaccaacttcagtccagttatgaacttcagaaatccagcattgatacagtgcttttatgtaatctaccatctgcatttcagttttatcaattgccccaatctgtcctttatagaattctttttccctcaagtacaggatacaatggaggatcaggtataacatttaggtttttttgatgactctttcgtctgctttaacctggaatatttccctagcctttctttgccttttatgacattgccatttataaagaatacaatcctcccccaccttttcccaatagaacattcttgtctagtatttcctcatgactagattcaagttatgctttcctggccagaacacgacgtaagtgtttttgtgtccttctcagggtatcgcatctggagcacttgatgtccatctgcctctctttgatcacctggtcaaggtgttgttagatttctccactgtatagttactatgttttgtcttgcaacgaagaagcagtctgtggggagatgctttaagatgttcctcatggaagtttcctctgaaagctagcattcactgatgattcttgcctgatctagtctttacagcaatggttacaaaataattttctaattcctacatcccctctttatttaccacttggcccttggcatctgcggtaagcaagatcccctccttcttacccactaattttaaaatctatttcttatagatatggacccatggagtcctagtatttcaatggcttataatcattactgtacataacaattttggtgctcaaattggcccacacttggccagtgggaggcccttcattctgattccctacaacatgatcctgcgccggagtttatttttaagcacttctttactttctggcataacaaggtgttccaagctcatcttgtgtctcccctgctccagacctggagttactcacttctccaaggagctggtttcttgtagtggggattgcatttagagaccaagataagaaggttactagagcgtctttgctcaatgttactggagtgtcttcgtctctaggccatttcagtggagagatataggaaacatgagtgtacacatatacacacagatacatgggcatgtccatgcatcatatacatacatattttggaaatcatgggttcacaccacacctccaagtttgctcaatccacacttactagtttgctcaatccttaatacgtctaaaatagagccagagtggcttgcccattccactacaaaagactggcctacccgaggtgggtggattacgaggtcaggagttcgagaccagcctgaccaacatggtgaaaccccgtccctactaaaaattcaaaaattagccgggcatggtggcatgtgcctgtaatcccagctactcaggaggctgaggcaggaaaatcacttgaacccgggaggtggagcttgcagtgagccgagattgtgccactgtactccagcctgggcgacagggcgagactccgtctcaaaaaaaaaaggcctactaaaaaggaagggttcaaggcttgtttgcatttctcttgcatccgacaaccacccccatcccagctaaagacctagggtgcatagttcaaccgtgtgttcctcagtcatttggattacctcttccctccctcccacctgcactgtggttatggtttgctgtcagtttcagggttttcttccttttcccttcccatccttgttaatttaattttatttaatatatgggacattcatgtgtgtttaaaagtttactgagagaagccctgctgccatatctagatctctccttccctgtttcccaacccctgagaggtaaccaacctcacccttttctgatttgtcttgtgtttctttttgtaaagataaacagatatatgtatattttcttatttccccttcttatataagaggtagtgtagcatatactctttaaagcatcttattatttttaaaaattaactaaagtccagctggatgtggtggctctcgcctgtattggggactgaggcgagtggatcacctgaggtcaggagttcaagaccagcctggccaacatggtaaaaccctgtctgtgctaaaaatataaaaattacccgggtgtggtggtgcatgcctgtaatcccagctactcgggaggctaaggcaggagaatcgcttcaactcaggtggtggaggttgcagcgagcctagatcacaccaccgcactccagcctgggcgacagagtgggactccgtctcaaaaaaaaaaaaaaaaaattaactaatgcctgactttattccaatttccctagtttttccttactgtcctttttctgttctaggacatcatttacatttaatagccctgtcttcgtaggctcctcttgcttgtaacagtcgcatcttattttttgaaatgtatcaataggtaggtagcggttgaacaagacggagaaagagaaggtgaaaggtgagagatgaaaaatgttaggtccatatcctgcaaatgttgttatttatcacttctgtgattttctctatatccacctgctacatgtattattatttacttaatacttttctttttgttgatttattttatcaccataaaaacattttgtaagaaaactttacatcattactataaatgagaaaccacttgctcacttgtatttcgtgagaattgcatagaaattgcagcattttgaagtttaaaaagtttaacagcgaagtaaccccttctcatccttatttttaacaggacttgagacatgtaaataacacattttgggggggggggtctgatttttttcttaatgaagatgtaaacccatggaattcattgatctacccctttgctctgataatgtgcagtaaactgaggctgagccttccgggggtttgagaaagagctgagtcatatggggaaataaaataaaaatgtgaataagtgtagtccaagctgggtgagttaaatgctttgaagaacaataaataatctttctttttttgttgtttaaatcattagcagaacattttgcaaagtgtctttctttcttttcttttttttagacagggtctcactgcattctgactgaatgcagtggcacgatcatggctcattgtagcctcaacctcctgggctctggcgatcctcccacctcagcctcttgtatagctggaactacaggcacacgccaccatgcttggctaatttttctattttttgtagcgatggggttttgccatgttgtccaggctggtctcaaactcctgagctcaagcaatctgcctgtcccggcctcccaaagtgctgggattacaagtgtgagccactgtgcccagccaaagtgtcctatttttacaaaacctaaacagaataggtaatcgaacagagtagggctaaacatatatatgtttgtgtgtgtgcacagtttacatttactctggttatctttaagataatgccttaaagattcagggctgcatcttaggcagatcaaacacatatcagttatgcttatgtcttttcatggagttccaaatagaaaatttcccagcactctactgtagtgacttcttaattaagcagctattagttaatacccttcctcaccattgttcctggaaatgagttctagaagccctggcccttaggttgccatagataataaggatgcagtgtgtttcagactagcattgtagaaagaagtgggaattatcagagcaccccacagtgtaccatcttatcaagatttgaattatgagacctgtattccaaaatagctcttttaaaatgatcttagccgttattttaaaataatgagtgtggcattatagcaccacttttcaaattttaagtgaagaaaagaaacacatctacccatcatcctgcctgtgggtctcattgctttccagccccatccgcatgtgttcagaccccttcatgcaggcattattggagtacagatgtacatgcttctgtcttgcgtttctctctcagcatcatgtatgttgaaacccatggtacttatattggagttgttctgtcttcacgattgtacatgtgatgttcagcgaggtcactccctgggatttctacccccctgaaagcaaagaagtggaaattttgtcctggtttctctcttggtagagtaggtttgtctctaggttctccacaatacctgcttccgtggaattggctggagtcgatgatgttagcaactccttctcaagtcatttcagcgatccttcagtctttttcaggacattgggtttccacgtatctgaccatttcttctttcttctgttcactgaaccaacactcagaggctgtgccctttgccaggccctgggctgactatggcgatagagcggtgagcaaggtaagtgcatttggtctctgcctgcgggagctcacaggtcatttgcacagttgtgtgcacggtgcccttgtgctgcgctgcgtgtccagcctttctcatctgctcatggatgcacacatcgcattagaaggggagagaaggtgacgtggctgtaggaagactctactctgcctttctaaatgctaagttctgtgcatgctttggcaccttcctagtggtacaagttgcttgtgatacatctcacttggacatatctatggtagtccaaggagtatgagggtggttagactaggggttgagttgggagtcacaggaggcaggcagggagtgatggatgcctgggttgtcccttgggacaagaggccactgctcagtttcaggagttctagtgttcagctcacttctgtacccagggaggatgactgatgtggttcggatatgtgtcttctccagatctcatgttgaaatgtgatttgcaatgttggaggtagggcctagtgggaggtattggatcaagggggcagatccctcaggaatgacttagtgtcatccccttagtcataagtaagttctcactctatgagttctcatgacagctggttgtttaaaaagcctggcacctcttccctctccttcttgccccctttcttgccatgtgatacattggctccccttccccctccgccatgattagaagcttcccgaagccttcgctggaagccgtgcagatgtgggcaacatgcttgtacagcctgaagaaccgcgagccaaaaaacttcctttctttataaattacccagcctcaggtacttccttatagcaatgcaaaaatggactaacccaatgacctatagggagaatggtgacattcttaggttggtgtccttctctttcccaactcacatcccctctcagggtgttctggcttcttagctttctgttactttctgaattaggaaagatctgatattatttacactcgtgcctgttaactctcccaggtgctgtccaagccttttatctcaaattgtggactgaaaagctttatctctggtttaaggcttcaagtcctggccagtagactaaggagatatttaggggcacagagaagccttcctgaagttcctgaaataagagcattctcgggctgccctcctccatggttcctggctgaccacttgtcttctgcctcggggttggaagcctgggatgaggactccaggctctcgtctcggagcccttccttctcctgttactgggattctcctcagctcactgccttctcccttttggtcactgctgcccgactcctgacccagcagcccggggattttcagtgtgtgtctccgtgtgtgtgtttgtgtgtgtgtgcacgtgcgcttccatccctgagctcactagagaggcatagggcagcatgaacactcacggagaacgaatgctcatgagaagcgtgtggtaaactcaaagtttttccatttggcacagttgaggagtaacgtttaaatcttcttcttaattaacatttatgagtgatcctgacagtgattaaagaaatataggaaagctctcaacatatgtgtatgtcaattatatgtactgggggaagaagaaagatgaggaaaaatgaaatacttgaatgatctgctttagaattgtgtacatttgtgtctaagtaccatgtcatgaataatagtgctaagagtacttaagaagatgaacagatcaccttttatcagttttatgacaggagtcaagttggtgcactgcacatgtgtgcttagttccagcctgtctgctcacaaccaggaaccacacaaaaagagttaacattagtcatggtaagcttagcaagcagatacacttcaaaattttttctccttgaagctttttaaagccaatttcaggaagatatatactgaaaaactcaaaggagaggtgacggttgggaagccaagaaataattttttactctaagaatattctagaacccagtagtacctgaaaaatctctcaaatacatcctcctttgctgcccttttggaaagattaaagcatatctggtgacaccagtaggtgtcatctgatgggttcttgctgcctggcgctgtgtgaattataaatgaaccatatggaaccactttatattaagtaacttacgtgttccagtgatagttatttaggttgtaatcttctcagaatctgttgttaatgactggtttgttttcacctgaggttgttaatgctccaaagcctattgttaacagtgccagaggtaggggtgtgtgtgtgtgtgtgtgtgtgtgtgtgttcatagaaggatgttactgtggaccatatgtaatgggctgatagcttttatttttttgccttagagtccagacatggtgctctggaatagccgttgtagggattatgtttatttgtcctgcatgaatgccaattttcggtttgtgcaaggaagggatgtgtctggaaacacttggagtactggatggcctctccatgtgattggcctttggagaccgcccattgcctcaggataaagtccaagtgctgttgcatggcctggagggtggccgtggtgtgttcctccctcctccccagcagggtcatttctccctctcacaccccaccacactgagccactggcagtgccctgatcacactggctgtttatgcttccctgcctttgcgcaggggatccctggcccggaaagtgctcaaccccatcttgtcaatttggcttcagcatcacttggtctctgagcgcctcctgatcccctctgcctcctcctcctgtgcctgctaggctgtgctcctctctgtcaataccatggcacgttttagactttttgttcacccactgtcatcgtatcagctagggtctctgtaggaaacagacacctcatgggagggggtacttgagaagattgaatgaggggattgtttacagaggtgtagacagggttaaaggttcagcaaggaaggatgaagctcctcagggttatcagcaatgctaagcaggctaaccacccctaggcctgaggggcaagaggagggagcaggtactgaaattcagctgttgtggaggttcccaactggacctgtggccgaggaggagtgaggcccagcaagcaggggcatcactgcctcaacttctctcttcccaccttctcttgatagtgtcttccattggccaagcccaaccggaaaccaggagaccattctagggaggtcagtcttgcaaggcacaagcagggaggaaaagagcagatgatggttctggagggtcaagcagaaagtaactagcacacccacattctcttgtgggagtgtaggctcagtaagggcactagccatgtcattccagtattcccagggcccatcatagtggggtgctgggactagggcttagttgccctccccagtcctcatcaacacctcctagccaccacaaataaatacaccatctaagccaaaactgagtgcttgtatagctttgaaacaaatcctcagccccctgcctgttcccacttagaagggtgctgctcctaagcccctgttttatataaattctggagcccccacctacttagctcaatgcctgattcaaagtttgtgtgtatggccaggtgcaacggctcatgcctgtaatcccagcactttgggaggcctaggtgagtggatcatctgaggtcaggagtttgaaaccagcctggccaacatggcgaaacctcatctctactaaaaatataaaaattagctgggtgtggtggcgcatgcctgtaatcccagctagttgggaggctgaggaaggagaagcgtttgaacccaggaggcaagtttgcaatgagccgagatcgtgccactgcactccagccttgacaacagagtgagactgtgtcacacacacacaaaacaaaaacaaacagccccaaaaaaccacacacacacaaagtttgtgttcagtgtatacttgatggaatgaatgaatggatagatgagtgagacaatgaatgaatgagaacatacattgtgtgaagaaacactgagaggaaggtgtgaggcaggtcagcttctcattctttggttccctttcatattcataaggtactggaggtactggatataagtcgcaggaaagtcggcctttcctatctctttggtttgctgttgacttccagcacagtgtctgcaccaagtaggcactcaacaagtatatgtcacgtaaatgaatctggatgttaagtcatgaacctggatggtttcttctttagtggtctactctgaggttcaccagtgtgtaaagtcttgggctaccatctctgttttgggacctaggaccattttggtatttttcccaagtagagaaatctgtggccgcccttcctatttattcttttgatttctggaacttagatgtctgaatagaggactcgatgtttgttccttttattttataaaggaagtaggggaggaaataggactctaagaccttggcggaaaagagaagggaagcagatgaagaggagctcccaggtgaaggagggtggaaccctgattcctaaatgggaacaggtttgttcggactcacacactgagcagctctgtgtttcttcttgctcttccatgctcacaaaggtctgtgattttaggaggaggtgttgagggaccctggaagaaagataaagggtagggtcagaggaataaatatcagccaatccctgaataattgtcaccttaaaaggctgtacctagacagggtttgtggtcttgaaggagccagtttcttatgttcaagcttcttggtctcttcttggtccatgtggatttaacttggatggaatccctctggctaccagtttgccttggccagaaggagaagggctcctcctagcctcctcctctgctgcttcagccctgctgggcactgagcaatttcacagggcggtgttaaggatcagggtgtggagagtaggaaattagtaatgactggactgggtgagggtgactcttgtaattttaaagaaatgtttaaaaattaatcggttctctgctctgcagctttaaaaaagtcaagatggagaatttcccactgtgacgccttttatttctggaaagttgagtcatttaatgatgatttgaatatcaacagttcattggcccatctttccccagatagctcccgaaaatgcgctctcctccagagaaggacacttttcattcctttagttttctggcaactcaagtatagcctggcctcctgtgtttccccagaccattatcggagttgtactgaccaaatgggagtgggttttcacttgtacccactgctcctgtttaagtcttccttggaccaactgtgggtaggtgtaaagcaggcatggctgtgacttccacattggatggaggcttgattgattcgatgtgattccttgggttttcttggggttgtactaaggacttgtgtgcccaggaggacacaaggctaaagatggacttggtgcactgatacatggttcagttaggaacagatagtggaggagctcctaagacatttacctaagatattctaagggaaatcgtagactcttatttcctttgttatttagggagtagttggtggagatgtaggtggtaccagtgatgccatttctcttgtaggagcatttgctgagtcaaagtatctatttcctctggagggtccttgaatttaagagcttccagtaccagtagattgaagatttagtctgattataattttttccttgggtctcagaacattaagagtattcgaagacctggttctcttgtttcctcattaattttggtcctggatggtgcaggggttggactgacctattaagtctccttttcccccatccatgagcagtaagtctgtcatggggatcagcaaactctttttttttatgtgtgtaaagggtccagatagtaaatattttaggctttcagggatcaggatgcaatattgaggattttgtgtaggtatttaacataacaagagagaaaacatttacggagaatttttactgatgaaattcaaaatataatgacaattattgagtacagttttttaaaatacacatttgctaatgagaagaatggattttgtttcagggggcataacattttgctgaattggagtacaaagttactgttttctattatcaagtcagttatagatgtttgtcagtaaaaaccattcttagttctcaggtaagagaaaaacagatggcagacctgatgtggactgcatgctatagtttgccaacccctagtcagtagcatagctctggtgatgttagttttggtgtggaaagtgtaaggacgtggtatggcccaggaccccatgttgctctttgaatggctgggaaggtgtttgaatgccacaacactggaattttgtgtatttaataaatagtggtagagaggccaggcaatagaaatacagaagtgagcaggatggtcaaggtcaatgccctgggagagcttacattctaagagagatgataagtgaatataaaatttgattccaggtgggggaggggtgtttaaaggatgtctctctgggaggtgatatttggatagagatctgaactaagggagggaatggtcgccagaactttaggtgaggcagcagcagaggcaacatcttgagataggagaaagcttgataagtgtgaacctccaggaagtgcaggtgagagcagagagggtgtgatgaggaagggggtgggagaggagtttgaggagagaggcaggggccagatacaaggagcctgggagcttgtattaatacaaaggagcatgcgatgggatgttgttggaaggattcgagcagccagagaatgatgcagtatgattaactgttggagaagatctctctagctgctgggcagagtagactctagaaggcaagagtggaagtggttttatggggccacaaaactgagtgttgaaaataaagatagtctgaaaaatgtggagtctgtgaccagcatatttttaagattgtcttctgtgtcataagtcaggatccttctggtttcaaataacccaactcaaaggaacccaaccagaaaggagaataccttggcccacataactgtaaagtccaggagttttcctggttttgtcacagctggtcccagggctccggtgatgtcaccatggctctctctgtccctcatctctcctctctccttttctctgtgggttggcctcattcactccttttgcacgtaaatgttttccatgagttggtgaagtggccgtcaggattctggatgcacataggagcttggcagctcccatggaaatagtactgctttctttcagcatctgcatatcactgtcaggaaagttccctgattggccttgcttaggtcacaggtccagcccttggaccagtctgtgatggatagtcccttggaactgggtaggttccctgaagacaggggtgctgaacagacacaacagtgtatgtccagctttggtctgtcctctttggtctcccttatttttctcttccttttctgcctcagacctttctgttagggatgcgtgccaaaactcaagtggaactggtgtctttaccctcaaaacacagactcctgaattataatcacatgctgattttcgtggttaccactgatcatgaccacatgattcttttgctctgagggttgggccaaaccccctcccttgttctggcaatgctattttgagaggccatgggggcaggcagggcctggcgggttccagactctggctcaccttttaataacttgctctgtgaccctggatgtgccatttaacctttctgagacttagtttctgagctgggtgcatcaactaagatatccatcaaatactttggaagatgtaaagtggcatttagatgacataggctatgtttcccaggctaggacatgggctatgtttcccaggctagagtgcgatggcacaatctcagctccctgcaacctctgcctcccgggttcaagcaattctccctgccccagcctcccaagtaactgggattacaggcacccacccccacgcccagctaattttttctgtttttagtagagttgggttttcgccacgttggccaggctggtcccgaactcctgacctcaggtgatctgcccgcctcagcctcccaaagtgctgggattacaggcttgagccaccgtgcctggccagtcttttttaatcttttgcttaggaaagagagtgacggggaaagaaaggtttaattctggaccttactacccacacataccagatctcccctctttgcataacttcttttttggcgggcatgtttcttcatttttatcttcttgataactttgatgccctggttggactcttaagcagattatccttgggtggggacgtcagcagggagaaccaccccagactaagacaagttgtgttttgtctgtcagccaaaagcactcttagcaatccgacatagacatcattttagatgtacagagaagaaagaacaacacagtattgataagatttcagcaagatcccccctcccccaaagacgaaaacacacaaaacttaatgcattgctctgtaatgccttggttcctagtttcctaattaggcctgtggtttagcagagtgcaccatctcaatacacagatggtttttatgtaaaaaaatttttttcaaatgttaatttccagtgactgatgttttatgcctaaatcattttccattgtttatatttgataagaactgtatttgaactgctcctttataagttggagtcttttgtaatgggatttaacttactggttttacaggtgtatgaaaatgttaagccgtgtattgtatttgagagtttgaaaattcttcgttgcagctaatttaagaaaaaaaaaattaaacaggtgattagcagctgctttcggttttgaatgtcctcgctttggggttttgtgtttgcttattcgtgtgcaaattggtgtggttattttggaccggttgagacgctccaacattgcacctcccaggccagctgcccagggcccattcagtagacccttccccgcttctcggggctgatttgttctcatcttgtgtgctcgagagcttgctctctccttaatgattcaggccttcctgagaaaacaaagcagctctggccccgtttctccttgaggacagccttgttcactgccacaaagaccctgctttctccccaagcagaggaactgcctctcggggcagccaagaaccacagacccaggcggctgcagctcctacttctgaacttctggtctcccgagtgacagcttctgcatggtcttaagctccaggacccccaaggccacccagagtcagagtccaccgccggtgggaaaaacaacattaggaagtgggtggtgtggtgtagaaggggctgcttagagcttctggccttcggagctggatccagccacttgagcttcattcggcagcacacagacacctcccctccctcctgctctgccccagaccttgtgctttcttggcaccgctgggtcgtgcctgctcagacctggtcagtgtgcttgccagggcgaggagagctttgcataggccgctgctgcttacttattaacgatgacgctggtgggagctgcgccaccagctccctatccaggcctttgtggttgcatcctgttcacataaaggtgaaatcatgacctgcccgacttgatttttcagttgaggggcttttgtgtatgtgtcgttcttgatccagtaagaggattgtgctttcattcacaaagatttgatcagtaaataggaagagaaaatactcaagggagaaatgcttagtgttccgattaatacattaatctttttttttgatgagctgaaggtgctctgttgtttctcttgactgagtctttgcccttacctttgaccttagtgacttgatcatccagccaggatctctgtacagccccatctcctttctgaggtcttgtggtcacacacatgctttcctgcttctgtcttgaatgatactcagtgaaccccacagctttgggggctgctatttgaggcaccacacttggcaggcttggctcccacggggagttgcaaagcttgcagttatagaccttggcaactatttgcccttaaagaaaagcatcagtgaaaagttgagggcagagggaagaagagaaagatcttcgtgggtttttctgtgtgtgtgggggggtgtgtgtgtgtgtgtgtgtgtgtttatggacagcatttgtacctgtaaaaccagaatgactccttcaggcattttttctcctgggtggttgcattcatgggctgaagctggctcttctgaagattgcaatgatatttaaggttaagggcttgccaggtaacaccttgaatgactcaaggctctgaggccaggctgcgtccatttgaaggaaggaagcatctttttctgattcatgcaaaggcatcttatggactaatggtcatcctagaaagtcatcactagtacaaggatcttttggaaaagtgagattggagaaggttgagtatgaaagtgatgtattagaaaggtgaatatgggatgtgagatcctagtcattagcgtttggagggggccttggaggtttgttagatcaaagctttcattgtgcaaatgaaatggcccagtgaggttaaaagagggaaggtcacacaaattccatgaaaaccataagtacaaggtttgaggaaaataattttaggacaaataaaagaagtgctgattttcattgcacttctaacagttttatagaagtgtctgtacctaaagtgttgtacatgttaaaatgtaaatatggtcaagaagattgtaggtgaaatcgaagatgatatgttgctagggcccagccctagcaacgtatcatcttttgaggagtgttcctcatactttgagattggttttatagagggctgttccttatactttgcgattggttttatagagggcaactctgttcacccacaaaagtctcttgatgccattgctggccagaacttgggtgggagaatgggaactgttcagcagagcaggtgaacaggtggtcctgccatcccagtggcaggggccccttcctttctcccgccactcccggaggaatgaccctgcatcttatgcactctctccgattccccaaatcccctaggtcccactgcttgggtttggggagtggggcacatctctgctgagagccagcccatcaagctgtctgggtctcatggtggcatatctttgttccaactcaatatgggcattttaatctttatttatttttaaaatttaattttattgaattcagctttaatattattgaattcagctacaagggagatagaatagggtgattgatagttaagagcatgggtcttaaagtcagaaagacaaaggctccaagtccagttaccaacttctgtaattctgtaattctggggggcggacttacctgtctgagtcttagtttcttcaactataaaatggatgtcccagtactgcctccctgccaaggttgtctgagtgagtcctcaataaaagctggtagtgagattaatagcacttgatggcaaagtttgtacccagtcatgggtaggggaattgcatctgccatccagtggctgaggtcaagtgatgacaccccaaactataggatcctggcagctacagcaggcattgctgcttccctttcggaaatcccaattgttgaggccctggctgaagccctgtcgagcccttggtgaccccactaccatttcctttatggttggcttactctgctttcttttgcaatgaatatagtttaaaatttctttatgagtgttctcctatttgctgccttagcctgtcacccactatgctgagctccccacccctcgtgatgccactcagcacctttatttgtgatgtggggtattctgggaaactcttcacaggcaactcagggagcctggccctccatcttatctcttaggaaatcctcaggtgtcccagggtttggcaccagagaagtgctgtagaccctgttttccagaaagctccgtgccttcacgtgtggtgagggagtggctgcccagagcaggcgaggaggcactgggggttgcacccatgttttattatgatgggggcttcagaagccagatgtctgcagctacttggagcaagcctgggtcttccttagactgcagttttaggacttaaggaaggagctgggctgctgccacatgctcgtgcttgtgtgtttaatttgtttattggtggattttctaccctgcctcacatcagaaagggcttgaggcccaggggtataataggtgaaactttttctcttgaacagttttgccttttcctaacttctccgagcctctgatctctaggagaggctagtcagcccttggtttaggggctctcccttgctgagtagggttttggctttgttggggctgtccaagggctccaggttccacttttagctgcacagctgacttgtctcttgtccccagatgctctcctggcccgtgagggccatagcatctcaactcatttaatctggtagcactgaggtgggcagtgtttctgagtgttttgtgtgaacccatgaagagaaaatgttagaactaggctttatgcccatggagtgattcttctacagtttcttagttctattaaattttaaaaatatcttattgcttccacagaagagaaatttttagaatatgggaagagcgaatataacattttgttcaatattaaaagttaatttaagacagaaccagaggccaagacaagtgtcttctcttttcttcatttggtgatataattgaccctttgtacctgcgtacaacttaatattcattcagcagaggctaattatgggatgcgtagatgccacatggttaaggtgaagatgcagatttctgtgtgagctgcttaattctgacggttataacttgtccataaaatttgctatggattgtaacaagtggaatattaactcggaatatggggaggtcaggagtatctcccatctgcttcctttctgaagggatcctagctgaactgagtggggggtatgttgtgcacagttaatatgttgttgacacttgaacaactcaagggttacggcccccctgcacagttgaaaatctgcgtataacttttgagtaccccaaaatgtaactacttaacctatcatcaactagagcctactgataacatcaacagttgattacacatgctttatatatgtattatatactgcatttttacaataaagtaagctagacaaaagaaaatgttaagaaaatcatggctgagtgcagtagctcatgcttgtaaacccagtactttggaaggccaaggcgggcagatggactgagctcagaagttcgagacagcctggataacatggtgaaaccctgtctttacaaaaaataaaaaaaaaaaaattagcctgggcatggtggctcatgcctgtagtcccagctactcaggatactgaggtgggaggatgacttgaacccaggatgcagaggttacattgaggcaagatcatgccactgcactcaagcctgggtgacagagcaagaccttgtctcaaaaaaaaaaaaaaaaaggaaaatcataaggaagagaaaatatatttactattctttaagtggaagtggatcatcataaaggacttcagacttgttatcttcacattgagtgggctgatgagaaggaagaagagggatggttttgctgtctcaggggtgcagaggtggaagaaaatccacatataagtggacccacatggtttacacttgtgttgttcaaggtttgactgtacgttctgagcccaaaattggaacacatgccctaaggccctgtcctggatcattttatatatgtgtatggtcaggcttacaaagatagaaaaatggaattccattttcttacatatttctacaaattattttggtcaaaatctagaaaatacataaaactgaggtctcctggaaaagccagaatttatctctgggattgggataattggctattaggaaaggggtctaccttgttggcctgtggtcttgacttttccttctggaactgagaatatgtgaatggctcgtggaactgcacggaacccagtggtgggcagtatctttgtaaacaaaatgaggttggctttcaatggccagggaatgaatgtggaaccaaattgcagtttgtagaaacagagctgggctcagacatttaaattaaacgtatatttctatttgcacttccattttgttcggtaatagtgttggatatgggaaatcttgtctttgtttatatttgagggaactgcagccttcatttcctaaacggaagatcctgtggcattcctgcaatggaagctcaccagatgatcagaaaagggagagatggcgaagtaacttgtctctggttaccctcccattgtggaaattaatatctgacccaattctgtttgcccagtgagtttatggcttgctaagtggctgttgtaatgatccgtcaactgttgcaacagcattttctaacaattttattttacagttctgaagttttagtccataaattttttgaacttaaggctttgagttggaggagccatgtggttctaggggggaaaaaagtgccagatttattctttatgtctgtgagctgtgccttccccccattcttttccctctttacatgccacccctctgatattttctacttgaaaaaaaaattcatactaaagtgcttgtctttgtataatgctactcatagaatatttgtatgaaaaaagagtcaggagatgcgatgttcaacccaagtgcatgaattatgattataaagtttccatttaaaaatgaaggctgttggaacccttacgtgttgctgatggaaatataaaatggtgtagccactgtacaaagcactgtggtagtttctcaaaaaattaaacatagatttattgtgtggtcagcagttctacttctggttatatacatgagagatttggaggcagggacttgaacagacatgtgtatacccacatacattgcagcattattcacaatagccaaaaggtggaaacaacccaaatgtccattgatacacgaatggataaacaaaatgtgatagacatatgattaaatagtattcagccttgaaaaggaaggcaattccgatagatgctacaatgtggatggaccttgaagacgtgctaagtgaaatcagcctgttacaaaaggagattatggctcctcctatatgaggttcctagagcagtcaaatccatagagctccccaccccttatgacatcactcagcaactttatttattaggtcacaagggggtggggagctctgtgacaaaaagagctctgtgacagaaagagtggcgattttatgttatggatattttaccactgtaaaaacataataggctgggcatggtagctcacgtctataatcccagccctttgggaggctgaagtgggcagatcacttgaggtcaggagttcgagaccagcatggccaacacggagaaaccctgtctctactaaaaagtaaagaaattagctgggtgtggtggcgcacgcctgtaatcccagctactcaggaggctgagggatgagaattgcttgagcctgggaggcaggggttgtagtgagccgaattggcaccactgcactccagcctgggcaacagagtgagattctgtctgaaacaacaacagcagcagcaacaacaacaacaacaaacaacaacaacaacaacaaacaacaacaacaacaaaacataataaatgaaggctgatgggaagccttatgtgggtggggttaatgtctctcttaagccagacaggtgagaactgccctctagatgtcctttgaaaatatagcactgcccaggctggtctgtcaatattagccagctaacgtggtccttaggtcccaggccacttcccaggtaaggggctccatccccgtgctgacctgcattttccttctaggtggggatttcaggtctagaagcagctcccacctgaaacctatgttcttggttgctttatgtgataattattgtgttctattttaagccactcctctgagtttggtaaccgtctgggattctgttttgttagccctctctgtgagacacaataaaagaacagcaagacctcatgtaggtggtgaggggccagaaggctcggctggctgggtttggagacacagtccctcctgtgcagcaggagttttcattccctataggtgaaggctgagaaaagacaaggctttgaataaaataaaatacatatttttctccctgctctggaaatgcgcttggctccaacacagcaggtggccgaggaactcaatctgtggaaggcatcagtgctttcagtgcaatcaaagttaagtgcagaaatttaattaaacggcatcaaggatggcagaaactttgtaaagctgcaatgcattgtcaaattcaacaattatttcaaggaacacaatccacagatggtgtctaattgataaattaaggttctgcttctctaatgggcttgtgtttaagcccgttttccacccatacaataaccatcacctccaggatgccccctttcccctctccagcttggacatcgctgcaagaagaaagcaacccagctcccccagatgacattcgggaagcctagggttgggtcctgaatgtttagtgggaaagacctccagctccttttcctgtgatcccaagctcccttttgggattgagtcttgtcctaaaaacagaaacaataggatttcttcgggcctgtgtgtccttttctgctctgctaacccggatgtgttgctcagagatggctgggttatttatttattcattttttttttctttttcctttttagcattgctgactttcttcctccatggcacaggatttttgcccaaaacaaaagtctcaatttatttgttctttaaaaaaataaaaaccacactgaacaaaaacctctgtttttcagaacttgcttcctgtctgttaatagtagatacccagctaacttacttttatttcgtaagaaaatatttgcgatctccaaacatccagtcatgtgcagagaaatgtatcctgtgttgagatttcatttgaaaggaaacctgaagatcttgggtgtttaccagaacttcattttgcagatgagaaaactgaggcacaatggttttttatataccttgctttgggactagttctgtgaaacatgatgtttctaaagctggaggagaggcagttgagcacatctgggctacctactttaaatggttatttcatccattcgtttgttctaccaacaaatatgcattaggtaccttagcttttctaaatgctaaggggaagttcagtggtgaaggaagacactattcctgcctgcgtggagctcacaggaaagtgtggggaacagatactgcacggatcctatgagtagctgtatcagtacaagttgggatgggtgttctgcaggcagggtagagggtgacctgggagtgtctactgggagacattaggagggtttctctgagaaatgacttagcattaggagggatgggaggagccttcttggcagaggggatagtgagctcacggctcagtgtaccagaagacccaatagaaggccatgtgggggaggagatagtgtgagaaaggctggcaatgagcaaacagagaatgttgtcctgggagatgagcttccacatattgtgcacttactggacagtatacctggtgctgttcagaaccttatacagcccatcttgtctaacccttactttattcctagatgtatctcagtatcttctacagattgtggcacatagtagagtctcagtaaatgaatcttcccaatgttgactattttttttgagacagagtctcgctctgtcacccaggctggatgcagtgggtgtgatatcgactcactgcaacttctgcctcccccggatcaagggagcctcccacctcaacctcccgaatagctgggaccaccgttgtgtaccatgccaggctattttcttgtattcttagtagagacagggtcttgccgtgttgcccaggctagtcttgagctcctgagctcaagcagccccacccgtttcggcctcccaaagtgctgggattacaagcatgagccaccatgcccagcgttggctattattatcccaacttttcagttggggaagttgaggtggactgaaggtaaatctgctggccccaggtccgagaccaccggtggggtgggtttctgtgctggacagcatctgtctcccccagcctgggcccttctcacgcctcttccctcccctgaagggatcacacgtttgaatgacttggagacttggagacacattctgtaattcataactctgaccacatgctgctcttaaatttccaccccgtgaaggaaagaagaaatgagagacaacccctaactttttatttttacacatatagtagaggtggagagggccaagtttacaacagaacctttgcaaaagcagcagccagggctcaggacctcactgggtacccttggccttgtctttgctccctacgggttgtcctggaacaggaaagcaaaggggaggagcgaagaggtggggacagccaaggaacagatcatatttacttatttgtttgtttatttctaacgagtagctgtggggaatgccactgcagaaccctttctaattgccttttatttatttatttttgccatagcgtgggtggcttttgaaattgcacgtaatttacggaggcgaggatcctgtgcctgggataccagatgatgtggctgaatggctgttggctgtttatttgctagtctgtcgttaccaacacagtattcttgagttcagaggcacaacagtgtttgatccccctcctctctcctatctaaatatatccaactagtcaatcagacttggcagccgtcagggctgtggctgtcagattgagtttgccttggctcctctgaactattggcttgttttccaagctcgaaagtgtatacaaatagtgatatctaaattagacttgcaaacacacacccaggtaggggccctgaaggggaagaatgaggcagcattttggtatgaaaatgacatttccttctcctccactatctgttggagagcacagacgaagctacactgaggggaatggcttcacgcttggtgaacaagatgcgtgggtgtgtttttctgaattgtgattaaaatgtttttttttccttcaaattttaagttgtatcaggagatacaagtggaatattaactcagtagatgggggaggtctggagtgtctcccatctgcttcccttctgaagggatctcagctgaactgaatgaggtatatgttgtgagcagttaatatacggttggtccttgtgatgttgttgtcttggctgaggattcaggaagactcttgggccttggagaggcctttggttccatggcctgccccattgggccggaacagcccctttcctcaaagctgcctcaggcttttcctgtagcttaggaacagcagaccgagctcctgggcccctccctggaggcttattaagggggatcagtggaaagaaaatcagagcatcttaaatccctacctgcaaggtacccttaattctccagggagaaaccttttataaataaatgtcatgagtgctcatcccccgagttgaagcttatctgcagagatgcttcactccgggagagagggttggagttgccattgtgaaggcctgtgtgtgtagaggtaccatgctgccaccaggccatccctcttacagctgtgtggcatcctggaggcctgggtaggagacggagggtgccgcaagttctcttccagtgatggggagccacaggtggttttgtagggttcctgggtcttaggtggttatcaaaagcatttcacagacatatgtaagataaagaccctgtcctcaagcagctaaatgaatgaactagaacagtggtacccaaattgtggttcgggacccctgggcattcctgataacctttcaaagagtctgtgacgaagtttcttaaataataattttaagactttgtgtttttcattctcatccttttatgaatatacagtagaatttttcataggctacatgacctctgttgacatcatagttctggtggctaatggaatatgtgtatttctgtgtttaaaaatgtctcaattttggctgagcgtggtggctcatgcactttgggaggctcccagcactttgggaggctgaggcgggcggattgcttggggtcaggagtttgagagcagcctggccaaaatggcaaaacaccgtctctactaaaaatacaaaaattagctggtcatggtggtgggcgcctgtaatcccagctactcgggagactgaggcaggagaacccttgaacccaggaggcagaggttgtagtgagcagagatctcaccactgtgctcccacctgggtgacggagtgagactgtgactccaaaaaaacaaaaacaaaaaagtctcaattttgatttctaatatgataaatattgagagatataacacacataattctctttggtggtcctcatgttttaagagggaaaaggtgtcatgacatcaaagattttcagaaccgcagaattagaatatcggcagataagtggcaagttgaagttatatgctaggtactaaggtaggcagagctctaggggtagataacaggtgcttgtgagtgagctggagaggagattgtcagggaaggctttcaagacaagtggttttcttacctcggttttgaaggatgaatagaagtttaccagagagacaaggaaggaaaaagcattctagaaggaaggaacggcatgcctgaaatatcagtgtgtcagcttttcctccccagtctgtgggggtcagaaatagggtcaccctggcctcaccatgagatttttttctactgggaatttccaaaataggctgcatctcagagtcatttggtgaggtttatggaaatactggtgaagctagttcccaggtgtgctttgctctactgatggttggtagcattgtttacctctggtggtgggaatgacagggtgctgtttgtaccattttcggttcttttgttgagagtgacgtcacagttgtcctgcagcaagccagggttatgccaccctgtcagctatgccagaatggcagcaggtgtcactggacacataccattccttctttacaccatctatcaacctacagtggggaaaggggcaagaatacagcataatgagaggggcagccagttgtagctcggggaccttggattctaagcagcatgaccttgggaagggtcttgagtctttgagcctgtttgtcctcttaggaataaagcaggttggacagaccttacttaataggcatgcttaaatctgccagggaaagggaccctcctgttgatgaataattcattctggttttgttcctagaaagtattccatggggcacacactttctcagctgctcttggttttgcaaaggaagatactgacatgttcagattaagaaatcgtaaagcttctgaactactaaggaagggaaaagaggggcccagggcccacatgtgtgccaggtgctgatctgagggttttttgtgactcatctcatttaatggtcacgctgttcctgtgagtaaaagctgtcatcccattttatagatgaagaaacagaggcacagagaggttaccttaatttgcccaaggtcacacagaatcctggtgttcaggcctcatgccttctgttcttaactccatatcctgtgtccctgggaaaggaaggggccatagtctggagtggtttccaggagaaaagagccagagtaatctctgctcttcatttcttaacaagaatagaagacagaataaagggcacagggataaaggattgttaaccagactggcaaatcagtagactaattaaaaatcaaacaccttaaaacactgtcgctgggttaattgtaaaccaacaatgaaacgttaaaatttgcccagcccatgagtttgaatgattaactgagtgagttaatttcaagccattggtttgagtagccgtgaaagctgaggttagtggaaggggaatctgtgtgttctttcctgcccaggcctgccctggtgcctaaggtcttgtgattgttgctgctgtttgcgtttttaatcgaaatatcttaaacatttaggcagaacctcacaaatgcagctagattgtggaaaaggacagtgtgaatcagcaaagagtaggattacgtatatctttccaaatagaagaaatgccattctgttttgcaatatcacagagtcctggtagcaagaaagggccctttggaaaggccttttgccttccagtgtttgacccaaggctgctgtcccatctgtggcctctgttgctctctcatgttcttttctgcccagagaccaggtctgggggtgttatcaggagttagtcctaagactggaatgagactcctgggattcaatgatggccagttgaccacaagatgtttctgttaggttttaagttgagattctgctacgcctgctttgatggctaggtaacactcctcagcaccaggtgatggatttaacctctgtgagctgtgtttctaacctgactgggcccagggatcatgctgggaaagttatggaccctttacccagagacttgcgctacaacacagccacatacagctttgcactgagggtcaggatgcacagatccctggtgctcagacatgaatggccttattagagtgaagaaaccctgtgttgaagtcaccaaacagctggactttaaatgttaatgttaatatttcactgtgacttatatagcattttattttttccagagttccttacaagacaatctgatttgatccgcaggagaatcctgtaaggtcaattatatagtcgctcttttatatatgacgcatgcagtaggctcagtatcttccctgagtgttgctgttttcttgttaatttgctaaatgggcttttaaaaaggagataaatgtaaatttcagccccgtaaaatagatacatctcaaatgctcgtgactcaaattaattaattaaaaaacagaataaaacaccactccagccacaaaacatggcaaggttgtaatgtttattccattcagccagttgatggggtaaaattacgagattggtctgtgataaaaatgtttttaactccaacttagacgtttacagaaaggagagacttgggcagtttgtttatttagaacattgattactgcttctgccatgttcctccaatcacaaacacttgggaaaattttggaaaactgcaagaactaagtaaaaatccccccaacgccactatttaccattcagagataactgctatgaacatttcggtacatttttttctgtcctttttcatggcaaaaaaaaaaaagggcaaaaaattatatagagacacaggtatacacacacacacacacacacaaatcattggctaacctgcctttataactttatcatattttcctcattcactgtttttatgttgtggtttttattgtctatgtggtgttgtgacttacaattatactttatttgaccaaagcctgttattgaatagttagctggttagtgatttattattattattataagtaacattgtggaatatccttgtacataaccccttagcaacatctctgatcacttccttaatatgtttacctagaagtggaattttggggttaaaggctatggatattttgaaggagattttacatataaatatatatgaaaaatatataaaggagcttatatatatgagatatataatctcctttacaatatcaaaaaatttgtaatatatatacttatatataatctcttaaaattttttttatcttacattggccctcccgataaggagaatggtactattttctaacctcaccaaaagtttgagagattaacttaatttaaaaaaaattactgtttttgtaaaaatgatgtgtttatggtaaacatttttatatgtgctgaaggggaaggcttaatttaaaaagattggggtttcttggatcaacttgaattgcttattttaaacagccctcttcagtgtagtttggcaaagctctctctttcgggtttatttgtttacttacctacttatcttcaacacactgacctacccacctgtgtatcttatttggttaacatttatccaagtttgaagatggaaatagttttcctctgaatcagaactttcagtgtaactgttccaagaaaccgccaccacagatgtgggaagagggaagagaatgaggaagattcctgctgtctttttaccgcttgggtttacaaatgtggcaaatttggaaaatgtcaaaaagtaggaaaaataaaatgaaacctgagatctcaccacacagaaataattatagtcaacatattgatatgttttctctttttggaggaaaaaagttacagatgaacagaaatttgaaaacaagctgtgcctattttctgtttcttttattacacattttattatcaatgaatactttctgctgtaaaaaatataaatgatacagaaaccaatagtagtgttcccctttctagaagaaactataaaagggtgtactgttcatcgcccctattcacgctttaaaggagatgtccagctccagttgaaaatgaagttttcttacctggcaatctggtgtttctgaatgtgatttgaaatccgccaccccaatgagaatgaggacagttttgtttttttttcctgccaagagggatcgatcgtattgattaattgactgcaaaaataaattcagaattatgaaaataaagggcatctggatttagaattaccaaatatggctgggcacaggggctcacgactgtaatcccgacactttatgaagccaaggcaggtggatcaccttaggtcaggagttcaagaccagcctggccaacatagtggtagagacatatctgtctctgccaaaaaatacaaaaattagctgggcgtggtggtgtgtgtctgtagtcccagccacttgggaggctgaggcacgcttgaacccaggagacggaggttgcagtgagctgagattgcgccactgcactccagcctgtcaaaaaaaaaaaatcaccaaatattaggtgtgttaagatcctgggagatcaaatttcaccctctcattttacagataagaaaactgaggcccaacaaacattagtaattgcctcaccccaggtcaatcagccagttaggaacaaaacagatttcaggttctagtttgtgtccttttttctttttaaatgaagatattgatctattttttaaaaacaagaacaaaggccgtgtgttagtctagtttcagttgcagagagctgaatccactcccatctggtttaagcagaaaggaatttgtttgagggcattaaaatgcttccagaaatcatcaggagatacacggaaacctctaggttgtgcttttgggaacagccctcagagctatgcagcagatctgggtcttcaaatacctactgtctcttctgtcatctggaagtccccaccaaattgggaagatggtgctacagctgccaggttcagaaccacagccgcactgtccccatccgaaggcctccatggctgccactgtcctgctgtgatctccagcaaaataggttctccatgactagtcagtagagacagaggatattgctgcagaataacctaacacctccctggccatgttgccaggggaaatagttaaagtacagaatatactactttccctttcatacctagctgcaagggaacctggaatattactccttaattttccagatcctgcataacagaaaggcttatggcgaggaggttggactggatgatggggaccgatttaccatgtctacttagtaaacagatcaaatgataagaaatagacttcagttctgtgttatggccatgcaaggtagactggcagagaagcaaaaaacaaaaacaaaaaagcagccagacaactagagaattgtccagaatttaagacagacaaagacagaagctatatgcagaaacatagcgtcaatagggtggcagcactacattgtactgttttaggatatatcatttgaagtcctgttgcatttttgcaaccctaggcataagtggtatgtggtagtttatacttaatgtgactgaaattcaattcaaatccaattccaacttgagtattgaagtttccctttctagcccttgaacttgtatcctgatatttgtccctaaaactttaacttcctcaatatttttttcctgcccttttcctggttttatttaccttatactattgaggaacctacattttccctcaaaatccaaaatttaaaaagatgcttgacaggaacagtggctcacgcctgtaatcccagcactttgggaggctgaggcaggtggatcacctgaggtcaggagttcgagaccagcctggccaacatagtgaaaccccatctctactaatgatacaaaaaattagctgggcatggtggtgcagcgcctgtaatcccagctactcgggaggttgaggcaggagaattgcttgaacccaggaggcagaggttgcagtaagtcgagattatgccactgcactccaacctgggcggtagagtgagacttcatctcataaataaaaataaataaataaatgcttatctttgatctagcaaggagaccacttagcatttattccatgtccagttgacatttgggatgtgctttaggcaagatggcagccagagcactagtcttgcctgctatgggaatgatcatcttggtttccatctcttcagcatctctagtgagacttcaggacatccctgaacattccccatacagatcgaacatcattatttgctcttcctggtcattgccagcttgttggtgtggcggctgagtgcttggtgttcacacagctctgagtttagatttgcctgggttaatgcagcatctttactaaatggtgaggcttatccacaaacatccagcatgactacattgaaaatcagacttatggaagaagaaggaagagagcactagatagagggtcaaaaatggagcgagagatggcacaaagtgtagtgatcagcaaatttaagcctctgacaagcggtggtcagcagccttcccaggcctctagctagtcaagtaggtcagccgcacttcccccgtggctgtttgtaaaacattctgctttgtggtatagagccaggagccgaggagaggaaactcaagaggcaaagatgcagttctgtcttcagaggcatttattttcctattcaggtgggtgaagccttgccaggaaacaatttctgagcgagtagaaatggtgatggaatacggaggattgtatgccaggcagcatggaagccatgggatcacggcgtggggagtggggctgtgaagccagccagagcttcttggaatagttgagggaggaggaggaggagatgatgatgtaacattatcacattcttctacttaagaattcaataatgacttcaggcagtgttattaaggcctgcccagcaagaatggaggcacagaggccactctgagtgaacatatttgggggactctgagatacagccatttcggggaatggggagtggtgttgagtgcaaataggagataaatttagagataaaggatgacgagactcccctgcccccatccttctcctttcattcgcgttgcccttacaggtagatgtctgttcctgtagccaaggcaccccaggccgcgttagccgatgctcactctgaccgcccaggagcagcaggctgagtcagcctgtcccgcctttgaacttgtgtgcagctgcttgctttaattaggtgatatgtgggttcccttatcttcctgagagaagatttctcgctttaggtgatcggctattgacgccaatgtgggattagagttccttctctccagtttcccctcaggccctgttacaggatgtctgagataggaaaatcacatgtttgaacaagtggtgggtgagttgcttggcaggtcgtcaagactgatacctccagtgccctttcaggttggcaaagcacattcacatagaatctgatttgatccctggagaaaaggtatacaatactttggaaatgtcccatttcatagatgaggaaacgaaggctcaaagggatgaagagtcttgctcagggccaagtagccagcagacagcaggtctgggaaccctatcccggtctggatccaatttattgccctctccttcagtgcaagctggtgtccacttggacttggttttcattgctcaaatcccttctcgcctaggtagggagcccctgaagggcacacagtcaaatgggccaagcacggcaggtgagaccctgacttctcatgaccccgtgttctggagttggagaaacttctgctagattgactggagatctgggttttcggttgtgatttttccattctcctaaaggtagacagcagaaataaaaatcctgaggcccaccgttgtcttccttacccctttgaagagttttctgtttatgagcagctgattggctcaaacttagcctttcagaaatagcgtcttcctcttttgggaaaatatggcatctcagttgctttctggacttgagaatatctgccctttgcctttgggcaacatttgctgccaagacctgcatgtcaataagatcccaccttcccctgggttcctcccacccccgacccaggaaaggggaagaacatggtcattctgggtgtcacgttgacctgcaagtgccttttttttttttttttgagacggagtctcgctctgtcccccaggctggagggcagtggcgcgatctcggctcactgcaagctccgcctcctgggttcatgccattctcctgcctcagcctcccaagtagctgggactacaggcgcccgccaccacgcccagctaattttttgtatttttagtagagacgaggtttcactgtgtttaccaggatggtctcgatctcctgaccttgtgatctgcccaccttggcctcccaaagtgctgggaccacaggcgtgagccaccgtgcccggcccacaaatacttttttaacctacttgggatagtcagttcagaaggaaggaatgagccaagcctgacttccctcaggtacgagtctgctaatctttaactctgacttgaatcagggcatccacttctttccttagatatccttctgccctgttacatcacctcatgtgttgcatcactgtggctggctccacagttggaattctgtgtcggggaaaggacagggaatttggggctctgcccaggtgagcagggattctccacagttcagtccagcaagtgtttttggaagggaggcctcctgtgcttagagcttcatgccccttcaccttctcagtgacctgccctatggaagtcatcatctttacaacaaggacttctgatatatttgactatatttccctggattctgcaaatggcagaatttggaaagacatgcattcatttgttcccccttgctcttcattactttaaaaaaaaaagctaatttgttttgatgagtagtagaggagaaggaggatagaactagatagaacctgtcttccactcgctccatcccacttcagaagtgaaggcatggccaggcacagtggctcacgcctgtaatcccagcattttgggaagccaaggcgggtggatcacgaggtcaggagatcaagaccatcctggccaacatggtgaaaccccgtctctactaaaaatacaaaaaattagccaggcgtggtggtgtgcacctgtagtcccagctactcgggaggctgaggcaggagaacggcgtgaacctgggaggcagagcttgcagtgaaccgagattgcaccactgcactccagcctgggtgacagagcgagacatcatctcaaaaaaaaaaaaaagaaaaaaaaagtgaaggcattatggacattcttttttttgaggcggagttttgctctgtcgtgtcccgggctggagtgcaatggcgcacacaatcttggttcactgtagcctcagcctcctgagtatctgggattacaggcatgtacctccatgtccggctaaattttgttttttgtttttattattttttttgagatagagtctcactctgttgcccaggttggagtgcagtgatgtaatctcggctcactgcaacctccgcctcccgggttgaagcaattctcctgcctcagcctcccgagtagctgggattacaggcgaacgccaccacacccagctaatttttctatttttagtagaggtggagcttcaccatgttggccaggctggtgtcgatctcctgacctagtgatctgcctgccttggcctcccaaagtgctgggattacaggcgttagccactgtgcccggccaatttttgtatttttagtagaggcagggtttctccgtattagccaggctggtctcaaactcctggcctcaagccatccgcctgcctcagcctcctaaagtgctaggattacaggagtgagccaccatgcccggcccatttcttgtttatcttcttaatttcttagtttgcccaagtttaggggtgttggcataccaggctttgagtgtggtccactggggagaaggttccagagtgaaccagccacccatgaggaaggacttgccccaaactgaattatccctctgtgactctgcacccaatgtggaatgactgggacagtaaatgagtggaagctgcattcttctcacagcgacatgggcccaaaatgctacctgtgctaagtggctgagtttgtgttatatgtgagccatcagcctgcgtgtggggtctgcagtcctctgacagggttcagttgcctacctgggtctatctcgcttttgctcttttgcgtgtgttctgcagaccgaccagaggttgttatttcactctccatcccctcatcaaactcacccaccccagacccttcaggaacaaaaccctgacatcctccctcatgcatttgttgtgatctcgtgtggccctgctctcagctcaccccacttctcttggctgccaggtttccgtgttttgagaaaaacctaaaaaaactaccacctgcctctactactcgatctactttccccaaacccttctctgagtcagggttgagttttccctcccgcccaccctgggctgggggagatgtggtctctcactggtactttatggaagggtgtctttattcaatttgactgttgctattatgtggcgaagccttcaataaaagtcgtgatttatgagatgtgtgtggctgtggttgttttttcgttttctttcttctttttttttttttttgctttgtcatctatcagggagagaaaagccaggcctgatactttcttggcatatcctgtgttcagttaagaatgtcagctgtcggccatcaggaagttacttctcggattggcttctcctcccttttacctctcaccacagtcccctcttgaaacaggcagaggcccctgctgtcctgcaggctggcgataaggggcctgctggatgctgtggggagagaagtggggcccctggagtggcccctcgccctcttaaccctcctcagtggctatgcgttcagcacccggtcagctcttgattgtttaataggaagaggcaggcagtgctcttccaggggtttccagagttttctttgttctcgaatacggtgactccccacccctcccaacttctctttgttttttggcctggccactttagaaatcctttcttttctttcttttttttgttttccttttcctttttcttttctgcaaagtatgtgcatgttagataaaggctcttgaatagaaggcctagcatattgggtattggctgctgaaaataggctaattggagatagaagcaagttgtcacagaggtgccgtgctagggggtgggaggaggatgaaccccagccaatgccaggatgactgtttccacctctcccctcttcccgctcttattattagctgtttgctgaaacgcacccatgtctttgtggagccacccacaatagcattaaccacgttgtgccctgcatcttaagcacctggttaaggccctgttctacgtctggaattggtccatgctgagcccccagagcgtgcgtaaatcaagtctttaacccacagcgggcggcctgggcaggaccgtggaaggtaggcctgctgaacttgagtggagtgtgtgcccctgggtttctaagcggcggcttctgaggcagagccacccagactttcattttggttagtagcggtgcttgtcagcaagttagaaacttggaaggcccccatcgttctggcctcctaacagggagagtgaagcgggggcaagctgggggacctgtaagtgcccactgggatttattcaaagtgaggtctttagacagtccttggtgaaatgtgctggactaaagggttagtccttcagccccctacccccaaacaaccaagtggatgtgggttttgccttctagataccaacagtctaagagggcagggggattctgcttttgtgagcacctgggtgctttgaatttggacatctgttactcttccagcaccaagggtaaagtagttggctagtcctatacctgacaccaccaggtgtgtaccttctctcacttctgtgtgtgctgatgtccctgttacccatggagatcttggcatcgagttatccttctggctttctctctggtggtctgtctgtgctcccccatccaggttctcagggggtcttcagcagtcctggcctggaattctggctcccctgacccccatcttacacatacccccagctcccacaccagtggctcttccttggcctgacctccctttcttttgcctggaaaaccctacccatttacttctcaattttatttttattttgagactgggtcttactctgttgcccaggctggagggcagtggcatgatcatggctcactgcagcctcaacctcctgaactcaaatgatcctcccacctcagcctccctagtagctgggactacaggtgtaccaccacacctggctaatttttgtattttttttagagacagggtttcaccatgttgcccaggctggtcttgaactcctggattcaagcgatctgcctgtctcggcctcccagagtgcggggattataggcgtgagccaccgtgcctggccaaacccacccatttttaaatggctcatctcaaatatctccccttccttgaagcctcttctgctttcttccctccccaaggcagtgaccctccctcctcctagccctatggcctctgctggttcttttagaacctgttaccttattgttccccctggtccttcttgttcctgtcctgtatgccccagtagcaggttacatattgaggacaagactgtcggtgtcactgctgtcctatagaactttctgtgatggaggaaatgctcatcttaatgcacgtgggcatggagcacttgaaatgtggctagggtgaccatgaactgaattgctaatggcacttcattttaattaatttacaatttaacttcagtagccatgtgtggctggtgctattctgtgtgcatcttgcttatctttgtattttcagaggccctggcactgtattctgctcacaagaaaaggcttgagaaatcacttaggtgtagagtcgtgtgagcttatgcattctttgcctattttccacgcaatttgatttttaagttaaattcaatagactatatacttgagcaccaccagtgctttgggggatgcaaagatgaaaagacatggtctctgccttcaaggaacttaaacctaacgggtaaatacttagtgataataggaagcagaatgaaatgaaatgctactcttcaggaatagtttacatcctgtgcaggtgtagagaaaacaatagtgtatgtgactgaggggtgttggggagatgctttaggatggtcattcattcattcagtaaatatttattgcatgtcactgaatggcccaggtactgggaatacatctgtggacaaaacagacaaaattcctgaccagaaagcttactttctggtaggagggggacaggtgagaaataaaacaagcaaattatagaatgtgctagaagatgagaggctgggagaaggtctagggagtgctgaggtgtgggcggaattgaagttttcaatggagtagttaaggaaggcctagtggagatggtgacatttgagcacagacatttggaccaagacttgagggtctgagaatcgtgataggaggtaaagacaggtgggaggatattcctgggtgagggaacagcttgaatgaagatctggggtgtggaaatgtgagcagtggtcagagacatgtggttggagcatagagggtagacagaacaggaagatgaagcttcaatgttagttgggaaactgataacaaagggctagaaaaccctgctggcaatttttgatggctctgcagataccctgcctccctgattaacatattaccccctccacccacgaggacagtggtcccagttattacttctgttcttcccatagggatttattccaagtagctgctcagaaattgtgtttattaaaggacagttaaaactaagccaaatgtcttacgatgaaattttgagaaagcaaaagtctaataagatcaggtctctcctttgggtaattgtaccattggctcttatgctatttctaggcatctctttgtgcagactgagtactctgctatgtcccaggtgtctcagtccctgtgtttgaacatgttcatttgccctggattcactttgggacacagagaaggtttgaggaagaaagggcctgtgaacagcaggaacagggtggaggaccaaggaggcttgtagaacagggtctgtgtccagggagaggaatgcttcatttcccagcaaggacagagacccagagacttaatggctggacaggaaatgagttgttctgagccacagatgccacttggagaacaactatacaagattatcatagttttagatgtaccctgagttttaagaattcagattttgcctaggaagaggaggagggcctttggcaagggcaagaaaggcctcttaaaaatacatcgcccatcagcctgttttaaggtggctgtttggaactactgacatttacaatgataatagatataaaaaccatttctaggctgggtgcggtggctcatgcctgtaatcccagcactttgggaggccaaggcgggtggatcacctgaggtcaggagttcgagaccagcctggccaacatggtgaaaccctgtctctactaaaaatacaaaaaagaattagtgaggcatggcagtgcatgcctgtcatcccagctacttgggaggctgaggcaggagaatcgcttgaacccaggaggcggaggttgcagtgacccaagattgcatcattgcactccagcttgggcaacagagcaagactccgtctaaaaaaaataaaataataaaatagaaatcatttctacccagaaaaaactgacattttagactcctgcctttctaaaggcagagttgaccactacaagcatatggtggtgtgccttgggggtggttatcatatttatggataaatctttcaatgccatcagcagcgaggtttacccccaatgaatacaactaaccagagactgccaggtcactccacggcttggtgcacccatgggcctgtctgggagacttgctcacgtggcagctcagagtttgctgatagctgcgtgtagactgctggcccagcaagcacccagatccatcatgggaagtgtgtggctgagatctggatccagtgaaactgaaaactgactcttcatcctactaaacatctttgtgatattgaacactgttgacccttcctttctatttgaaatggcctgacttctgtgttatagttattgttgctgtggaacaaattaccctcaaatttagcagcttcaggtaacaattttattatgctcatggagtctcaggtcagaaatttggatggggcatagcagggacagctggtttctttttcacctggtgtaggacctcagctgggaagacttgaaatcaaggggagacatgatggcaaggggctggaattatctgaaggcttgttcactcatatgtctggctcctgaactgggatgattcaaagaatggagctcctacatgtggtctgtctatatggttgggcttccttacaatatggtggcttcagaggagtgggacttcttgcttggtggctcagggctccaagtgtaagtgttctagtgaacaagctggaagctgcagcacctttttatgactcagcattgaaattcatgttcatcccttcttctgtcctctgttggttgaagtagtcagaagctccctcagactcgaggggagggacagagaccaaggaaccatgtgctgcaattggcaaagcagtttttcttcctcctcccctagttcagtgagtggtgctttgggtttccaaaagatgctggctaactcctgaaactgttcttgtccttgcttttactctaccccatcatcacatccactcccatgatttcagtggccactagatgttggtgaatttagtctgatctttctcttgagttccagagcagatacacagattgtcctacagacactgaaaatttaacatactcaaagtgaacacatttatctttcctctgcaaacctgctgcttctgcatcccctatctcaattggtgacaccaccatcagccacccagtaaactcaagacccttccctctccctcctttctgcctttggccatttacccagtcctgataattttgtctcctactctctcttaaatcttttccctctttgttatgcaaatgatccttgctttagttcagggtcccttcatcttgaactattatgataagctcctaaccgttcttacaggctctattttcaacctctcagatccatcctctacagaataacctatctaaaacacaaagctggtcatgttattccccagcttaaaatggttaccctttgtctacaggatgaagtccagtcttctttgttatggtctgcaagacttcttgtgatataacccttgttcatgtctccatcctcatctcccctcagaccctccttttcacttgacttctagcaatccaaaagtttagtgcctgaaacaagcaatgatattccatgctgctgtgactctgtctgcccttctctcttgtcttcctgaaaaacttctgctcattcgagacgagcctggccaacatggtgaaaccccatctactaaaaatacaaaaaactagtcaggcatggtggcacatgcctgtaatcccagctactcacaaggctgaggcaggaggatcgcttgaacctgggagttgaaggttgcagtgagctgagatagtgccgttgcaccccaccctgggcaacaagagcaaaactctgtctcaaaaaacaaaaaacaaaacaaaaaaactcctgctgctcatcatttcaaaccctagccaagcatctcctctttcaagcctgccctgactctactgacatagttcatcatatttccctgactggtctgacttctgtgttatagttgttgttgctgtggaacaaattaccctcaaatttagcagcttcaggtaaccattttattacacctgtctcttttgcataccataccatggtgtgtgttaggtgtctgggagatcttcaagggcacagaacgaaatcttgtagtctgggatcccagttcctgttaggtgctcattaatggttgatgtcgattggaatgaatcaggagtaggtaatacagacaatggcagttgtcctagaatctatgaatgccagtggtttctggcccttccctattttacttgaccttttgactgatttcttatcaagagtcaccaatggtcttttttagatataaagatacccctatcgaatcaccagctgtgcgtgtccaagtagcctggaagggtttgtctgacttcatctaacttcatcttctgatgttctaactttatcttctaacatcatcctctgattgtggcactttctgcttgggtcctcagtggctgctgaacagaactttggccagctgttcttcgtaggaacaaagccttttatcttcttagtgcttgtgcccagtgtagcagtgaggagtgtttgggattacctgaggggaaagagagaaaacaagtagggtgtccaggaacctagaataatccacagagtaattcagaacagggaacattcatccagcatttgtccaacccatatttattgaatgcctaccatgtgctaggcattcttttaggtgctaggaatacaggggtgcaccaaacagatgcaagtccttaacttccattctagagggtgcattgaccacaacccttctgaagcttccattctggagggtgcattgaccatggtcctcccttctgaagcctccatgctggaggggacattgaccacgaccctcccttctgaagcctccatgctggagggtgcattgaccatggccctcccttatgaagcacaccttctgtggggcatcctgatggcagctgatttgactatgagtccctagcccagtaccttgtacgtagcagacactcaacaaatgtttgtggagggaatgattaagtgttgttggacaaatgaggtttaactgtacagatttttctttcttgagggaagggaaccagattttgttaagtgcttgccaggtgcagggcaacttccccttagaagaccctgggcttccaggcagaagtgcccttcagagagagccacacgccatttgctgggccatgtgtctgatttgacagccctccagggtgaactacaaaatgagccctccatgttccggctgacagctacaggtccccagttgcctctttgcctcaataaacagccagcccagaccagttagctgggttgggcgcattggggaatatatcttttccttttttctttttcattgtttggttggcctagtgcaagtgttttaaatagaacagacatcatggctataaaacatctgtaacactacacatttagtaaagttcctggcggactgagttctgtttgattggtgatatttttgctgcgactgttgtttccttttctcttctgtttatccctctggaaaataagttttcttttatgtgaggatttatagaaatatgttcctggcatgtggagagcatggatgtattaggatattggtgtagcagagaaatattacctccgaggcatggccagctttatctcatagagagtgatcttcctaatgtgcaacagtctgttactctttacagggtcaggagctacctaggttaaggcagataaagacactgccttgtgttgaggtagcatatcatttttgctagagcatctctaaccattggaagttgatgggctggcgatggattgattcagggtggtgtctgagaaatcaagggtagtagaattcataataattagtatttaatttatagagtgtgtgtcatgccttttccaagtacttttccttctgttgtttagcctataaaacaggcagggaaggtttgatccccattcacagatgagcagacagaggtgaagtcactagtggggaagggaaggtggtggggagggggaagagggacttaattgtgtgcctgtcattgcagtccattccaaataagcatgtttcatgtgttatctcttttaatactattttgtagaagaaggaacaagtttagagaagctcagtcacttgcagtgatcacctagtaaaatgcattacaggatcgggttgcctgagtttgtcctctttccactccttcagcctgctcagggcactgggattggaacctggccttccaatctccaaaatcttcaaatctgatgctcttttcagcctctatggccctcttaggtttagaaaaatcatcttccgtccttagagggttgagacattcaataaaaggcagagagacttgctcatgatgattttggcctctctcttttactacaagcctttctttgggtttcccccttttccctcaaaggaagttacttgtggaggttggaagaggccagatcagcatatctgggctggggggaatttgactttttttcttgataggtaaaatttatgacttaacagatggctgagtgtatttccaaagaccactgcgctcagggtgcaatgtgcttatcgcttcttatgccttccccacctgcccccacttgctctcttgctcctggggtgtttctggaacagtagaatagctgggcaagaagggacctgctggtgggggagctaatcctagcccgcatgcgggttgcttaggactgctgtccaggtgtcttgctcctggttcatgcctttttctctacttccttgtcaacatctaagtgttaagatcacccagcctccccacccaatggccctactcttcttttttctttttcttttttttggagacttcttgctttgtcacccaggctggagtgcagtggtgccaacttggctcactgcaacctctgcctcctgggttcaagtgattctcatgcctcagcctcccaagtagctgggattacagatgtgtaccaccacacctggctaatttttgtatttttagtagaagtggagttttgccatgttggccagtctggtctcaaactcctgacctcaagtgatccacctgcctctgcctcccagagtgctgagatgacaggcgtgagctacagcacctagcccctgctcttcttcttcttcttcttcttctttttttttttttttgatacggagtctcactctgtcacccaggctggagtgcagtggtaccatctcagctcactgcaacctccgcctcccagattcaagcaattcttctgcctcagcctcccaagtagctgggaccacgggcatgtgccaccacacccaaccaatttttgaatttttagtacagacggggtttcaccatattggccaggctggtctcaaactcctgacctcatgatccgcctgcctcggcctcccaaagtactgggattacaggtgtgagccactgcgcccgagccccctgctcttctttttaatagctggattgaaaagtcactctcccgtttaaaccccacagagattcagccttcccgttgggcctggcctatcctccttgcatcccacaatgtcttatgctgcagtcttttgggaccactaacagtccttctgccagacaggctgcaaaggcccttctcccctttcttcctggctctcccctgctaacctttaagctgcaggtcatgcccagccctgtgctctcacagctctaccatactagaactaacacaggctcttacttgaatgtaagcatctttggagcagagatgaggtctcatgcagtgcttggcacatagtgggtcctcacaacaggtttgatgagagagtggattaatgaacatggcttgccactggagacactcagctgccatttcttttcttaccctcttggtctttctcaggactcagcaaaccttttttcaacacctactacgtgccaggtgcattaaaataatttgatgcttacagcagctctgtgacatataggtattgcccccactttatgcgtagtttgcctaaaattacccagctaggactcaagtccagcagtttcttgttgaaatcccaggctccttctgctcttctgtggctcttcacccctcatgctcaggaagggttttaatgaacaagaatctgaaggccaggcatggtggttcactcctgtaatcccagccctttgggaagctgaggcaggaggatcacttgaagccaggagcttgagaccagcctgcgtaacatagccagaccctgtctttaccaaaaaaaaaaaaaaagaaagaaaagaaaaagccagatgtggtcgtgtgtgcatgcttgtagtctcttctactcaggaggctgagatgggaggattactggagctcaggagttaaggctgcagtgagctatagtcatgccactggcctctggcctgggtgacagagcaagaccctgtctcaaaaaacttggcttttgttgaggcctctatccttgccatttttcccgttagatggcagaagtagcttcttacagagccctggctgcatattagaatgttctggggagtgtttaaaaatactgatgcccaggtctcaccttgaaccaatgagatccctgagggtggggcccaggtatcagtaagttttaacgacccccaccccgcaggccatgcgaatgtgcagccagaattgagaacctctgcactacaggagtgtcagtgtgtggattaggtaaaacttgctcatcagaaactgattgccacgtacatctaaaatatggtaatgaaggtaatcaaggctaagggttgaggctgccatttgttcttttcgtgaaatcaactggagggtttgggggatggggtaacttggctttagaacctgcctaccagcaaagtttttatacactcgctcctaagaagagcaggccagattgttgctgatgagaacaggcctcgttctggcaggtggctcccagtttactggagagatgggctctggaaatcctctcttggtctggcttctctctgaagcttggttttccttaagttgtggtgtatccgagggtctgtagtctcggccattccttctaacatggtttctcagcctgtctgtgatgtttcccaaatgtcatagtgaaggactcagaggttccccaagatgatagatcgggggtggctatttacttctgtttacagggaactttgacatgctcaacttttgtgtagaaaccattttccctggtagttgctacccagataaatggaaatgttttgggaaaagagcaatttgggagctctgagcttgtcaccaaggttgtgtgttcctaaatcctgcagcctgtacttgggctggtttcttttaccctgagcacagccggtgtgaagagcctcaggcatttctcagcgtgggaataggcactgaggagattccagccaggaggagaagctgggagaaaggttgcgctggaggagacagaacccttgtgtggatggtgttctcagggttacgatttcacatttgttgtttcagcttgtgttatttcagccagtgtcctaggcctgttttatagaacggagaacgtgaggctcggaactgttaggagacttgacccaacctcatctgagaaaccagggtcagttatttagcatgtctcagtttacataggtgtgcttgaaaatgggaacttcctattattgttgtatttgcatcatttctgtaggcagaatgaccttgggcctgtgctttagtcatgggaccctgagaccatcgtgccaccatttctagggccctacccctcaccgtgagtcatctgtgcatcttcagaagaattccaccctgggtgggcaactcgggctcccactgctggagtgacaggcacagatggaaagactgagttcataccaaccccaccatcctgtctggctctttctttcccacctctttctgaggtttattaagaatctgctttggctgcctttctcatgctggggctttagaggggcctcttttgtatgcagaaatgcacgacttcctcgcagattcaaaaacagtgaaggtttcttacttaattttgcttaataccactgttgtaaaagattatgggttttaattgcatcagtgtattggtaatcattcaaacacttgagaaagtctttggggtcttccccatagtgggtctgaatcaccgtgtggtgagcactggggggcagcggctcccagagggatggagtgatggagaaaccgcctgcagatgcagagcagcctgggtgcctgtgatcggaatgacggctagccagccacctcgctctgcagcgcttgatgcagggatcatgatccttaatttcctgtgctttccaaggcagccctcatctctctacctttgtcggttacctcccccagcccccaataggagtcagtgctactgtttaggatattactctctgatagtaatctgtggacaggtcacccctgtggctgcggctttttccctagggtaagaggaagtagtattttttaaattagcctaggagggagccaggtagagagctctgagatgagggtggggagcttcagctcccagccgaagcatcctgatcatttcattacaagatcaccttctcctgtaggtgagtttctgttgttttaatcagaggtaacgttgtgccctgactatgttgtataattgtgtgtgaattatattccagctccatataggcgagggctatttttttccttccaattttaaagctatttagagggaaggccaaattgtagcttgaaccctggtgctctctggctaatagctatatacagggagggagaacttggaggaacatttggggttatatttgtaattagtttcctttgaagttaaattaattttagcaatcggcaacgtaaaatattgttatacctttttccagtggtcacctgtgggtgacctgaggcctgtggaattgatgagagacgaagcggtgggaatggtgggcaggcacactttcttggacatgtgggcttattttaagtcatttttgcattcagactcttggcttagggatctctctggcctgtcatttttttttgacagctttattgagatataattcaaataccatataattcactcatttaaaatggtgcaattcaatggattttagtatattcacagatatgtgcacccatcaccacagtcaattttagagcatttttatcacctcaaaaagaaaccgcataccctttagccatcactccctccctctcccctggctctatgcaactactaatttacctgctgtctctacagatttccctattatggactttcatttggatggaatcaaatacaggttgaagatccctaatctgaaaatccaaaatccagaatgctcaaaaatctgaaactttttgagtgctgtcatggtgctcaagggaaatgctcgttggagcatttcagatttttgatttttgaattagagatgctgaactattgagtataatgcaaatatcccaaaatccaaaaacatttgaaatctgaaacacttccggttccacacatttcagataagggatacccaaactgtaatacgtgatgttctgtgtcttgcttgtttcacttggcataacgctttcaaggttcatccatgttgcagcatgtgtcagtacctcgttcctttttacagttgaataatattctatttatggatgtaccacattttgtttatccattcgtctgttgatggatatttgggttgttctattttttggctgttgctgccatgaacacttgtgtaaaagtttttgggtggacataggttttaatttctcttgggcatatactaaggagcggaattgctggatcatatggtaacactatgtttgtttatttatttatttatttatttatttttgagatgtttcactcttgtcacccaggctggagtgcaatggcacgatcttggctcactgtaacctccgcctcccgggttcaagtgattctcctgcctcagcctcccaagtagctgggattacagacgtgcaccaccatgcccagctaattttcgtatttttagtagagatggggttttgccatgttggccaggctagtctcaaactactgacctcaggtgatccacctgccttggcctcccaaggtgctgggattacaggtgtgagccaccatgcccagcctggtaacactatgtttaatcatttgtggagttgacagacaacgctgtgtttaatcatttgtggagttgccagactgttcccaaagcagctgcactattttaaatttccaccaggaagatctggcttgtcatttttgcatctttgctgcaaaattagaaaaggtgaagacatacctgctccttatggtgccctcaatcctcccctttttccaattgttttttttcttatggaaagaaagaagatgacacagtagcaaatgaaggtgttagagcagtgaataggaagggcaagatttggcttctccatttgtcactccatacgctgtttgattttggatgcttaacatttctgagtcttggtttccttatctgtggaagagtggctgggacctgccataagattgacatgaggactaagtcaggcaactcatgggaagtgcatacctcaggcctggcccacagatgatctacagtgagggcagagaattctaggcagggaagcagacacaccagtaaaagggcttttccataggggaaaagtatatctcaacagctcagattttattaggcaggagcctgcccttgcgtaaactctggccttactttcatcatgtgtttttatcagaggaacttgaatccttgtgtcacctttgggttgcttctccttacaggtggctttgtccttcccattcttcacctcaagacaggtgtcatttgaccatttaaagcagagatgtcctccctgtggcctctgccagtgggcgtgacttgccttgcttgggtgggtgtgatgccctcttcccccataattgatagagtttccatgtggactgtggctctgctgtcaccaaaaaaaggtgaggtcaaggcagtggtgtccttgcgcttctcccgaatagatctctgtattagttttgtgggacagctgtaacaaattaccacacactgagtggtttaagaaatagaaatatagtctttcatagttcaagagttcagaagtctgaaatcaaagtgtcagcaggactggttccctctggaggctccatgggaaaaactgtcccatacctctctcctagcttctggtggttgcccgcaattcttggtgttccttggtttgcaggcacatcactcaaggccctgccttcatctgcacatggccaccttctttctgtgtctgtttgtcctcttcttagaaggacacccgttactggatttagggcttaccctatgtccaggataacttcatctcaagattcttaactaattacatctgtaaagaccctgtttccaaataaggtcactttctgaaattctagatggacacgaattttggaggaactctttttgatccaacccagtctcttttccacatgtgatcctagaaacagttggagaagatgcccaatacctgacctgtgttctgactttgcaagctaagtaagtttgccactggattcagatgtgatggtgatagtagttatggtagtgatgaaggtggcaggagggtggctccgagggtgatggtggtagagttggtggtggcaagaatggtagtattggcagttgtgagggtgagggaggatgggaaaaatatggggagaagtagggattttagaggggaggtaccttgaatgaaacaccttggggaatggagtcttggtgttcgggagttctgtgatctcaggcagccctgctcgtgggtctggcatacaaagattggacttaattctcaaatgcagactgataggagaagactgccacattggcagatacataggatttcatcctggattctgaatttggtgagcacttttgttcttcagtgtcactggacaggatggggtaatagacagagcccttgtctgagcctgggaaagctgtcctcctaactacctgccttgcctttaactagcatgcgagtcatctcattgacttgacttttccatccgcacaatggggaggatgaactagaaggtttgcagcatcctacccagtgctagcattttaacatctttcctgggctttctccaccttggggttcccacagatgaggcatcatctgcaaacaagcctgtgttcttggggagtgaagatggcttacattttttcatcatggggaatttgaactcttttaaggaacatgataatagccagagctgatttaattcctgtgggcctttctcatactcatttaaggctctccagagccatttcctgccttttcatgtatttgttctgattaagaaatatttggtttttttggtgtttgttttgtttttgttttccttgtgtgataatgaatatctttaggccagtgctgttggaattaagttttccctttaatctcatttttaaaagtagtttctcttttctaacctccccttaccccactctgccttcaacacacacacaaaacacacacagcacacacaccacacacacacacacacacacatcccatttgctttatcctattttataaaaatacaaacagtggtcccattcctagtgaccgtttctgatgcaaacacattttttaaaagggaattttttttaactcaaaaagccagctctctgtttagaggcagggaggtggagtgctctttgcagctctggttagtactggctttggccagttcttacgtgtaaacagcaattttccaaacgggaatgggtgctggggttttctttatggagccaaggggtatgtggagagcagcggtgtttagttaaattacaggtctagatgcagaactttccagcaatgatttgtgagagcctgaacactccccactgccctttgtgcacacaggcaagagcgcacacacgcacacatgcacacggacacctcctgcttcccagagtgacaccttaaaccataaaaggaggggcgcctgctgggagagggggctgtccccacatggtgcaaggctgtcgggtaggtatctggtgtctctaatggtgggaagcactcacataccaaaatgttatccgcaacctctccactaaaactccaagcaaaggaaatttaagatcaatttcctaatggattttggactgagctccctgaaacagatgggtagctctccatctcagttcactgtggagctgagtggggccatctgagcattttgggatgcagtggctgcttccctgtaccctgtatgggtactctactggtattaaggctgcaggttaggaaacagttacctgaagggcctatcctaggaggaaaacaggtggctctctcttcactgggtaaagaggatttttgtttttttataacccaaaaggagtatagaacccgggggcctgccttgtccagccttctcactgtatccaggtttaaagttccagggatactgaatggttccttaggtaaatggaagccaagactcaaggagtgggactggagttgacccaaacacacacccatgcatgtgcatatacatgtgtgtgcaccctcacgtgtccatagaaaccttgcatagtattgatgggaattcgaggacctccatttagtcccactgaaagtcaggacacaacatcccagccccatccccttcctgccctcctcagtagccatggagatggcaaggaaaccgagagaagaatgtgtgactctagggttctctgcctctcgtgtccctcaccagaatgcaaattgtggagcaggccacagtccatttggcagtcatgctggcagcattctcaaagtaaatcacttccatttcccccagcatgcccctggcgggagaggtcactgtgcacagccctgtcgcccccatagctgtgcccccttctcctaaagccgagacactggtgagcagctaaccaagggttgcccatgtttccactggccttttcacgtttggaaggttttgattaaaacagtttctttcagtgtttgctgaggagtgggatccatcactgtatctgagctggtccctggagaggatgttttagtaacttggacactttggtgcattgtctgggacctggaatttctcatccttttttaaaaaaaggtgttttaaaggccttttggggactgtgtagatttatagctgaatggctgcctctgtgtttagggctctggctaggcaggtttatggctataaggcaacggtggagggtgtatgaagagatattttcatttcaccagttattggggaatgaacaatctgttgacttctgttatttggaatgaagacatgttgtttgttgaattctctgggaccacatgaacgtttggaatatagacagggctgctgtatacccgcccgactctaaacagtgtataaatgagaccatggggttcagattatagtatggctctccagagtttcttcaaattgagaactctactagtgtatgttggtagatcacgttagtgtttctttacagacatttaattacttggctggggtaagggaaaaaaaggaatgaaaaatctaaaattaaactattgggaatctctgcccatctgaaagcatgtagagatgcaggaaagtgtttttgaaattatagtggaagacaataggacagtaagagatgccttttcaaagacacgtttttgtgtaatgtgtcttttcgctgcgtgtttggttctgagcttgaaagatgagtctagtaactgactttggtcagttacagtgaccatttatttagcgactacacagtgccctgctagacacttggcatacattacttaatttactcctgataggaaccttgtatggtaggctaatcattatatcttcattttatagtggattacattccacattctattagaatataagctccggcacctcgcacttaatgtatctgttgaatgaatacattagcaaagttagattagtaaaatttggtgattcatgagtgtagggacagatgtaaatctggaaagggctaatcattatatcttcattttatagtggattacattccacattctattagaatgtaagctccagcacctcgcacttaatgtatctgttgaatgaatacattagcaaagttagattagtaaaatttggtgattcatgagtgtagggacagatttaaatctggaaagggcttgatggaattttgccattcaagtgacctcgatttaccagggagacttaaggaatgggtgagaagggagatggacaataatgagtgagcataagaggccaaccaggtcatgagaggtacttggagctcagtgctgtgcacagtggtgggatcttcatagaatttttcacatgcactatctcatctaatcccccattcatctgaaaagaggtgaaaaaacagtcaatcccagctttaaacacatgagcaagccactgcttggttctaatgggcagaaggaagtagggagtaggtggtatactgagttgttagaataatgtcctcttaaaacactgtggaacgtccatgacaaggatattcaagtttggggttaaccagcaggttgtggtggcatgtgtcttctgtgggagctactaagctaaacaagagctccctggagtctacgagctccaagtttggggtcaaccagcaggctatggtggcatgtgtcttctgtgggagctactaagctaaagcaagagctccctggagtctacgagctccaagtttggggtcaaccagcaggctatggtggcatgtgtcttctgtgggagctactaagctaaagcaagagctccctggagtctgcaagcctctctgcatcatggctatgatgctcatggattcatgggaatcgggcattaggtgggaccttggagccctgacccagcatctcgtgctgcagaaaactcatacctaggaggaagtgagtcctgcccagggtcacacccagagttagacccaggagctggatttccagtgccctacagcacagcctgccagtaaccactgtgccccctggtgtcactcacctcaggctcctgttgaggtgggtcggttcactcattcactcagcagatacgccgggagcctctgtgatgactgacccgggcagccatggctcctatgcttcagcatcctacatcacatcgagttgcagtagaaacagatgacattgtgtgttgattatatgccaacaaactggtcagaccctcacccatcaaattctacaattttgtattgtgacagtaaaactaaaatggcacatagcctaaactcagtctttagaacgaaatttattttcttgattttggctcctacgtgtaagattttggttcccactctgaacagttaatgtcattctccttttttttttttattgtgacagtaaaactaaaatggcacatagcctaaactcagtctttagaaagaaatttttcttgatttttggctcctacatgtaagattttggtctccactctgagcagttaatgtcattgagcttcctactcctttggctttggagctggtaggatttggaaatgtggccacattttttcacacgtacatctacaaaacattcagtgttggtttctatgtgcctgacgctgtgcctggcctggtggaggatttgtagaggagtcaagagcttattgtctggaggaggaagtaacttcacacaaggtggagagcagtgagtgttaagacagggatatggagacactgttagggggtttcagaaaagggtggactaactcctggctggattgataaataactattttgaattttggagaaaggtgctggatcctggaggaaggttacaacttgccgtagttaggttcaggagtggagaggcaccccaaggagaaggacctgcaggaacgaaagtgtagggatctggggattagctgggcttgactgggtgcagggtgaatcaagatgaatcacaggaaatcaggaggaggaatcctggacaaagcttgcagggtggtctccaggtgcgaggtcagcgtctgtgttgcttgcagacgtataccagcaccaagcacaaacagctcagcgtagacagcctgtgcgtacttttgaatcgtgtgcatttcttattgacaggttttgtggatggtttctgggcagcagtttttatgcatttgggtctgttttgttcacgtctcttagctttaaaatagcttgacatgtgatttttctctttttgctagtccatcagaatgaagttgcgtgttgtggctaatgaggttctgaagtctctgtgtctgtatgaaactcaagcttttaggttgccatctgaatgcctgagatatgcagagtgactgtctctagcatccttagacatctaaacgcccgcgccatgcagcttgaatatatctaaaattgccttcctagagaaatgtggagagcagattgtttcagcagcctcttgagccctgctttagataacctggttaacccatgcctttctcttgtcatttcttgcagatggtcacaagaacaaagaaaatatttgtaggcgggttatctgcgaacacagtagtggaagatgtaaagcaatatttcgagcagtttggcaaggtaagcgctggatggggttggatggcacatgccagaagtagcctcatcagtcctaagaagaggctaccgtggcccccgcccctgctacagctgtgtcctcaagaaccttgtccttgaacctggccatcatgatttaagtgaaattcagcagaagctgagatggaagagtctggcttgcatttggtgtgatgtcccacgtgctggcaggagcagacagagtggccttttagtgcagttttgcgggcatttgctggccacacggggcctgggctgggagctggtggtgacggcagctggggagggatgtggggctgtgactcgcagggcaggagctcccatggaagctgctagaggcctgcaggttggtgctgggcttctcccttctgtgcctgtttggaaaatgcattgagagctgagtctccctggggccctttgcagctgaaccctcccctgtcaaatgcccaaggagactcggaaaccatgcgaggcctgtacctgtcagcattctctgacctgaatgtctgtgagacagcagtaaaattaccccctgggctctgcttctggaacaggctgggaccaacccaagagccccacagcagccaggaaacagagtgtgagaaggtgtgtgtatgatagagagtcagaccgactgataggacatgtcaccgtgggtgaggtgtttaattcggcctctttctagtgggtgaagggagatggtgccttgagagtgggttcttgctgaggatgacacattcctcagatggccctgttgccttaggagggctgacccttgttggcttttgtgtataccaccctcctctggcccctgtggaaatggcaggttcaaggaggctgcgtcctgcatctttgagtaattgtggacatcgcgtgggagcccaggtctgggacagtctcctcctgacaggtttgggtcttccctgctgaagggctgacatgggagagagctgctgaggcgtcctgagaagacacagtgcccgtgctaagctccatcacttgtttcctcccacgatgggtgtcgtgcttgccatgggtacaaaggcacagccacccactggccaggctgaaggttctgtgctgttggtttgcccagggtgataggcagctatgaccctgtccccaggtgtgtctgtttgtgaactactgtctgggatgagggccatgacctttattcagcctcaaaatggagatgttcttgtctctggtattaatttctgcctggataggagaccgtgcaacaaagagaagccagcctcctccagcccagccttgcattctgagtggctctgagctgcccttccaggttggttttgaaaaggcctcccccatggccctttctggtattgtcagctggggatggattcattctggctgggtctaaagaatagccaagtgtgttgatgactgtgtacgttatagcacttctctcttccagactgatgtaaagcagtaagggggatttgtccatcacccagccccaccctgcctagggagagggattggaaataattaaatgagacaggtccggcttgcataatggaaagctctggagggtgagccctctttgctatctttctgcttttaaaacaagtccaggggtagtgtttgcaaacatgaagtgggatttctttttcgagccataacctgccttggaatctcatgggcctatttgtgtcagaaaagtcggtgctgcccagatgggcttttagagtattccagacaggcttctacttgccaacacatagcacatctctgcacgtccccaacccttggtttctttctgtctctctctctctctttcttcctttctgtatttctgtttctctctctgttgtttttcattaacacttatcattgtgacccagtatgcctccagtaagacacactgcaagctttggccatgcccacagtggccaccattgctgcccttagaacagttgtccttttgtctgagaagcagtcacaaaccatcttccctggcatggcactcgctgggtctgaagctgcccagttaattttgcagtaatgtttgtggactctggcaggatgtgcagacttatcaagtgttttattaaaagaccaaagaggcttttgaatgtatcaaagccataatgctcttcaatgctcatattttagtagcttttttttcatacataggttctgtgcattatttgtgtctgtctgcagaatggcttatttctcatttggctggtggcttgtgttactgtgtgtgtccccttgggcaggactcaccacctctcaggattctggcataacttatttgaatccagaatgatcaaagtcagggagactctgctgctgggccttgggagcactacaatgattaaatccagtggttgtgaaaggaggtaacaggtaaattgacagactgcctctccccttcggtactttatactctggttgaaggaaacagaatgaatgtgcacacacacacacacacacacacacacacacttgcatgaagtatattcacacacatgtgtacaccccctgtgcacacacatttctaactgtatgaaattgtttttgactctctttaaccaactgcaatttaatgaggtgtatgcgagtgcaaagtgtgggatactaggccaggccatttactcacattatctcatttaatttttctctggggggctggtagtggtattctccatgttgtagactgttaagtggggtcttgatgggattgtctcttggactcaaggtcacagctctccaggaggtagagctgggtgtggactccccctccaggcttgtctgataacagcatctgaactctgcaccctgtgccaactgctgatcagtccccaagatggactgacgatgggcaagatgcaaaggacaggaagatattgtgcccttcagtgtgccccggagtgctggggacctggacattcatcacctcattttacctgtgcagcagatattggtatcctccagtctatttggcgaaggtagacagtcagggccagggaggctgagtgtcagcagaggtcacccaggtaagacagtgtaagagccagaattcataccctacttccttttcctccaagtctagaactttcctttcacagcttccatgcaaggtgtaccactctctttttaggtctccttgccgtcattcctctctcctctccctcatcccatcctgcccgaggtggcagcttctccaactgtttatttcaggtggcaatcaagatgggtaagactgctatcaaggggctgagctaagggagtttaaatatgtcattactgtaagtggagtgggtacagagtgacacaccgggagctttaaataacttaaattggaggcttgtaaacccttttgtgtttttcttccaccttcctcccagaaaacacaccccctctccccaaggttagagatgttgttacttgtttatatttaagatcaggtcacgaagcgtggccactggcataaggactctgccaactgaggttaacagctaacaggttggcagaatccacacgtcaccatgagctacccaggggtgaagatggcattcccacccctgggtagctgttccggggttgtctgtccttggagaagggtaaggcagcagatactccagggcttcatgctgggcctaacagtggactgacctccctgggacagcctgatgggttgttcctttgctggcctcggcttctcttctcagggaaggggttggaaaacttaaaaagggccagatattaaatatttgcagctttgcaatccatgtagtccttgttgcagctactcacttctgctcttgtaggatgaaagcagccatcaccagcaggtaaacagatgcatgtagttgtgtgccaataaaactttatttacaaaaacaggtgatgaaccagatttggtctgtggaccatagtttgctgacccctggactgaattattcctgaggttagttttaagcttgaaaagtcagtaatgtagaaagtattcaaacattaataggatggatagattataatctaaggtatctataggctataaccaaaataatacgttgtcagtagtaataagcatggtatataatcagcagtctaaaccatgttagagtttattttgggacttcatgacgcagggacagtgaagggattctttatttggaaaaagccactatttataaactggaacttcatcctatgagtaagagccagaaaaactgttatagtatttccatctccctatttcaccagctagatgtaattaatgacactcggaatttttgaggtccaggttttactatgaagatccttttactgtgcgctgtttctgaattggagttactggtgctaagctttctaatgcattttacaatgtgcttctcaagggtgtcaagtgagatggttggcagatctattatgtaggtggtgaggctgatgttgagaaaggtgaggaagttctccaagatcactcagcccatgctgaggagagcctggatagtcacttgtttgtgcacaacctacccttcgcctctttttacttttataaagccccacctcccactttaccaccaagcagcatctttctcagaaggagcaggttttgttcatttgtcaaaaacgttgatatacagtaatttgttttactgccctgggtttcttagtggacgttatctgtgttcctgattccatacacacaggaatgatgtatataggccattccaaaaaatggcaggtaaatgatgctccagatatgcccgtgtagaccctggcgacgaggcggcctgttctgcactgttctcccggcagagccacccggaagagcccagcctggtaattaaaatgcactggatcaaagaaactccacacacacgggcttcctccttctccccttcaggcccctccttcaagtaccggtttcttaaattctcacttataggattttggagatcaaaaagaggcctttaaacttaatgaattctccgcttcgtcccggatggagccgttccgcacctttcagctgttcccgggaatgatagggcagctcagtgccgagctcgctaggtaattctcgctttctagaactcctgtgaaagcaaagcagcccgcatttggaggcttccaattatacttcacatggtgaactgtgtaattagtttggaagacttatgcttagtcattggtttatcctaatcggctttggctttccccaacaacaaagtgagcttattttgctaagctgaaacgactctgcaccctttgttcctgccttttattgtctcattcctttcattctgtgttactgccaaagttctgtttcattaggcctacaagtcatttccaattcagtgggctgctacaatccggcctttatcacgggctgctctggttcccatgtcccttctgggccagtgcctgagtttgtggtttgacatgagggctttaaccccttcctgtgccagcccctcactgtggtggccgggaagaaaaggccttccaggaaccggcgtggaaagttacagctcttgaggtctcgtcaaagtgggagatcgctgtggaaaccaggtgaaagggtccttggagccctttgtgtcggattggggttgtgtgggggcccataaaagttaacttgagctctggagaatggtgtgtgaaagctttttaggggaagaaaaaaagaaaacaagagtgaattgttttttttaatgtaatgagaccttcccgtttatccggccagcgtgggcgattgtgggtgagtgaggcccgaggaagcgctgggtgcctgcgatctcccagctccggggttttctgtgcaggtgcgaagctgcattcatggcccccactcagacaccccttttgatactgtatgtgtgaggagagtcatacctggaataaaagtctcataaagccctttgaaatttaaaaggcatgagatctgtgagaagataaataagcctgagagtggactgtgatcctcaggtagtgttttcttgctttaaatgtgtgtcgtagataaacagagctctgtgcagtgtggttctctcagaggaggcttggaaaacaaaagtcttgtgtgtcctttgtggacatctgagctcccgtgaggctttgtcctctgaagtggttcatgtaggtgggttgcccggggagtggtcagcctcccgggcctcaccctgtcctctgctccacctttttctggagagcctgggtgttgcccttcagaccttcttcaacgacaattgtaggctggaccaggaaggaccatgcgcacgctcttccctggctgaaggctacttttgtgtttaaattttcttcctctaatagcccagaacaaagccaacactgtccccatgttttattaatcttctgcctggtttgtgtcagcatctccctctggaagtgtgtcataaggggaggggactttatttgccccctgacccctggccaagctgctcagtgggaaacagcacagcgagtagacaggagaatcctgcttcctctgcctcctccaccttctaggccaggtggcagaggcaaacaaaccttacccatgagtaatatgatcctggggctttgcaggtaaaccctcctgctaaacaactttgtgttttcctggtgaacttttcctccatagactgatttcggctgaagccagtaaggttgtcgagttctaaagattgagcaccctaacgttacttctcttaaattttcgtatttttgcttcaaaaaggagattctgaaatactgggtttctaggaaaacttcccatttccctcttagtatataaaatatagccagctgttgttaggcaaaggcatcagacattattattgctcgttaacagtgttttaaaatatacaaatagaaaactaggatgccttctgggtagcaagctgggaaaactttgagattgtgctaatcaaatgccatgtgcatttgcatagtaggtagaggaacaaggccgaatagaagaacaaggctcaaacttcagctttgctgtttgaccgcatttcctggtatgatttagctgtatttactttttctgctgcggcaaggagaggagagccagcggtaggggagcccttgggcacaaaggagttaatgagccctgggtgggtaggggcgggggggcggtatgaagtacttccaccagctcaccttcccagagtcctcctgggccctctgaagacgtcacttaacaatggagttgttagtaggagaaaataaagcctttttctccctagatgtagttcagtgggaactgaaagtgtaccagaaatcatggttcaagcttgtgccagtgggtgcaaggggtggttcttatggaggagaaagcgcagttcatttagacttggcattgaaatcgaactctgttgttcggtggagtgaacattgatatggagattcccacccgccccccacctccgtaggatacccccttacacaggtcctgtatgcttttctttttcttccattttctttctttattttcttcttttgtcctcttagaaatagtctctctgtagaccggccagatttgtcaagttaccaccctctaaatttttacagctccgtatattcagacttggtatttgtgaattagctaaaagtgggctgccaatctgtactttatttacattcgaagccatattagtgagagccccagaaaaaaatgttaatatgcaggaagaggcaaaagggttgagtttctgactgttgctaacctcaccactgcctttaaaaccaatcatgaggcacacggctgatatttaatagcttttagctgattatttttcttctcctcctctttcttttctatccaagttgacctgggtgtacttgagtggaaatgaagtcatccaaatgctgaattagaataatcacaggcctctaagaatgaaatggaagcagagattaaatggcggagggaaagccggcattaataaggaccaggaaaactttgcataaaataaataggagatggaatagattgaatttgtatatgctgcttccatttcttcctccattttgtgttgtcttcctaagtcgagttactggcaaagtgggatttgatttgccacaaggactcataccttctgcagcctaggtgatgggcctttcttctttgtgggacgtttgtgtgaccattgatgtttccaggaaggaagaatctgatggaggggctgttaccatgaaatgttgatgattacttggtacaagtagtgcgtgggagacagatgaaagagtgtggggcacaggcacagtggctcacgcctgtaatcccagcactttggggggccaaggcgggcgaatcatgaggtcaggagttcgagaccagcctggccaacatggtgaaaccctgtctctactaaaaatacaaaaaattaactgagcgtggtggtgggcacctgtaatcccagctactcgggaggttgaggcaggagaatctcttgaacccaggaggtggaggttgcagtgagccgagatcgtgccactgcactctagcccgggtgacagtgtgagactctgtctccaaaaaaaaaaaaaaaaatggggagtatgggagccagtgcaccacaggccaacttaatattatgatgattcctcctcgtagggagaagacctgggcaggatgcaggtagggtgactggttgtctgggtttgcctgtgactaagggggtttctaggaacttgggccttgcaaactagaatgaattggtcaccttcaagcggagtctggagaagtcaagacacttggcctgacactctaaaagggtcagcatcttccttgaccacctccaaggagatttaaatactccttcctgcgtgctccagaacactaacttcatacctgtttacattctgccttcttcatttaatccagctgctgggtaaacagccagcatggggccttgcgtgagcacaggccggcaagtgttagatgagcaagtggctgctgaaggcaggtcagacagacccacagtctgtctgtctgtgcacccctctgggcttctatttggcgattatttctgtgtctcttgaaaaaaaaaattctgccccaatgtagcgaaaagtgagcttcttgtagttaaagagcaaaataaggatttaattaaattaaaaaaaaaagaaaagaaaacccagcagagtggtttgtttacaggaagtcgtttttaggtggtctgttatagaagatgtaatttgtgaaagtagattagttgtaaattagagattttgggttgtcgaggtcgctaaccatcttttataattggcggcagaggtaaatattttcagatttgcttatagagtgttagtattgacaaaacaatttaaggtgtttttcacttaaggaaaaataagtgagagtatggaatgatcagagacgggcttcctgatcttattcccagctttcttatggaatgacaagggtatggaaagcaacagggagatgaaatgctggagtagtttgcaagggagcttgcagattctctgatagggaaacagttttatttatttgtttatttattttattttacttatttatttagagacagggtctcactatggtttcccaggctggagtgcagcagcacgatttcagctcactgcagcctcagtctctggggctcaggtgattccccaacctcagcctcccaagtagctaggactacaggcatgcaccaccatgcctggctaatttttttgtatttttagtagagacagggtttcaccgtgttgccgaggctggtctcaaactcctggactcaagtgatctgcctgcctcagcctcccaaagtgttgggattacaggcgtgagccaccacactcagccgatttttattctttaataagagcaacccatttcttttatcaacagacttgttttcttagcaaaaagggaggacgtattgatgtcactgctttccattcaactaagttggtatttgtgttcagatttagggattcctgtttgcccgaaccgttcatgtatcttttaccttgtaattgtcccaacagccctgtgaggtaggataattatccctattttaaaattaggtaaggaagactaggagagcataaatgactatgtaagaccccttagcccaacagcagtggggcccaaggttcaaatctagacttcctgggtgaggactctgggtttgttgttaaacttaagctgtttatcctgaggtgatcttctttggggtggccctgaccagttgtttgtagtgccatagagttactatggtatggccaggcgcagtggttcacacctgtaatcccagcactttgggaggctgaggcgggtggatcatgaggttaggagtttgagaccagcctggccaacatggtgaaaccctgtctctactaaaaatacaaaaattagcagggtgtggtggcgggcgcttgtaatcccagctactcagaaggctgaggcaggagaattgcttgaacctgggaggcagaggttgcagtgagccaagatcacaccattgcactccagcctgggcgacaaaccaagactccgtctgggggcggggccgggggaagaattactatggtacctctttgaggaaagtcactctgaccttcctctctgtcacccaggctagagtatagtggcgcgacctcagctcactgcaacctctgcctcccaagttcaagcaattctcctgcctcagcttcctaagtagctgggtttacaggcgtgtgccaccacgcctgaataatttttgtatttttagtagagacagggtttcgccatgttagccaggctggtctcggactccagacctcaagtgatctgcctacctcagcctcccaaagtgctgggattacaggtgtgagctaccgcacctggccagtttgtctaaaatattttatattagaacaaatattatggcacagaatgcaatatttgcataattcttttttgaaacactgtgatacttgcagacacttcaggatcgcttctggctgcatcagttcctggtcattctgggctgtcccttaacgtactttgcctttaggaggagtacataggtagaaaagttgagaatctctattgtttactccttagtataggggctggcaaactttttctgcaaaaggccagataataactatttttagttttgtggcccagatggtctcctagaaccattcagttctgccatgctatcacgatgacagccaaagacaatatgaaaatgaatggttgtggctatattccaataaaactttatttacaaaagtcaggaggctgctggttttggccctcagactgtatagttttcatacccccttggctgagcatattgcctgctaataagagcataggttgtttacactcagtctgtctggtattagacccagctcatctgtttactagcttggtaaccttgggcaggtcatttaacttcttcccacctcactttctttatctgtaaaatggggataatgatggtctttaacccatagggttgtcatgaggattaaatgagctaatgcacacatagttgttagcatcctgctaagaaacagagtgagcacttaacaaatgttagaaacatgagctggtggtgttattttcaacgttggagactcaggtcctctgagactctggagtttccactttagtcctgtctagcagtaggcttgctagtgcaacagcctttatatacacacacacacacactctctctctctctgtctgtctcgttctctcattcatcttttccatctatcctgtgggggagcttaccactcaattcttctacccaccctggcaatgatgcaaactaaaaagcccttcctgcatcttctgagcataaagacgacgattcagttttatgcaattttggtgggatgtacctcgagttccatccggctaccccgctgcttccagtttgtggaactgacttgccggttgccctggctttgatgaaagagttgaaccgatgtaggcccaaagagagttcttctgggtggatccttctgatgaacactctttacatttctttctcgaataattaaactttttttggtaacggatactgcctggaaattgtcccagtatcatttggctgatgtttgttaaaatatctttatatatattgatccactaatctgtttattgcatttattttgcctcctgggagagcttttcagatcctcatttaagtttttctttccttttcctttacatatgattctaataagcttggttttctggcttcttttaaatttatagcaaatattaaggggtggaaagatgttaataaactcagtgtaaagcgagagggagaaaacctataaaaacaaagaggcttcgatcttgaaaagctccgcaatgtaggactgtttagtgcagggaaacagtcatccttcctcattaggcccacaaggcattgcatctacagcctcacgcatcattcatttgttcattgattcattcagcagaccttgattaccttgaatgccaggtaccgagctaggagccaggagcaccttggtgagtggaacagacaagatccttgcttacttggagcttaacaagcatggggtgtgggtggcggaggaccagccaaaagcaagcaaggaaataataaaaataattacagattgtgtcatcaaggaaagaaaccaggagctgagagaatccataatgggaatacggaagagggaatcttggcttatcaagaagtcagatatgtgtagtctctttgccttgacctgactgtaaattccaccaagtggggctgggtctgtttactcaccctgtagcaccaggactggcctatggcctgggcagtagttggtgctcagtaaacagtggtggaatgaatggatcctctgtatcggagggcagggaagttccagtcattggagaaggagtttcaaagggtaaaattaggattttttttttttttgagacagagtttcactcttgttgcccaagctggagtgcagtggtgcaatcttggctcactgcagcctctgcctcctgggttcaagcaactctcctgcctcagcctcccaagtagctgggattataggcgcctgtcaccacgcttggctaattttttgtattttttgtagagatgatgtttcgccatgttggccaggctggtctcaaactcctggccttaaaaggaggtgagcatctgcccgtgttggcctcccaaaatgctgggattacaggcatgagccaccctgcccagccaggatttttctttttaaaatggggcattaagagagtatattccattatctggagcatttccttatgtgaaacccattatttccctgcatcctaggatcccttagctatttccaacccgcagcaaaagcttaatagaactaagggaatatctgggcagggtgagctggtcagtaatgcccttttcagagtcggtagattctcaggcaggtttcggcatagagggtagacacagagaagggaaggatgtcaggagggtaaaaattgggatatgcaactctgtttcatcttctctccttctcttctttctgtctttggtctaagaaaagcagtagacttgctgcttgggaggtaccagggtaggtcagtgactttgaaaagctggtgagacggtgagagcgttgactcatctaggctcatagatgttatggatcctctgggcaccagggatgggggtacttggatgggcatcgggcagtttctctcccagacttgccgtcttgtgatcagccagggtggggaatgaaaatgggtccaacaacattaagccacagcacaatcctccctgatgttgagaaatctggctgtggacatggagaatgtgtttgtgggtacatttttgcctctcgaatgaaccgaatttgccattggcatttactgccagactgtcgggaattatgtggggttgtggggggattatgtggggtgaagttgaacaattctcaactttggaattgggcagacctgagtttgaatccagatcatttgctgttagcattgtgaccctgggctattgattcaactgtctcctgagcctggtttctcatccgttaagtgggcatacaatttcatttacaatggggttgtaagaatgaaaagatacacatttgcccagggtctggcacatgggtatttaatgatagtctcccctgcctgcattccctttctgctccccattccccccaacatcccgtgtttctgaacccccaaattgctgactttcaccaggttcactccctctgataaactccctcccttaatctgcacaaagccctctctgtgtgccaaatggacggtttttggaccagtttcttagttgctcccagcctctgcccccacccctccacagctatccctctgacaaatccggaaccatggaagtcctcattctgagatcctcctagatttaacccagctggagttagtgttgggggaggctaagtggaggatttggctttttttcctcttatgctaatgaagtgaatatggcaaggagtcacaatattttctttccaggcaaagaaatgttgtagtaggagaaacagcatgcaggggaagcaaatgtgatctcactggattctctcaagggaggaataggacaaattgtcagcttctgttgagaagataatactctcactatgataaatgccaagtttctattgaaaaccaccatcttaatggtggtgtccccaagcactcagtgcttgcctggcagccgagaccagaggagaagcagaggaaagcagatatttgtagggggttgtttgtttgcaatgagaaatcagttcaaagcaaaggagatggtgcattaaaaatgttcttttaaggcagctttaaaaagctaactggagtgctccagtgtggcctgatcttaaaacacacctatggggagacttccaccctcaataaatatttcttgcatatgacttgaattaaaggaggcacatggggctggaagccgcccgaaataattttccctcccataggaagcagccgctgtaattcacttgcaagttatttcaaaaggcctgttctgatagaaattgctgccttctcgtggactgggatttttctcgtactgtctgtgacatcccttcttgacaagggtgtgtccgcccatattttacaatgcaccactccctcaaagagcgtctcagtttgttgttgccctttttgggggtgcttatgctggtttctcttagacacctgagtgtggctgatctgcctcacagcctacactcagggagaccttcaggttagttaagggagttcctggggttggggggctggacgacagtacattcaggagctctaagaatgctggtgatcatgggaacaactggagggggaggaagaaggtctcttatcagctgctgttgaaaggtcctaaggtggttgtgcttgtccaaccatccttgcattcaggaacccaagctaggtattaagcaccatgatggggccacagagatgggtgaggtggggtgcccacccatgtggggcttgtggtcaaggagcagagatggtggtaagcagaatcgcagtgtggtatagcaaatggagagcctgccagtgtcactgcgaggtggggacggtggttgctgctgtggagctcctctcccaggcctcccatcctttccctcagctgactcggctgttccctatggtggccgctgaaggcagatcatgtcttcatgtgcctcaatgccagcctgagcattgacctggaaaaggtgcttgacagacatttattctgggctccataaaggaccagtgttgccatggtaggtggaggagaggaggaagcccagagtgtgacttgccccacacacccctggatatcacagtcctgcccctgcccattttggaaagaaccacatggagagggctcacttccatggacctgaaatcgtgagtttgactttgtcatcagctgcagagcaaggagggaggcagtttacatctggatgcctgcattcaccttgcccagagatgctgactgctgaggatgcacctcagggctttacagatgctccccttcttgccatgttcagtctcctccctgagatcttacccctcaacccccaagaagccacaaggcaggtctgcttgtttgacccatgagtggaacggtagatgtgatcttttcaatgtgaaagaacctcagcgaacattagtcagggtgtctcagttataattcagtctcattattgcctcccggatgtgattaacctgggatctgctcatgaagggatttggccgcccaaggaaatggacaaagatgatggatcaggtgcacctgggacagaatgacagctgaagtcagtggttttctgctaaacccataacttaaccactggttgaaagtctgtatcaggtgtcccaaatcaaatgtattgattctagatgcctttttgtaaagaggcaataaaaagaaataccatttattttcacaattgttccttcctccctgtgtctaggaattacagagtcattgttattattcctcctctcattcgtagctccaagtacatagagagcagggcttgacacactttgtctgtaaagggtcagataccaaatattttagactctgtgggccatacggtctctgtccctgctactcggttctgctgttgtagcacaaaagcagccatagacaatatgtaaatgaatgagtgtggctgtgttccaattccacttttatttacaaaaacaggcagcaggcctgtgggccgtaagttgctatcccctgttatagacagtcctagtcgtcaacttgacgtctcaaagaaagcagcgatttcatagaactgaggatattttcaggatcagtaataaactttaggggcatggctatgctcatttgaaatagtcatccttttaatgtaggcacatgtcagaaaggtacattgtattgtctgatgccatccctccaagatatttggaaaaatcttttggagtaagtagctgcaaataataaggactagggagagttaagagcaggcataagcccctgtcagtcacataaggtttgttatagtgaataggcaaggaatgatcattttggggtcttgcttttttcttgggctgtggggtgctcttgctcaaggacaggtgctctgtgtggacgtggtagccacaagctagaggattgtacccacaaacgtgtgcaaaggcttgctcgtcatgcaacacttatctggccacattcctgaaagtggaaggccaaagtgggaacttttatgcagctttatgcgacgggtccttgactctgctcactcacatctataagctgagaatttggtggtaatcacttttctaaaagaggaaaaaatggatccacatggattaatctgcactgtttaggtctgtaaaaaaccagtgacattgacatgtcaatgaaaatggtggaaattaacacttggaaatttttatataaaacctttattgaaaattcagttaaacattcacacactaaaaagagctctatatttataactgaaaaactcaatttgatgcaagctgcttatttctccattgtggtcacgtgggctgaggttcttagtatgaaatgtaatttacacaaattagtccaaggcaggtagagtgtgaaattaaattgatgccttgatttctgtattctctagttaagtgtttctctgaaaattcgtcatttctgtcctaggaactttaaagtatggaggttttctttttttttttttttaaatagagcaaagaagttcttactggttaaggacatgaaacaaccttaattacaggctaaaaaggcacgttccattttgttttgtggctaaatattagagtgacccccaaattgggctgccagtagaggtagaaaacttgggctttaacgcaattattacatttttctttttttttttttgagatggagtctcactctgtcacccaggctggagtgcagtggctcagtctcagctcactgcaacctccgcctcccaggttcaagcgattctcctgcctcagcctcccgagtagctgggattacaggtgctcatcagcatgcctggctaattttttttttttttttgtatttttagtagagaagggatttcaccatgttggccaggctggtctcgaactcctgacctcaggtgatccacccacctcagcctcccaaagtgcagggattacaggcatgagccactgtgccagccagctagtacatttctcaactagctgcaccaagccatctaatttctttggttgtgatgagaacaggttagggctgttagctgtgtagacctagaaggggctttgcagacccttttacagatgagaaaactgaggctcatgaataacattctgaccttggtctcttcggtcaggacgccgtggaccctggctgggcctgcttctgcccctgagtccgcactgctgcctctcactgaggacagttgtcggtgttggtgtcagattgtgtcagtaatcgtagtaagaatgaatcaagtatggggtatcctggttcaaatttgataatccaagaggaaggagaatcactacttgcccagaaataatggaaggccaagatgatctgacgaccttgtaaggagatcaccagtgctctgggactgaacccatctgctgggtcctggggtagctctgttgactgccctctgctgaaaaggagtcaggttgcacctctagggtccaggacgcaggtgattgcattttatcagcatctttctcacaggccaccctccagcaaggtagacatgggtcagccctgccaactttggaatgaatcatttctttcaaataactagcgactgacgttcggggcagtctgaaaaatgaattatgggctctcacgatttttatttgtccatggtggcataggtggtatttatctctcttgtccttgctctcccccacttttggagcctttgtctctgtctgagtcagcatgacatggtttgaaaattgcctgtttggcttttaatgatgattaatgtccatagccatgtttcaaatttaggatctcttgaagagtctccgagaccgttaccaagagcaacctgccgagggagtcggcgcagagctccgtactttcccagcctgaattagattcctcccaaacttctccatctttccaccagcaccccgtgggcccttcttgggtctttgacaccaggagctgagctggcctgcccatctggcaagctccaaccaccctcttgggttagtgcctgtcccatgggctatctggaagggtcactttttcttgcttcttcctccccacccccaaatcagagaggccaatgaggagcttaatttcctcaacagcaggtgtctgtcatctatctgaagatagttgccaacatctggtacaattgcctccgcaaacgcagtaacaaggcggcctgcagttcaggcgcagagcgagcatcgccgctttaatgataacaagctgttggcctcccctctgagatgaatccatctcacagatgtttgtctagttttggcaatcgtattgcactatagctttggtgattatgctcgactggagactattacaataaaagaagtttgaacttgttccatttttataccccacccccttctcccctgttctgaggtataatttatatcaatggctgtaatattggttcccttactgaggcctctttactttttatgatgtcggtggagctgcagctgatagcctggcttcctccacaggttaatgtgttttggctccatcagcgcttttaatgtccacgcttaatggccccgtggcagtcccctcaccctctgtcaaagcgcatgttgacactgagaggtcatgtgattactttgacggagtatctccagctgtagatagttacagcttgtgtgtgtatgtagggcgtgaacatggggcgtgtggaaggcctgatgcttgcacaggacggagtagatcagaaggagaggtttttcctgaaggtggcaacagtaagagacaaggcctgggaatgtagaaccttctagactactggtggacttcctctctgcctctctccctctgtccctcctccccattcattctcctcctcctcctccttctcctcaggcacagtatacttttactgagacaaaataaatagtcctggtgcagtggctcaagcctataatcccaagactttggaaggccgaggtggggaggatcgcttgaggccagaagtttgagaccagtgtgggtcacatagtgagaccctatctgtacaaaaaatgtgcctgtactcctagctacatgggaggctaaagcaggagggtcgcttgagcccaggagttcgaggctgcagtgagctatgattgtaccactgcactccagcctgggcaacagagtgaggcttcatctcaaaaccacaaaaataacaacaaagcaaaataaatagaaatcacaccttggtgaaagggcatttggaggcctgtcaggtagtttatgctgcagtgtttgacattttgggctttaattacacagtggtttaatatttaatactatcaaatgttacacagctttacaattatagttctacatatgaaaattgaaaggaactatcaatccactcaaatcgtatttagtgatagtaaataccaggtattttaaataataactctcattaattgcatctccactgtgtactaggtactacacgaactgcttttattagtagataaatggggccaggtgcggtggctcacgcctgtaatcctagcactttgggaggctgaggagggcggatcatgagatcacgaattcgagaccagcctggccaatatggtgaaaccccatctctactaaaaatacaaaaattatccgagcatgatggcaggtgcccgtagtctcagctactcaggaggctgaggcagaagaatcacttgaacccaggagacggaggttgcagtgagctgagatcgcaccactgcactccagcctgggtgacagagtgagactcagcctcaaaaaaaaagataaatgggtaattcttacagtctccctgtgaggtaggtattcttttgtcttgtcacaggtgaggaaaatgagggtccgggacaggaaagtacatgcccaatggcacaaagctgccaagggacagagagagcgctcagtccagggctagcaaactccagacccatgctcattctccagccatcattgtcaccgctaaccctgctcgtggtctgctttgatgtcatggaaaaattggcccatctgagatgtggcgcattatataaatcagtacagcgtaaatcaccatcatcacttgacatttaagcctttttttcattttaatttggatattactttgtcaaagattaggcaacgtaattttggcaaggtgttatttttggcagtgcacttacgaatgggtgagtcagcctggctgtggatgcatcattggtggcagggcaccatgggtttctttctttgtccagaaatagacactggtctctggactggtgacacttcaggaggctccagatgactgtactgggtgcgtgtatagcagccttctatgaggaactaaaggggccacctcatcttggcctctagataggactctattctttaatgagtccttcagatatgtgggttcgagtcccatagggagagaaaaaacttttcccaaaaagttaaaatagagtgatcttttgtgatgcatatcaaaataaaaaccatgggatggcttatgaaaattaatggaattaaatttcccagaaatggctaaaaatgtgcagcttgcaacccagcagtttattaaagacttgagaacattatcttcgccattcgagttagatttaagtatatgcttttaacctgggccacacacagtaatagaagaagcccgacagaaatgtaaagacctgctaatttcctttgtgatcttgggcctcgtcttacttctctgggccttggctatcttttctacaaatttcggctttgtagacattggatgagatttcagatctcttccagccctgtagctgcattctattctgttggccagcgcctgctcatgcctttccacaattgaagtgtctgttgcgtggatcaccatcaccatcctccttctgttctgagctacatcccaagttgcccaaagtcaggttaagtccagcataatttgccatttgttaaagtatgcctgttgatttgtcatctttccttcttgacttccctccctcagcacagatctctcatgccagtagtcaaatataaaatttttcatacccacccagcgttttgcatgggttcttcactctctcctgcccgcccctcctcaccaaatgagttctttctttgcgaagctggagccaaaccaccaaaatgccacaaagacatgtggcgcagctttttccagtttttctcttgcggtagttacaatattattaaaaatccattaaattttaatgtaccctataaaatatgtgctcttgtgaaagcaagcacagataattatttctgatgaataaaccaagaggacaagtatgtatgaagttcatgctgcagcattcaatttttattatatacatctcctgcaggggcaatcactgtgatgttccagctggttgtgtggagggctggttcttctcagagatcctttggggcagcatgaaccctgaactctccgaatgttctcagagcttgttattacctggaaagagagagccctgtgtaggagctgtcttctgttaagctcttcaaacaaaagaatgaaggactaaatgaatcaggatgagaaaaatgcagtctctctaatactccaaggtatccttctgggatgaggagggaaaaatcagacatacatttgaagatcttctacctagtagctctgttcccttgagccagtctcttagcttctctgagtatttgtttcctaaatgggagatgagcgttctctctgccttggggcttaacagaggcacagaagagcctgtgtctggctcagagtgggaattctgacttgcggtttccctctttcagtctttttcttcttcttctggagatcctttgaaagttttctcatagctccagaagttggaaaacagagctgctgcctggcctcctggagtctgtgtggtgtgaggcttgggagccattaacacatgactatctagtgtcacagctgctggctctggacatctcctgatgcttcaggggtggcttccatattggtttccagaggctgcatgcacctgccaggtggatggaagtgtttcccatgggagttgctgggcccctgtctgccttctcggggtgcctgtggcctctgtgcctgatgactctagggcaggggtctgatgactccaggacagccagtgtcatccctttgcttgcagatgaggtggcttagaaccaagagggaggagcttagcccagcagaccctcctgggatttgttggaggctgtgcttgggagtcggacacctgatctgctttgcaattttatgaggtccaacttctgatcctcagcgaggccccatttccttcctggggcagggttagtcatccggccctgcaggaggtggggcaggactcaggaagcacttggaatggcctggaaatcatgggctataaaagcctttcttcccagggtggcggagtgcactactctcacatttaatcctgcccggtatcctgaagaggggagggccagggttgtaggtgagttgcatggagttattctggaatattccacaactacagttgggactcagctgctgggatcagtggtgaagaaagtcccacattttgcacagaattgggtgatctgtaaatgaaggaagtttatttttaacagcattatgattttgtttaaaaacgaaaagacatactagaaaaaattaaatacataagtaaacagagaactaacaaatcctctcatctcatcaccatgagataacccacagtaacattttggtgtaggcttccagaggtctgtctgcacatatataaactacggttgtgtacacttttatataaatgagatcatatgtggtgtttgccagatggccttttctggtcagtagtatgtcagaggcatttttccatgtgattgtaccctacatggtcatatttgttgccttcattgtttctgtgatatcgatgcactatgattgacttacgcaaacccttagttaggatcatttaggttgtttgcagtatcattatgatcattgtttggtattatagccagttctggcaggaccgcccttgtgcatgcatttctctcctgctcctgcaatacttttgacctagcaattccacttctaggaatttacaataaggagataataatacgttttacaatttgctatttattgccaaactgccccacagggaggttgtactaatttacatttctaccagttaaggcagcataagagtgagcttgagcttttggtcttaggatttttgtgcccaagtctttctaaaatttacattcctctgaaatttgtcatatggaacatttttttttaatattgaagagtgaggaatctgttataccttgacttttaaatacttgttacattgcctctctgttctctgataatccatgaagttgtaaatggttttgactgagtgagatacatgcaggagagtttcaggatagaccgggggttgtgtttctgtttcagattgtcatcttgaaacaaaaatggtggcaaataaaatgttttcaagtggatgtgtttagtcgtgatttttaatgggtttttgatcattgttcctagctgcataccggttttgtcctagacaggatatagctgaagacaaatactgactttttccttcatctaatacatttggcaattacgtcttgccttgtgaaagcattaccattgttatttaaattttgcattgctcttttaagataacgttcagcttgttgcctgtttatctcttccctcctgctgctcttgtgtgcgtcctcacggcacatggggcagtgccctacactcagtagtcacccagtacccattttgggatttttctccaattataaagttttagcattaggaggtctctgagagtcaacttttccccaattgtagacatgtttttgatcttacatacattttaatttatttttttcattcagtagtaaatggttgttgagtgcttttgatgtaccaggtgctgaggtgactgtgccgtgacagtgtccccatcctcgtgcaggtgatgaatgggtgtccatacagccttggaaatgcacaggcctggggcacaggcctttttcctctcctgttgttaccttttacatctgcatttgataaaaaccttctccagagaaaggcttagagttcacagaacctttatttcaatggaggtctgcagtgttcagcgttagagtgaagattttcatgaagcatggcctgacagagaagtgtttgaggaagagattaaatggaagcaaactctttccatctcttggggaaatgggagatgcgggtgtccactggagccagggcttctaaattttaaaatcacttcttcaccaggctgaagccggggtgcccccacggaaggtactgttgaattgcttcgaaggtttctcattgagagaagctctctgtttctcctagttgggactggcatgaataaaagcagaggccaggcgtggtggctcacatctgtaatcccagcactttgggaggcagaggtgggtgggtcagctgaggtctggtgttcaagaccagcctggccaacatggtgaaaccctgtctctaataaaaatacaaaaattagctgagttgtggtgatgcatgcctgtaatcccagctacttgggaggctgaggcaggagaattgcttgaacctaggaggtggaggttgcagtgagcggagatcgcaccactgcactccagcctgggtgacagagtaagactctgtctccaaaaaaaaaaaataaataaaagaaaataaaagaaaaaatgtaaaggcaggaatgtgtacaggacctcacgggatgtggggaaaccagcctggttgcagttgagggtatgagtgggaccctacttctctcccgctgatgaatgaaatgtataaaaccaccttcctcattatgtggtcctaaggctgaaatgaggccacgtacgtaaagtgtcagacacactttacatatgggggttagtaaatgttgccatgtcattaattattaatacattgaattacaaagttatttaatccagcctctccatccaatccatatgggaatctcatccgcagtattcctgacaaatttgatttgttaggaatctcttttaatctttcatatttgatcggcttttaatggtttaaggaagaacatttcaggagtaaaaatctgcttccctgcttaaagagcacatagttccttattttggctttgtgagctctgcagtgggacaactctttccctttcccacatattttgaataattctttaatatatattgacatagatattactatatattatatagattagctatatagacatataaaagatattttcactgtctcagcaaggggaatgcagcaggaaaacagggtgatagtggggagaaagtcagcaagaaaacgtgagcaaaggaatgtttgtatatcagtgctttgatatacatgttagtggttctcaaatttggctatatattataatgatctaaagagcttttcaaaaatacaaattcatggacccatctttggagattagatggtaggactgtggtaaaatctgaacatctttgtttgtttttatgagacaaggtcttactctgtcacccaggctggtgtgcagtggcatgatcgtggctcactgaagcctccatctctgggctcaagcaatcctcccacctcagcctccctaagtgttgggattacaggcatgagccaccccacctggcctttattttattttattttttaaaagagatgtggccttgccctgtcacccaggctggacccatgctggagtgtagtggcctgatcatggttcactgcagcctcaaactcctgggcacaagtgatgcccccacctcagcctcctaagaacccaggattataggtgtgtgccactgcttctggctgggcatctttttttaaaagtcctaatgtacagctgcaattgtgaaacattcattacctgttttcatatttagaatgagggtaatccttctagaggcacacaaagttagctgagtagcaaaaagctgggtctcaaaccaaggtcttctaatttcaaatatcatgttttatctactttaccatgaagctgaattgtgtgagcacaattatgaggtctcctttgcctcccaccctcgctgtattgtccattttccaaggtaaacacacccagttctttcagttctttttactctgtgatttcagtgccttctgctctcctagtaataatatatttaccagccagcatatatttatgatcagtatacatttgtgatgcattctatgggccaggtacagggctaggcattgggactccagagtgcctggaggagaagatcccccacgcttaaatatagtacatttgacatagtccttatccttagtgccctcaagacctttcccagcatatctggctcttcataacatggagagctagtggtccttcctggatctgcgtgtcctcagtctaacccctgcagatctcccttcatgtggggagggccttctagatggcacctgggctatgccgacttaaccctgcatttcaggctgatcccacacagcctccaaataggcactattgctctaaggtgtctgggagagaaaaggttggccccggttttggaaactttggggttttgcgtgtgtctaaaaagattatcttcagtagttttgctctcccagtgagaaaaggagaggctgatcatgtgctgccagacactgggcaaagggtgatgtttgtaatgaccatccagtgactcctgctgccgctgtccttcctgcctggatgtttttggagcttccgtctactcattcagcatccagggaggctgtgatgaagtaaggaccatctgttagggaccagatagcaaggacatttgcagcgcattgaaggttggcctggatgaccagcaagggtttttcctgccctgcatgcctggactcccacctccccacccctggttaggcttcctggttgtggggagtcatagccagtggagctctagtctgtaacaaacacaccatcggaacaacaaaccctcaggtctttcacattgattagataattaaaaaaaaaaaaaaacaattaaaatagctaagcaaaagggagaatttccggtctcatcctggagaaccagcattctggtgtgtgtccttccacactttgagcgcattcactctgcagttgtcacactggtgatgaacgtggacactgggagcaggcaggcctggctgccattcttgcccccatcacttcccaagtgtgtgaccttgggcaaattcatctgtaaaatggtgattcagtagaaagtatttgataggattgggagtcttaagggaaacagatgcatggaagtcctcagcagaggacctcacacacagtgaattctcaatccgatgtttatttaaatcatatgtgccttgttatttgtaaggatggaactccctgcaatgtcttgaggttgttagcgtgtgaccatgagtactagtacacagtgcccattcattggaaattctgtagccaccgaagaaaactcacctcaaagtgaagtgatgctcttttgatggtaaacaccattgttttgctgcacagtaattaggcatgaatggcaaacagttcacatcagtgattgtaattaattagtataaacattttttttttccagccaaatctcagtccgccttctttctcttatcatgtggttgtctggtgttggtaatcagtgtccacactgcccctggggcaagttccttgaaggcaggaatggcagtttcttctttgtaccccctgccccactcctggtctggcaaatgggggctcaggaagtgctggtgctgcaggacagctgttccttcattcactcaaaagttctcgttaatatgcatgcctctaaagcaatggccttattttcattggatttatttttcttgttcttgctcttcacctctcattttcccatatgagagactccggggctgcactcaacagattctgtctgtctgtcttcttctcaaggctggagatctctaagcacccacttttccctggcccatgtgctggtggccctgagtttctagacttagcttgccctctgacccaaggatggtggcccaagttggcagaggtggtgggaggaagcaaggctgtggtggtggttgggtggaggaatcagagcatagggggtcctctgaccatgaagatgaaggagttttcactgtttatagaatctgcattggctgtcctgcccgcctcttcttcctgaatttggcactggttatgattttaggagcacggagaagactcctccaagaattagaaacaaacaaattccatttcctctctctttggctgtaaagcctttaactgaggaccacgtgttttattccacaattgggtgaaatgccctcagttgctgaaacccattccatgtcagatggtatctcctgcccattcattgtgaccctcccgttttgaagaatttatccctccaggcccagtttttctgtaactggcacagattcacaggtgggagcccaggcaggctgcactctaggcatcggccctctctcctcccctgatgctcagagccaggctcctcctgagcacaaaaatcagagccctgtggttcagaacggccaccatgtaggatgtgggtggcaccagctccttgggcccgaactggcagcacagccagggaatgtccttagatgttaaatgggtcgcaggtgaaatgagctgtttgtgtccttgcattgtgagtgtccatgctttcctttgaatttacagggagaggcaggtggtaggtttgggggtcccaaggccagctgtgttgtagcatggtcggtgcggcatgtcttttatataacctgcatgtgggttactggaggccagaggcacctgtggtcttggaatgaggatctctttgacgtgagaagacagatgtcaaaacaacttcctgccacccctggagctgtttgtccaagatcagccattgcatcttcctgtctggcagattgcattcctccccttacctgtttgccttctggaagacttgattgtggtggcaagaagataggccccatcagggtgggcctcattccagctttgcagcaaacaagctctgatttgttggggaggctgggagggaccccacttcactctctgcccccagtgtccacctgcacttgggcaagtcagccagttggttctgtagacagaacacccccttgcagcacagactccaccgggcatttggcggcggtgtggaatatgaagagaaggcttcccccagtctgtaggtacaacttgctctgtccctttgcagcacaaatgtgttcccagtaatctgtgcctctctcccctcaacacgttcagcctttaattgtaactattaatcacgccgagttgtgtcgcacttcataacccttccattaaatattaagcttgaaaaaaattgagctgtcttaattgaattattgaattaccaggcacttaatgtggctctggtggatgagaatcacggaatttcggctttggaagggattttagtttccttgtctgtgacgtagagggtgtgtgaggccccgaggagccaggagacttgctcagggtcggtggcccagaagaaactggagctggtgtccctctttccgtgccttgtcccactgcctccttatggaggaggctgtattcctgggctcatagccattctcaggtttctgcggtgtgcatttctctagtggttcccagcattggggttgggtttttaggtggacgcagtcacatgtgggcatttgaagggctgccctctctggaatcaggcagtctgtccttgggatgagatgctagctggccctttggcttcttccttagagatgtttatgctcatggcctcggccactctccctcttcctccaggtttccgccggcagcccaggcctctccctgtctgactcccccactccctttctgctgggcatttccatttgaatgttccaggctcatctcaccttcgccctcctcacactgacctcactgactccagtctggtctcctgccctgagtccctgtctaggagaagaatggcgtttctgacagctcttcctgactcactcgttgagaccgatgcttatctgctaagcgattcctgtgttcactccttctctcttctgtctgctgtccccatcacaagcaagactgaaccccttctgcttcctgatgtgattccttgtcacggtccctcttgctccaacctgtgttgccctttgctaccagacgcgacttcctgaaatcctgttttcagcagacgatcctctgttcccaacttgcagtggctccctacttcctgccacagtgaatctacagtcctctcaactcagttcacgtccgtgggcccttccagagtgacaggcaccatgatcagtgctgccacctccctttcgagaaaggatttgagacctgtgtggaacaactcggaaagggaggctcagacactgcaggcggcttctctaaggtgacacgccaagttgttgggtgtactgggttgaatggtgttctctcccaaattcgtgttcacctggaacctcagaatgtgaccttatttgtaaatagggtctttgcagatataattaggtaacatgctgttgggaggagggtgctaatgcagtgactggtatccttataagaagatctgaagtcgaacccaggacacacatggggagaagaccccgtgaacatagagacagggatcagagtgatgcatccacaagccatgggacaccaaggattgctaggagcccccagaaggcaggagcaaggcatgggacagactctccccagagctttagaaggacagcttctagaactgcgagacgtaaattcctggtggtttaagccacctggttgcaggactttgttacagcagccctagaaaaccaagacaatagggaagctgtgttttgaagccacgaattctgagtgcaggaatgttctcactgtacacagctgccacccatgcctggcctcccagacttccctaatgcggaccctcgctttgttaatgggtgattgcccgctgtcttcagagttgatcagccccagagatgctccccttccttaagcgccgctcatgcggattgtggttgtactgttgcgtgttcctctggccccctccttctctgttcctaaccagtgttttttgtatgatgtgaatattttaaattttaatttaatttttggtggggaaatacaatgtgatgtttaaatttttaaaaatgttatttttaattgatgaatagtaatggtttatatttatggggtacaatgtgatgtttgtttcgatacatgtatacattgtggagtgattaaggcacgtgagttaatacatccatcacttcacatacttatcatttctttgtagtaagaacattttaacgatttatttttttctggagacggagtcttgctctgtcgcccaggctggagtgcagtggtgtgatcttggctcactgtaacctccgcctcctgggtccaagcaattcttctgcctcagcctcacaagtagctggcactacaggcacctgccaccacacccagctaattttttgtattttggtagagacagggtttcaccgtgttgcctaggctgatctcgaactcctgaactcaggcaatctgcccgcctcggcctcccaaagtgccaggattacaggcatgagccaccgtacctggcccattttaacaattttgaaatatacattaccttatgattaactatagccactatgctgttctgtagatcactggaacttactactcctgtctaactgaaactttgtccagcatctccctttgaccagcaaaccctttgaccaacatctccctccttccccatgcacccccatcctctggtaacccccattctattaatactctctgtttctatgagttagactttttaagattccacatgtaagtgagatcatgtaatatttgtctttctgtacctgccttatttcacttaggataatgtcctctaggttcatccatgttgtttcaaaggatgtaatttcattgttttaagtctgagtagtgcatatatatatatacaccacattttttttttatccatttacccatcgatgggcacttaatttgtttccatgtcttggctattgtgaacagtgctgcagtgaacataaggccagccaattttgattgagtgtcttcaacatgtcaggtgctgtgttaggcactgggggatataagatggacaagactctcactttcatgaaacatacatttcagtggagggttgaggggaaaacactcagatggcaagcaaataacaaacatagcagagagttctctttgctatgaagaaaatttccactaatgtaagagagactgcttggggctactttcttttttattattttattatttttgttttttgttgatcttcccttgagttgcaacttggggctacttttgatgggggtggtaaggcaagtctctctcagaagctggttttgaagctaagccctgaatgaaggaagaggccagctgtgtgcagatatgggaggtagtcattcccgagagggagcaggcagtgcaaaggccctgtgacgggacagaatttggtagttcaagactcagaaggaagacaggtgtgatggcacctggtgtgttggggaagaggcagatgggccacgcagagccttgtgaaccaggggaagaagtttgaattttcttccaagtgccgtggaaagcctttggaaggttttaagcagacaagtgacaagatcagtgtttttaaaggtcactcagatttttctgtagagactggatagtggggagctaggagcaccaaaggtgatctggctttaatgcccagctcaattcttctgtcgtacacctctaatccactgtcttcctcccctgagctactcgtgcacttaaagtcaatacagcatgctcaccacttaattagaaaatcgtttctgcacactaaagagacctccccagccagggagggcctcagggctatgctgtctcacgtaagtctcctttggaatgcccctcggtccttggggatggattcattgcccttccaatgggactgagtgatggattcatgttttatgtgaaattgtcggaggggtagggggtaagcccatccctcctagaaaaaattttatccatccaggaactgccacactcttaataggagacttgggggatttgctctactatacacatgggaaactgaagctctgagaggttgtggggccttgaataagggtcagagcccaggtctgctggaccacaaaacccaaaacttccatgctggaggtggagggttagctcttggaatgaatgcatgcctgaaaaatctataactgagtgatgaagcaattaaaagcagaaggttcctaatggattgtggaagcgggtatcactgtatagtgtagtggttccgagctttggaatgagatgaacctggggatgaatacaggcgtggccgtgggcaagcgacttgacctcactgagtctctcaatatgttgatctgtaagatgggaagaataagaaagtaactacctcacatgggggcagtgagggttaaatgagaaaattcacaaaaggggcttagtagagcctgtggcacagaatatgcactcagtaaatatcttctattgaaaatagactgggactgggaacagattatggaaggaggaatgtgtgttcacaaatgtgtgggaaaaccttttgtacttgtgttctggctattgggttctccaaaaagtatggactaaagaaaactgatgctctgctgggtggatgtggggagagagatccagcgtgggccttgctttgctaagctgagtgttagaaggcatgggaaatgaaagttgagaggttcaagagcctggggcagaggagcccctgggtctgggcagcccatgctcgccgaggaggcaggggggtgagagcaggcagaattggagacttgggtggaagtgaaagatgccgcttgctgtgggcattccaatgaaaccactcccttgaatatgacagcggttaatcattaatatcataaaagttttagaattggagggactgaggagagcatctagttctgcccaaggtcagacagggttattctgcaagcagagatgagtactgacagtactctggttttagagaaaacattttccccacccttcctgtcccttctcctgggttgactccagcaactcacctctcccagctgagaagtacttgacattggattcaaggacatcagagacacttacagcctggagcctggtgtgtgcattgttgatgaatccccaaggttgagccgagacttggatggtaggtcaagtgtctgttgaatatcagcagaaatattttccatcttcctgatgaggagggaatttcaggaagaacatttttggtgtctcatttcttgggattgcctttatcaatcgtgatgcatatttttgggcagtaaccttacttttggatttattttattccccatcctaactcatttcttcgtctatttttatcgtgttgtagctatttttgtaagacacctccaatccctttggaacaaaatgaagtggaaataaagaaatgaagtctcttggcttttgctcccagatcatcagaaagatgactcaatgagccagagctctttgatgccaataatgaacttgggtcaggtcagaactcgaattccaattgaaggagggacttgacagtgggactgtcattcctggggatgatggttggcaataggatggattgggggttgaattattggggacatgcctggagggactggggagaggagggaaagaatgttttcagcgggttgccaggtagaattccaatgttcactgcaatgaacttttcttcaaacttttgtccttggctctcttttcttccgtatgggacagggatgcatttttggtggcttgttaacaagacaaaaataaggagagggatgagaaaaggtaaacagagaaccctacaagttcatgtattctatgccctgcattctgtgtggaccaaacaattcccaaagaggcctaacccaaaataagttagtatcctgcttctagtagcctgtgataaagtgcatcttttttctacttaacttaatcaataaatatgaagtgcttaataccatggagaagaaggcaacaatggtctcaccttcatggggcctaatgtggtgtgactgaccaacattagagacgcacgcagaaagccgtgcacatgcacccgtgtaattacaaagtgccacaggtgctgtgaaaagaaagcacagtgtgtcctacaagagagaaggggaccttatttggattgggtggttatggagggccccttctgaacatgtttggccttctttgcagcagcctccacctcccagcgcctgggagacagtgcaccagtagaggtggggtggggcaggtggtttagcccgagctggggtgcctggctggggacgtgcccagaggagtagggtgtgcggaaggcaggatggggtccccacagcaagctttcctctccctgactgggccacctgttgcaaacagtcaggccccgaggaatagcctccccccagggggagttcagtaacgggtaccatttctcagaaggggctggccgcagagataagaccacagtgccaagggggccataaattgttacctgtgcccttcagttaccccttcttcctccatcccctccttcctgagccagtggggttagatttagcagcagggcttctgttcatgagatggagcagaaagcagactttctggaggctgggcatgatcactgagatgcagagcactgatagggaaaatcaatttaatttctgtggctccgtgacaaggaggggtggcaagcaggaaggtcaggcctgttttgaaagccacagttcagttaagaaaataaaacactccctctaaggaatttttaaaaatacagtattttaggagggggaaaatggaagtgggtcaagatgagggatttagtcggaggagcagagcagacccatggcaatcccagtctgaccggagcctagggcctgagggttgcaggtctcccataggaattttttttttttttgagactgcgtttgtttcattcttgttgcccaggctggagtgcaatggcgcaggttgctcactgcaacccccgcctcctggattcaagcaattgtcctgcctcagcctcccaagtagctaggattacaggcacctgccaccacgcccggctatttgttttgcatttttagtagaaatggagtttcaccatgttggccaggctggtctcaaactcctgacctcaggtgatccgcagaggcataagccaccatgcccggcctaggaattttgttgtatgtctgttgagttgagttgctcaggacttgttgcagtaggggacactttcattaggtttctgtttcccgaggcatgatttaaggcacatttctccgtccctctggttgatgctggggaaggcttggcttctggcagtttttgattgctcagatcaagcctatgtgattcatgggattttacaggttggaggctgagaggtatttgtaggtctggatgaggatttgcactcaacctggttgtggcatgtcgtagtcaaactatggcctcacctgatttagaggacgaggaggactctgcagaaagcacttccttggctgttggtagagattagatatttgcgggcagagagttgggtcaacccaagccttcatcaacatcccacagggacctcccttgaggtgactttcattcattagatggaggatggcattgcaggtcctgtgccaggcactggggagataggctttgtctttttttttttttttttggtggcatctctcgctctgtcgctcaggctggagtgcagtggcacgatcttggctcactgcaacctctgcctcccgggttcaagtgattctcctgcctcagcctcctgagtagctgggattacaggcgtgcgccaccttgcccaactaattttttgtatttttagtagagaaggagctcacagcatagtagaaggctcagactttggactatttcctaagaatctgataagtgaatacatttccaggattcttagcggatggcccgaagtcttgggatagtgtgtgagggccagaggggaaaattgaaacaatgaagagaattgagaaattcctcattggaaacttctgtctgtgatgcttggggtgggataagagggggggtctgttctagctaagattcaataccaatggttatctctttgattatagcttagggtgaggctgagtgatctatctccactgtttggtctccccagagttagctgtttatttcaaaccaccagtcacttgtggtgttttgacctagaagccatgcaaggcagtttgaactgtgcttgaaagggtggggaggcagggcttgttctgaactgtgagctgaggaggcagcgatgggtgccctgtgctctaatagaggtctgagaagtgaactgggtggccagctgggtctgcctgctgagagcttgctggggcacaggaagccgtgcccctcattccctttgaaatagctttgtgtttgtcattcttgtgacttggatacccttttggaccccgtatctgtgggcttagcatcagtcagatgctgtttatcagacagtcttacctggggtttgttatccgtgtgtgtgtgtgtgtgtgtgtgtgtgtgtgtgtgtgtgtgtgtgtgtgtgtgtagcgtggctgggtcagactggattccttgttgagcatctagctaaaagaggttaagaggaggctcatatactgctgaaggccagagggctttgctgaacgctggtcatcttaaaaacgagctgggctatttataatttggcaggctgccatgggacttgaatgaatggcagtctgtgcaggctcacatactctgtgtactgagtctgagcgtgggtttgttcatttatgtgcccctgtgcatgggtgtggatgtgatttcctggcgtgcagggtaaggactgaggaggtggggaagcaggttttgccctggtcctctggtccgccaagaggccacaggtacccttatttatgcctgggatgttggtgtttctggtattttaagccacagaaacgtttgagggagtagacctggactatctctttttactcctgaggaaactaggccagaggggttcccttgggctcagaggaggcctcgggtcaggggccatcccgggtgggagctgtagctctggccagcttgctcctgtcaacactgccccctgccgctctcccagggctgcagggacctggtcgtgctggagacggatgttttcaggcagcgctttgtaggaggcagtgacgctggtaacccactaatgtgaggatgaagtctttgtattctgtttccattgacggggacgggtttgcagaaccacccacacccttgcctgggcctggtgactcatgaggacaagatggctgaccaaggagagggagaggttccactccctccaaggcccagggctgactctttttcatgcatttggtgctaaattgctgccctgaggctcttgaatagcttgtatgaactctggtccacccctcttgcctctcctaaatcccttgggaggtgtccccatgccctacacactgcctgctctgtcacctcaccaccctgcaaccagctgggctggctggttttcactgctgggaggtagattttttttcaagaagtatgaaagtatcattggcatatagacagacctctgcactcagctggaactgggttttgaatcgcagcttcaggactcaataatgttgtaaatctctgaacttcttggagactttgttttaggaagacaggaccctataagacaaagtccctctgtgaggtccagcacagaaggcatctctcaccagggtccctttcttttcccttttctctcagcctgattctgtgctttctttcttccttttcgttgttatttaaacttatgcatgtaatttcagcctcataagggacattatgtagattaattgccatatgggaagtacttaaagcatgttgcctggcacacagtaggtgtgtagcaatagtagtcattgttttaggcaaagatgatgcctgcaggggtttctttcattattatttcactatttatttcataattgtagcttcatggggaggacagaagggtgaagggatctcagggaggcattcttcccttcaccctggagacctcccttgcttggctgtacatttaaactggcctccgcgtgggttcatggtcctgtacatcaacacagctgattttttttttttttgagacagagtcttgctctgtctccaggctggagtgcagtggtgcgatctcggctcactgggtcctccacctcccgggttcaagcgattctcctgcctcagcctcccaagtagctgggactacaggcgcgtgccaccacgcccggctaatttttgtatttttagttgagacggggtttcaccgtgttggccaggatggtctctatctcttgaccttgtgatctgcccgcctcagcctcccaaagtgctgggattacaggcgtgagccactgcgcctggccaacacagctgatttttataaaccttctagagacatttgccttcttggtttttaagcataaacaacctcacttttgtaaaggggagttgctgtaagattcagaacttggagaggtttttgtgtgggcgtttatttttcttaaacagcacgaggtttgtgggattctatagggttttgtacagcctgaccagcagttagccatctcccctccccttctcccggaagaaatgggtgttttgttctccactggcctctcctcgtgtgtttcttcttctgggaaaaaacccacaaccccaggttctgttgcccaagatgagactggatgaaaatcaagaggggttgctgacgagaccctggaatgcccagagaacagaggggtgggagcgagggaggcggtgctggcctggggccatcttactcttcctttcttcctgacaggtgtgtagaatggcatctcctgccggcacgctgggggcctgggatacctctggcagacagtgctggaaatttaatgctccttgaaacaggagagcctgagaatgcttacaaaaatcatccttattaaagtttgaagggatgaagaaaagcgctaatgggagagaccctatacttacaaacccaccttgaaggggttaggggttacttcccacctgccagcaccttccctgctctgaggaaacaggaaacctgatggctgggggcttcagggctctggggacagctaccgtttgcggcctgtctgcctggctgatgtctgtgcctgtctgcagctgaaggcccacttaggacaacaaaatccagccaagccggctggctggggctgagtggggccttttggcttcaggtgactttgtggcttcggccttgggtaaagggagtggggggccatgtgtggagccctctggaaggtctggactcctgcttttccttggctcttctcgttctccaaccacccccaaggttcagcagagtcttgggcgcgtctcctccgtttgtgccgcgtgtttgtggcagcagctgttggtgctgactaataggacttcctggcagctgtgccgggcacacgtggcaccggcaggaactgcctctcctcggctgcccaatctgtaccccaaccaccaaagaaaggcctggaaaaggggctgagagaggctgcttgagtgggaaagccctagaacttggtgactcacagatccatagaacacggttggaagaaccaactcccatctgcagaggggagcactgggtgcctaggaggggtctctcaggtcgaagagcaagttaggggctgagctgacacgtaaaaccccatctcctccctgccccctgaatgtgtttgctctgcccgtgtgagacaggcttgtcagggggtcagcctgaaccgtgtcactcactagctgtgtccttgggcaaagcttttcacctctctgtacctcagttcctccagagacaaaaggggatcatcattgtccctaccttaggggcttttgaggacagggtgagcacccagggcaacgtgcctgggacagtaaacctcagcagatgccactttgctttcttccttaccaaaaactgggcagatgcctctctcctcctgagtccagtggtgtctgtgtcagatgccctaacggattctcaggaattgcagctgacatccggtcatcatctttggtttggggtggatgggggcagagccagggaagaagacaagaaacgggagaacctaagtgcttgctgacttctgccccattcccctcaccccaaacccttttttagaaaggactcgagaggccttttagggtcaagattaccaaggcctgagtgaccctgcagaattcctgcacatggctaggcatcctttgtctgataatgacagccactgctcacacagcgtctacagtgcaccgtcagcagccttaggaggcagattctattatctgctctagtttacaggcaagaacacagcacgggccaggcacagtagctcacgcctataatcccagcactttgggaggccgaggcaggtggatcatgaggtcaggagttcgagagcagcctgaccaacatggtgaaacccccgtctgtactaaaaatacaaaaattagtcgggcgtggcggcgggcacctgtaatcccagcaactcgggaggctgaggcagaattgcttgaacccgggagacagatgttgcagtgagctgagatcgtgccactgcactccagactgggtgacagagcaagactccgtctcaaaagaaaaaaaaaaaagaacacagcacggagaagatgcccagagcccttcactgtgggcccatgagatgacacagatctttccactaggccatcctgttttgttgctggagaactttgtccctggaagggcagaaatgattattctggttgcccaaggcctggtggcccaggtaggagaaggaaccttccaaggcacatccagaggaaagcccggggttggcggggggtggggaggtgtccgctctgtggctataattaagcctctctgcctgctcttccttttcaaccaccagcttttcaggggtttagataacatggctttgtgctgatggccctttcagcactcaaacaggaggacccatctcagctcctggcattcacggggcatagttccccttttctcctcacaatgctgaatttttaaaaagtggagtgttagcataggaagagtagctgatatctgggcgtttttcatagaaattccatgatggatgttttccccaggatgcactgccagtgtcccaaagagagacttatcagttaaacctgcctggctccagaggagtcgccgcagacttcctggtaaatacccccgagccaggaatgcgtttgtgaaatttttaggagatgatcccagaaaagcttccttcggtcaccaagccgcgtgtttgtgtctggagatgaagtgtgtgaaggaagatgtttgctcctgaaatgagacattttgtacatacaagccttttatgtgacattgaagtcagatgctgagctgtccgatgctggggtttgaaggtgaaagttgactttacctcctgtagtgacaaagttctgtgtcagcctgaatttcaatttcctgggacttttgtctgtctacagctcaacatggtatcctcagcacctttggggtcttttgttgtgttgtttgtttttttggtggttaggggagggatgggttagtgacagggcggtgggggggggtgcatttaatcatttattctttttagtaggtttaattgtataaagattataatgcatacaaacgtctgtaattaggggagttggttctattagacaatgttttagtgaggaaaattacagtgtttataagccgtttaaggagggggcagcatatattaacatgcaactagtttttgtgaattcataccgagtacttaccagtgttccccggaggtgtctccccgaattccaaagtgtgccccgttctatgtgcttcctgggcttccttcagcagaaccaggccatttttcagaatatggaacgctattctaggggcttaggagagcaaaccttgttctgtgacggaatgagtttcgttgattcacgagacaaatgtttaggaatgccctgtctctgccaggcactgttccgggtattggggatacagaggtgagtaagacggcaagctctttgctctcatgaagtttgtaatctaatggggagtcagactggaaatgagaagacaaatacacgaacacactccttactgataccgatcggtgcagaggaaatggaagaaagtgttaggctgcagagggactggggagtggggtggggtgtgtgtgagggtgtcgatttaggcatagccttcagagaggcatctctggggcaagtgatcatccaaggacagggagaacgcacagcccatgcagttgccaaggcaagaaggagctttgtgacttcagggaacagaaggaaggagggggagctggcgacagtgagcaaatgaggggagatgaggttagcgaggtggcaggaccagatcatggggctctgccaggggatggtcggaaggaagaattcgcagtgccctaagaagctaaaagtgaaggacctactgcaagcaaaacagtgggatgttctgtccctgcacagctggccccctttggggctctctgccacttggtctcaatgttaaaggtgccaagcacgtagaatagggcctttccctgtttaggcacccacagaagtgcttgactgtcgataccttgagggacaccagttggagaaaaggtcaagcatccgttcaactctgggaatgttcttaacagtgccactaagctgtcaaagagatgcactcacatgctgtaggaacatcattgactctgaatggctccatctgggaataaaaagcaggggctctgaaggatgagtgggagtttgatagaatggatgaaaatgagaagaactttgcagcagaaggaacccacacggacaaaaggcacagtgtgttagacgaacaccaaatcatctggtgtggcaagaaatgaaccttttgggaagaaaagctggggtcaggttggggcacgccttgaagctttggactttattgtgtagctacactcacatatgctttgatgcaaggttgctatgtaaaagttgcctccaaaaatccatgcgctgcaaagagattgaccgtcacccttaacaacaaagctgaagcatctcagctgccacagtacaagtttagaaaattgtttaaagtatcatttatttatgtatttagagatagggtctctctgtatcacccaggctggagtgcagtgacgcgatcataactcactgcagcctcaactcctgggctcaagtgatcctcccacctcagcctcccaagtagctagggctataggtgtgtgctgccatgctcagctggtttgttttgtttcgttatttatttattttttgtaggtatgatacctccctatgttgcctgggctggtcttgaactcctggtctcaagaaatcctcctgcctcagcctcccgagtaactgggtttacaggcgcaagccactgtgcccagcttaagttttacattttaaatcacgcttctctggaagggcggcccctggataggggggaccagttgtggaggacctgttccatgttttatctgagtcctgatcctcctgtcacatgagtacggcccagctgacacagctgtgcagtcaagccctgggttggatgataagtatgtggagtggcatgggtggggggggtgtctcaggttttatagccaaactcccagaagccccttttccctctttgacaactggaagtccagatgatccaaccctcagaggatggatcatcccctgaggagtgcacgacccagtgcctgcgttctatgccattgtcactctggaaccacctgcttggcttctggaatgacacgtttgatcatcgctgtcttcctcttatctttccccagcccccactgacactgacaatttacttctgtctttggggctatgaaccatgacaggggtggagaaggagtggggatagagatgagaccaagatacttcttgatatctgtggaagcctcagataccaagaagcccttcatctgaaatatcactgacgtgtctctcctagttggtttggagcaagttgtgagcactgaggactatcagtttaggtttgagctgaaggagtggagatacatttacaagttactgaacgggaggcaggcaggcatctgtgtgccgcttccacactgggcagctgcagggctctctggtgggcatcctccttctagccttgctgaaagatgatttgctggcatgaaataaagacgtccctaattgtttggggtgtgggaaagcaatcccatgagcattaatttgcccaagcccagagtgtgtgagaaagtgcctgcctgacatgtttttcttttccattaacacttctgtgataaacagcttagatgctcagagaaaaattaatgaaactattgtaacaatcatgcacatgtaggtaatttattaaggacaattaaaaagctttaaaaatcatccgtgaggcaaaatgaacaggaagatggtgtgtggcgggttttggcagggagcctgcccgtgggtgtacggaacaggtttctcttcccatcgccctcacccccatcagagcaacacagcagtggaaagcgtggattcctgctgtccaggctgttagtaacaaacattctatgctggttgcctgttgggtgaagccagggagatgtgtgactgtgtggtctggctgttctgctctaccttccttgggacccaggtatgctggttcctgggcctcccttccaggagcaggagcatgttgggtgacaacttggttattggacttttgttgtttgtgttggctctaggagcctcgaaaccaggtgaggggcagcaagggaagcctagagaggttaaggtggcactgtcatgacgacaccagccacttactagcttggaccttggcctctctgtgtaacgagcctgagcctcagcttcctcatctgcaaaatggggagaatcgttaggaaggagtggaggattggagcgaggatcacacaagatcatgcatgctgagggcctagcgtgatgcctggcaggtatgtagtaaatgttcaaatgtttaatattctttgttatcatgagcggcatcatgattgtgttgttggctgaaagccaagctagggttgacacccacatatcaaactccaaggccagtgcacttttcatgatgtgccagtacccacccactcacccttggatcctccctccaccgccactgttttacaggaatgccaatactgtgtcctgtgtgaatgctaggatgtactcactgagcctccttgaggcttgggtgaggcccctctttggaaggatggagctgcctagcttcctcctggtctcatctctatccccactccttctccaaccctgtcatggttcatagccccaaagtgacagatcttccacactctggaatttttttcacacgtgtggaggactgggattgctagaatttgtttctttttattggttggtgacccaagaaatctttgaccttgtggaccagtggtttctcaaatgcagatatatttaataaagtcagggtctgttagcggatggtattggtccctctctgggtatttatctttattttattgtttttccccaaggcttgatcgtagacacataggttatgtgtccattatagacatatgcatctattttcaagaagtaaattttagttcacttactgactagaaaggaaaagaaagtgttttagagtagacacgtcagacacgacagatttttttccctttccgtgctataaatgagcagtgaaaaatgacttttgctattaaaagctgtagcaccagccaggcgcagtggttcgtgcctgtaatcccagcactttgtgaggcccaggcaggcagatcatgaggtcaggagatcaagaccattctggccaacacggtgaaaccccgtctctactaaaagtacaaaaattagctgggtgtggtggcacgtgcctgtaatcccagctactcgggaggctgaggcaggagaatcgcctgaaccaggaagtcggaggttgcagtgagcctagataacaccactgcactctagcctggcaacagagtgagactccatctcaaaaaacaaacaaacaaacaaacaaacaaaaaactgtagcacctgtaaaaaatagtaaattataggacattatcaaagtttataggcactagaatttgaccttcagtaaattcaacattggagggtaacagggttttctttcctttcttcaaaatgaaaaatgagagggaggaaaaagatttatttccttctggggctggagtaacaactggaaatggtattccccagcttaaagaaagaaagaaagaaagaaagaaagaaagaaagaaagaaagaaagaaagaaagaaagaaagaaaacctttgttaaattacataaagtaatataagaagtcactttccttagaaaaaaatttaaacctcatagaaaaggcaaaagttgtgcggtggctcatgcctgcccagcactttgggaggccacagcgggctgatcacttgaggccaggagtttgagaccagcctggctaacatggtgaaaccctgtaaaaatataaaaattatccaggcgtggtggtgcatgcctgttatcccaattactcgggaggctgaggcaggaaaattcgcttgaactcgggaggtagaggctacagtgagccaagatcacaccactgcactccagcctgggtgacagagcaagactgcatctcaaaaaaaaaaaaaaaaaaaaaaaaaaaggtgagtaaaggcaaaagtccccttgtacaattccgtcccccctccccccacctgctggccaccacccttgatcttattttcatatgtataacagagctttttctgtgcatttatacactcttctgtatactcagagaaaataatatagtcttgttttctcaggctgtccaccctcctcccaaaactttttgccttttcctccatcctttcctgagacttagctggaggaagaggggaagtttgatggacaagttttttttaacatggggttggatggtccagtgggtggtagtggtgtttccaccttcttctctaggttctccttgggctttgtgaagcttcctcgattgctcataatccaggttaagattgagtagatggatagttggagggtacaggtaagtatccagaggagcaaagtgttgggggttgagtaccagatactgtggctgacttgagcttcccgtgcctttagctggaccctgacacctctctgaactaggaatgtagaatgaactctctgcgagacatctgtgcccattgccggattttgagcatgtgaattgtgtgacgatgtgggtgcgtgcatgtgtgtgggtgcacatttaaggaggatttctcggagaagccaccccctcctttgtcctgaaatgcacaatagagatccttcgctaaataagtcagcagatgttaagtgatggtgttggaggaaggcaccttcaaagaactggttgttgtttcagaagcaacatgctgatcagcccatcgtgggctcccagctgtcctgtgacatttctgcagcttcaggtgccagcctgggcatggcatctctgaacagtgagactctccatcctttttctgagagcagaggcctcgtagctgttgctggatcttcacagaaaatgggtccctaatctcattctcacctgcttctacttctgctctgaggccagctgagaaaattgctccagtgctttgctgctgtctgagatttaaggtgggaagttggagctgcagattttgagaaagccacactgcgattcaggaatagtagcgagaccggcacagctgccctgaccagccttcctcctcacatccttgtgaagctgtagtctttaaaactcttcacaactgctgcccagtagaggcagtttggtcttttcagaaagagggaagggacagggtacaatctgtcaccctcatcagctggctagccggttccaaaatgaagccttggggaagaggagtatcagggcgtgaggaagttgtgcagacaggaagccgtgacccctccaagctttgctgaccgttctcaggggggatgtcctcttctctttctttagtgaggagtagctctcccatgtcctcaaatccagctttcccagtgtgggcacctgtgaccacaccctcatccctcaggctccagtgagaagacatggtaagggttaaccagtttggccggcttccctagacgggaaatggaggttcacccagctggtgtctgggaggcaggttctagtcttctttccggtggctctctgggcaatgcatcttgcagccctcttctcttctccaccaggagagcagggagcctcctccagagggggagcaggtgacccgcagtcagccagaagtggccacaggaacccctgtccatcctcacagaggggaagcaacttccccaggccaccttgcctgcaagcatgccagtggcagagccaggactagaagtcaggccttttgcctgctggttggtgtgccccatgccaggccagaggcctgttagtgggtcctggactcgtgaggggcagccgaactgttgcagcagtcttaacaatccatctgcttgcttccactctgtacattaggatcattaaatgtggactgtattttctggacttacaaacaaaagtgggagggaagaccttgtacttgaaaagattgctctctaagatggttcggatttgaagagagaaggcctgaattctctcatttttgcagttataataataaatacttttctttaatacctagaacatgccaggagctgagcaaagtgtattttgtacttcatcttacgtgttcctcttaccagcccatgagggtggttctgtcatcaccctcgtcttacaggtgaggacttggagaggttcaggttctgccttcagtgccacagctgagaggtggggaactgggatttggatgcaggctctaacctcagactggggaaggattctgcatggtagatagggaacagaactgccaggccagtgctggctgagggcttgtttctggttgagggactttttttttttttttttttttaagatggagtcttgctttgtcacccagatgagtacagtggtgcagtcttggctcactgcaacctccacctcctgggttcaagtgattctgccgcagcctcccgagtaactgggattatgggtgtgcaccaccacacctggctaatttttgtatttttagtggagacggggtttcattaggttggtcaggctgatctcaaactcctgacctcaagcaatctgcccacctcagcctcccaaagtgctaggactacaggcatgagccaccaagcctggcctgaggggcttcttgcttttgcttgtggtcacttccctgcaatgctgctgtcttgattttcagggcatcttgtgacagtgactgaggcttgctctcccttctcttgctgcccaggtgatgagcactacaggccttataacctgatgatttggggttgagccatatccctagaacttcctatgtggtgagaagtcaacagtatcacggaacacttggttttgtgtctcatttcagcctagtagagggacaaagcaagaagtttaatgccaacatcagaagagccacttgagcagacacaagcatttgcctgtgtacagcatataccttgtgccgggcacgcttttctattacttcatttaacctatctatgcctagtgttccattatcggaacgccaagcttgtggggagttatttatatcctactgctcaaggtcatcaccaaggtctgatttttcacaaaaatttgcaacctccggcataaatgggttaattctcaacaccatcctcaggataggtactgtcatcattcccactctacaggtgagggattgggctatagtaacttgtttgagatcaaaaagccaggaattggcagagccaggatccaaactgcctgaccccagagctcatacctttatctttctcatcaaaaaccactggttggatgagtacctctctgggaagaaagggctgcatgaccctgtgtgctattacccacctgttggccgccaaggctgatacctggcaggaagccctcattcacagggcagaaggctcagtgaaataaacaggcacccaagggctaagtggagaggactggctcgctccaggagctctgtgcagatcttgagcacattggctcagtatgttattgaaatgatggagctcggggcggagtgatgattaatagtgcctttggcagcccccaaaaccaccaggaactgtggatagtgagaggcccaccatccggtgtcaccacaatggtgctggtgtccaatgaacgtgtgcttccatatactgttctgaagggcagtagtgagtggttccagcccgcctcatcttccctgtagctgctgaaggtatgtctgtcctccttccttccttctttcctctctctctctttttctttttctctttctttttttttttttttttgagatggattctcgctctgtctccaagctggagtgcagtggcacgatcttggctcactgcaacctccaactccctggtccaggcgattctcctgcctcagcctcctaagtagctgggattacaggcacccgccaccacgcctggcaaattttttgtatttttagtagagatgggtttcactatgttggccagcatggtctcgatctcctgacctggtgatctacccacctcggcctcccaaagtgctgggattgcaggcgtgtgccatggcatgtgttttcaagatctcctttgacccaggtctgtggctttggtcctttgccatggactagagttcttcataggcaagtagtccatgtggcgcttgagctcttcactagattaaagccagtagaggtaacagcgcagcccctctggctagggaagaggggtgccgctagcatcattccatctggggcttcacctcatctttgcataccagccctgcctgctgctgctcctgtcgcaggcgtggaagacctggctggaaccctattcctgccatgaccttgaggctgttcagtaacctctgagagcctgattttcccacccaccttatgaagttcttacagagcgcctagctctcattcaggtgcgtgggagatgctcagtgacttcgagttccctcctcatgcctcttcatgtggctctggggcttgtattagagcttccctttcttttagagtacagccagctgtctattgcagcttgtatatgaaacggtctctctctgtggtaactttgcacaaaagatggttttgtggtcagcctctgaataatgcagtgaagcccctgccccccaactcacacacagggagctgtggtcacagtcggaccacttggcagccatcataagacttgaaatggggggtttgaagccattgcttgtgaattagcatgtttttctctcttttgcctttgtgaaaaccaacttcctgtgcagccgcttgtgttttaaaaccctgaaaaaggggggccagctctcagcccttgtccaccgctggttcctaggaccgttatgaattaaagattacagccgttaaaaagagatcgtctttaaacaagcgcagttctctctcctcatgccccctgagtggagaagtttttgtgtatagcgagtccaaaacaaacagagatgttcttgagagatgtggggagcaggggccgagacagcaggagagcgagggcagcagagggacagtgggggagagccggggaactgtagttttgaattgttggcctcctgtctgcatgctcagagaagcagggccgcgtggagtgcccagcggaacctgctcatgctgatttgctgcgtcaccttgggaaaacgttggctttgctcctccgcagcacgcacacaggcacaggcacacacacgttcccatcccagctggtgcccgcgtgtgggtgttaggcacagactctttggacaaagctctggagatgaattgggaaagaagtgtggtagaaacatcaccaggaagctttgtgttacgggccttgtcactgcatgtgaagatagaccagacgccccgcagagacagccctcttgaaactctcacctaaaggagatgctaccaaggtgagggacctccgggcagcagaacaagaacatcgaacaaccactacggtttaacaggagcaagaaacgatctttccgaactttcctctgtggatgcaaagatgttgaagagcagttcctgcctttggcagggaactcggggtgcacacggggagacagacaagaagggatgagtccagggcacttgtatgtctgtaccttctcttagcctcataacatctctatgagggagcgaagaacatcacagctttggccgggcgcagtggctcacgcctataatcccagcactttgggaggccaaggcgggtggatcacgagatcaggagttcaagaccagcctggccaagatggtgaaaccctgtctctactattagtggggcgtggtggcaggcacctgtaatcccagctactcaggaggcggaggcagagaattgcttgaacctgggaggcagaagttgcagtgagctgagatcgcaccactgcactccagcctgggcgacagagcgatcgagactccatctccaaaaaaaaaaaaggaacaccacaactgacttgccctgtgttggagatggctgtgcagatttagtcttgctcaagggctttaccaagggttgtgctcagggcacaactggggctaaattccaaggcctgctgcctttgggtccgtaaatcttcattgcagatgttgatgtagtttccaggactgcatcatcttggagtttattttaggcagatgattgccttctaggtcattctcaaccatttaagtatccttggcaggagaacttatctgaatgggccaaggctctttgagttgggagcaaggcgtattttcccacccaatctccatgcacccgggtcctgtggtttcattggcacttcatttggaaagttgttggcttttgggaggagaaaggaaggagaagtttggcagcatcctgttccaaggcctagagttttaatgtgtggtcagactgtttattgattaattggttttcaagagggaaacatgttctttcaggacatagggtctctaggacaaaaataactttaaaagaagaggtggagatgttagagaacactctaataactcctatcacttcacagctgggaaacctgaacccccaaaggggtaagagattttagaaagtttcaccaaattccccatttctctggacagaattggactctagatggaggactagacattttcccctagagccgtgtttccccagggcattgagaggtgttaggagatgcaagggctccatggccgtacatgtggcaactcctaaattaaacattccctaaatgcaggacttctcagagcatttactctgctaacaagtggtctgcttttctaagagctggttaaggtaggtaatgattccttatttggccaatgaacttattttaaggagactaaattatctttagtctttaaattattttaaaattatttttctcctagaagaccctatgtcttgaaaaatatgtttccctcttagaaaccaattaataaatattgggaagtcaggccaggcacgataattcatgactataatcccagcagctggggaggctgaggcaggaggatcacttgagtccaggagtttgagaccagcctgggcaacatagcaaaactctatctctacaaataaaataaaatcaaataaaataaaattaactaggcatggtactgtatgccggtagtcttagctactcaggtggctgaagtgggaggatcacttgagtccaggagttcaagaatgcagtgagttatgattgggctcctgcactccagcctaggagacaacgtgagacctcgtctttaaaagaagaaataaaataaaataaaataaaactaagaagtcagatgaattctgactcaataaattgaagtcagatagatatatttttatcaactgggcatatacatatataaaaatagatatcagataccatattgcatatatataagtacatattttaataaactatattagcctgacatatatataccttttttttttttttttttggagatggagtctcgctctgtcgcccaggctggagtgcagtggcgcgatcttggctcattgcaagctccgcctcccgggatcacgccattctcttgcctcagcctcccgagtagctgggactacgggcgcccaccaccacgcctggctaattttttgtatttttagtagagacggggtttcactgtgttagccaggatggtctcgatctcttgacctcgtgatccacccgccttggcctcccaaagtgctgggattataggcgtgagccaccgtgcccggccacatatttttaatatatgtgtgtgtatacatattttaatctctcaatggccatcagagatttaggtcacagtgttaccatgctttagtcagaaggaaagaactctgggtcactgtgcaatttctggttggcttttggaagctgacagcctcattgctgatatcttcttcaggagcacaaagtctctgactgggaactgctggctacatggatggagagcccctctccagctctaatactctctgtgttccatgcctctgggttatcagcaagaagcccagctgctcggcccataactcagatcagttagcatataaactccagaaaataattgccctcttaattgctactgataccatgtcttgaaccaggctttgttcaaggtgggatacaggtgggacacaggcttggttcacaggtgggagggtgccctgtgcaggccgtgggaggataatttgagaattcccttgcctgtccctgctccgcggttgctgggcacctggcgagagcgttgggttgtttgctttgggtaactatggcagatccttttaattgccaccaaataacttcagctcaacctcgtcagtggttgttttgctgcgtcgctcggaagaatgcctccctctttgtaagagctggatggatgggagcttggcagaggcaggccaatgctctttaatgttttccttcccatttaataagtgttgagtaaaacttgagtttagggtgtttatgtggcacaaaaggtaaaccatttgtggtgttttggaacctgggctaagtgtttctcacacacatcctcatgacatggtaatgactacctttgtgttaaacttgggtcactgtcaactttcttctgaagtgctccctgctttgttttgggggcaggggtgggaaaggaatgaggtgagagaaggtgaggtgaacatgggatgccgcacgggggcattgtcctcagtcggactttctagaaaaaggcatcacgcggcctggagacaggaagggagagattttaatcatctgctgtggcttttgctcttctgacatcagaatggtaggaggccctgaacttttgacctctggctccaggtccataaatgtcccgaggttcccaggaaaaggaagacttgttagatgggaaccctgatgtttgattagagcagcttttagtcactactgtcatgtgtttgtttattcaggcaccagttgcatctgagtagtggtaggtcctggagacaggaggcacagcctttactcatggcctcatggtaaggtagagtcatgcagaacatttaacgaaagtatggcttggccgggtgtggtggtgactcacgcctctaatcctagcactttaggaggctgaggcaggaggattgtttgagcccaggaattcaagaccagcctgggcaacatagcaagacttcatctctacaaaaaattaaaaaattagccgggcacggtggctcacacctgtaatctcagcactttggaaggctgaggcgggcagatcacctgaggtcaggagttcgagaccagcctggccgacattgtgaaaccccgtctctactaaaaatgtaaaaattagctgggcgtgatgacaggcacctgtaatctcagctactcgggaggctgagacaggagaattgcctgaacccggggggtggaggttgcagtgagccaagatcatgccactgcactccagcctgggcaacagaacggaactctgtctcaaataaataaataaataaataaataaataaataaataaataaataatcagttgggcgtggtgacacatgcctgtagtcccagctacttgggaagctgaggcaggaggatcacttgagcttgggaggatgaggctgcagtgagctgtggttgcaccattgcactccagcccgggtgacagagccaaaccctgtcttgggaaggaaagaaggcaggaagttagggagggaaagagaaaaaggaaaggaaaggaaaaagagagaaagagaagaaaagaaaaagatttgatgggcaaaatcctgtctttggaaggaaagaggggaggaaggtagggagggaaagtggaaaagaaaaggaaaaagaaagagaagaaaagaaaaagatttgatgtacgccaccatgaaagcaggtagaaggcagaggaatcatgaggagctggatgggttcacctggggagagtactaatgggacatgaggcaccccgcctgtgtgtttggagaactacagcagtttgcaatgccagaaggaacaaagggaggcgaggaaccatggcagtagggtggaggtgggcaggggcaggtcccagtggtgctaggaaacttgtactttatccataggcaggggagctgtggcttctatagccttcaaggggaggtcaccattgagccgagaagggagaggagctttctaggcagaaagcgtggttgactgaaatggcagagtgtgttctgaggagggtggcaggctctgggtggtgcatttcttccggccaaaggagagacgtgaggcaggagctgtgtgtcttccatactgtgctcactcaccatgctcaatgctcagaatccctccttgcagaggctgcagccctctttgtaggtgctttggtggaaagttaaatttgattgtcctatgggcctgtggcaggggctgcagtctccccttgtctcagtgccccatttcctctgaagagtgggcattggcaacacccttcatgacacttgagcttgtgcccatggggtctgccggcttctccctgcccttgacccggccgcagagtggactgcacagatcacatgggtgcagtgttgtcacccactcttctctgggctccacacacagacagcatttggcctgctccccgagggccacacggtcatcctaggcagctgttcagtggtaattagtcaacccaagtctcacaggttcaatgactcattgtcttaaatttaataagtacagaaaaacagagtgctgatgtattaaaaaattaatcctcctaagaggtagcctcggcagaggggcttggaatgaagggaagcagagggaatgtgcagggaagtaggaaatttctccttctggggcccgggctgctgtcgggaacagtagggcagagccccaactcttggattttttttttttttttttgagacatagtctcttgccctgtcacctaggctggagtgcagtggagcgatctcagctgacagcaacctccacctcctgggttcaagcgattctcctgcctcagcctcccgagtagctgggattacaggcgtgagccaccacaccggctaatttttgtatttttagtagagacaggtttcaccatgttggccagactggtctcaaactcctgacctcaagagatctgctacctcggcctcccaaagtactgggattacagacgtgagctagaacccttgggttttgagaaggagatggcagctctgcataaactttcttctcttactcttccttttccattaccccatttccttcctcttgtccttctctctttctgtattagtttcctagggctgccataacaaagtaccacaaactgggtgcctcagctacagaaatgccttgtcccacagtttgggaggccagaagtccaagataagggtgcgggcagggttggttcctgctgagggctctgagggacagtctgtcccaggcctctccccttgcctctggtggcttgcgggcagtctttggcattacttggcttgtagacacatcactccaatctctgccttcatctttatgtaaccctctccctgtgctcatgcctgggcctaaatgtcccctgtttgtaagaacaccagtcacattggattagggttctctccgactttctcttgctctgtgtctctctggtgccacctcacctgcctggcccttcatggttcaccttactgtgtgggtcccagccatccaccagagatggacaggtgcctcctgggctgccagcccctgccaggactcctttctttgcctttccagaggtgggtgttgtgcccacgtgaccccagacatctcaccttgcagcttctagattcccctgcccttctctgacaaaacttttcttctggaacattgactaactcctctgtgtaggctgcagttcccagcaggggtttatgagtgtggacaagaaaaagggtatatctatgtgagtctgcatacttggagaatttccttctatcgatcaaaaaatattccagcacagagcaggacattctcctgaataagccttatcacttaaagcatttcctcctcaaaggcaatccatttaggtgaagtgcagagacaactgagttgaaattcatcaagaggggaatgttggcccccaaagcattatgggccattaagtctgtaatgtggcagaggcctctggatagccagagttccttccttcctggtgaattgcaagggctgctgtgccggcaccttcctgttatagtctctgtcatacacacaagcactcagacattctcctggtgtttccctcttccttgggcacctgtgtccataacggaggatggtgatagctgggagactcccgcttggatgtcagtggaggccatggggccccttccaccacaggtctcaggattaaggagctgcagttttcatcgcaacgagtgcccctttccctgcttatagcttggaggacgctagtcctgggctctgggagggatatagatagatacctgtgtccctctgccctctcccttctgctaggaccccggcctgctcagtttgccaagggtggcttgttttccgtctggagtgtcaagcctgcattgagagggaaggcgtggggctggaccttccagcattgtgtatgtaggagtgggggtggtgggcagggtgagtaggacctttgtctgactaggaccaatagttttgaaatgacttgaaaaaaatttgatcttggggaatttccagcatgagtaaaacctagagacttctcagagttttgagaaagccaccccctgtcaagccagtcaccgcttctgtctctacagcctccctccccatggccccactgagactgcctcctgtccaggccctagtcacccacccactaaggctttgccccgccctcccagctggctgggtctcctccccaacagcccggggcttcttctgcctccccatgagcactgccttcacatgggggtgcctccatcagaatctccggggtgttctcatacctggccttccagacccttccctgtccagtccaatcacaacctcagcttcatccattcagcagtgtgaacccactgctccagccccctgctctgcccctggccctggacagcacatctgctgtgcccagtccagagcactccccctctctaaatagttgagacctaccctccaacaccagttctgtgcattcattctctatattatccaaccagcatcgccctcttctttgtcatttgttcgacactttctggatccttagactggaacacttcagactgaagagtttacctgaattttgtcacccctaaagtgtctccaccttgtctactttcacatgtagtttggttcagtttaatgaacgtgtgtgtgtgtgtgtgtgtgtgtgtgtgtatgtgtgtgtgtgtgtgtgttttcaagaatattttctggactcacagtggttctgtctccttggttgatattttgggagatgaggtggggagttgaggaaggaaggaaggaaagaagtgacctggaggtagaaaaagagttggccagggcagtggctcacgcttgtaattccggcacttcgggaggctgaggcagatggatcacttgagcccaggagtttggggccagcctgagcaacatggcaaaaccctatctctacagaaaaaaacaaaaattagtcaggcgtggtggcacgtgcctatagtcccagctactcaggaggctgaggcaggaggatcacttgagcctgggaggtcaaggctgcagtgagccatgattgtgccactgcactccagcctgggcaacggagcaagaccctatttcaaaaaacaaaaaggaaaagcagaggtgtcttagaagcagaagtggataggccacctttctggaagggtctggacagatctcaagtagggggtcagattggggagaacatggttagatccatttctctgaggatggctgcaagcaagaagactgctgcctcgttacggggtgtgggtgtgggccagcctcttcagctggaaggaggagatggggagaggcagggcatcctcccacgctgctgccccttgggacactctttggaagcctgagagttcctggtaggccactctgttcctgtcccttcctcttttctctgagattggtccagtaggcagcctgcagagcctctggcttcagcttggccagaagacgtctgaccttaccaaaaagtccttggttctgagttgaaaacggtccgtctccatcgtcagatatgacagagccccatgagcggtgcccacctggcatgagatactgtcgtgaaagcctgcactagcctccctgttaagtggtgcggcttccttgcttcctgctgacagcactcatcttatacctgccctgggaaatgccctcgtgttgggccacatgaatgattctcaaaggcagaaaaacaattttttttgatggaaccatcaagaatagtttaagcatgtgatattattatccttttcattactgttgtatttctatttaacatgattagatgactagttctgaaaacctaaattaaagcacaggccgggtgcggtggctcaggcctataatcccagtactttgagaagccaaggcgggtggatcacttgagtctaggagttcgagaacagcctgagcaacatggcaaaaccccatctctacttaaagaaaaaaaaacacacagaggaggcattttgttgagatgagagtcagctcacatcacattgcagacacctctctcaaaggcaaaggtcttcctgggcccctttccctaaccagggaaaatgaggtagatccctgcctgggttttttcagaagctgctttgtgtttttgtgtttgttttttcgccatgaaataagttgcccttggtgtcaaactgttgatcttaggggttgtggagtggagtggaggatgaggaaggggagaaaggagcccgttgtatgccaggcattatgctaatagttctatgtccttaattcaggccttacccaaagcccatgggagggtgggtgctggccttcccttttcagaggccactagtctctgttgctggtaatgttctgtgctcttagcctgagtggccatgctctcctgaattccacccttctctccacccaccttggtgggattggaacagcccagaaacccaaactctacttggcagcacatcaggtttttataggcccgagaatgctgaagaacatgaagctttattgcgatgcttttagagaacgttagctcagctctgagccccgtagaagggtttccaaagtctattaggcggcaaatgctttcatggctttggaatcataaggttgatttgaaaaattggcacctaatggcttacaactgtaataaatttcctgaaattggacctcagagggagactcgggtgcacactccccctgaggagtgtgggcagccctctccccagctcggtgcacaccaggctctgtgaagggtgttgctcaccgcagccttcaggaaccagagtcccccgtaattaggggagaggccctgtcactcttcatttctcaatttggacccaacgtttagtggcaatgactgtggggaggcttctgactggaatttctccccactggcctttaaaaggccagggcctgagaattcctgaaaaattaatggggtctctgtgggttctttacacttgctggtaacctggcctctcccaggcccgctgtggctccctggcataatagctgctcagcagccggtcttttgtatgcaaatatgacctaaagctgtatgggaggcggcagtccattgttgcccaagactgtgcgatttcaaacagacacgggcttttaaaatattccagacagatattgaaaatgtcagcagcaggtttttcccacttacttcttgcccagctcttttttcctctctccctccccctgccacccaccccaccataaaatataatcaaaaagctggtaaataatttaaagaattgcctcaaaggatttgcagactagaaagagactcccttctctggtttaagttgggagaaactgttttcattttttttcccccaagatatttaaaatattcaggagtgtcccacagggtcttgaacttataagtgtctgcatttttctcactatactctcatcccctcttttctttattgatttttttaaggttgctgtcggcaacatttaggtccaactttcaaatgaaaatcatatttcagttactggtcttaagtcagaccaacttaaggtctgtttcattcatctcagttctgtgccccctgctctttagtttaatgagagagtggagggaatcttggctgctgtgatttttcatcctattagctctttccaaagggatccttatcttgtgagcagaagggagtgatgtcttatatgtggagtcactgtgtatctttttagagaaacttaatcatccctccctactcaccttgagaaggtctctgggtagccagaagcttagactaagatgagggtgcacagattgggaaaaaataaacaaacctcttattgaccaagcctctgtccctgaagacaggcattgctcctcctgggagaactgtcaggtgggtatgcatttctggatctcccagcagtcctgaggccaggagtctggctggccatgtagagatgattgtacctgggatatggtgcattcttgaaaagcattggatggatggaaaaaaggaagaagtgtgaatggatgaataaagggaagagaaaagaggaaggacagatgcacggatagaaagatgtaggctggatgtgtagatagacgaatgaaaggaatggcagatggacggatagatgatagatggatgcatggatagacagaagggcagatgaaggatggatgggcagatggatcgatgaaaggaaggaagaactgatgaaagatggctagatgggtggatggatggacagatggatagatggaaggaaggaaagagggatggtgagcacctggtttcccctttagtattcattccctcctgctgtatccaaccagagggcattccctgggcctgcccctagaaggtggagagggtgatccaggacctctaggacactggtcctagggaatcccgacagtcttccgtgaacatttacggatgtctgtactgactgaccctccaggaaggccattctcatagcaccctttctctttaaaagcatagggttgcacgtatatggcccaccccccaccccttctgtcattccccctctcctctgtgagggacctgcacactgacagtctctggcccatttttaggtatctggcagtcccctgccagagccagatgtgtcctctctgggtccagccaacaaaggtcacctccttggctgtgtggtctgtcaactaaagtcgttgcctcaaacccagcaatgtcaagtgtagtggataagagctcaggctctagaggcagatggggctgcgtttgaatctctggtgccaccatttactgtctgttacgtaacctcttagagccttagttcccgcatctgtaaaatggaggaaagagtctctacttaagggtattgtgagaattcaacgagacaatgcacacagagtccttagaaacaagcagtggcggcccagtacgatggctcacacctgtaatcccagcactttgggaggccgagacgggcagatcacgaggtcaggagatcaagtggctaacacggtgaaaccccgtctctactaaaaatacaaaaaaaattagccgggtgtggtggcgggcgcctgtagtcccagctgctcaggaggctgaggccggagaatggcgtgaaactgggaggcggagcttgcagtgagccaagattgcgccactgcactccagcctgggcaacagagcgagactctatctcaaaaaaaaaaaaaaaaaacaagcagtggctggcacattgtactcaaacgcaatacatgtagcatttattgttgttactactgaaagttgtgggactgacatctcttgaagaagagatagcaagaatcctggcttctgagaggatcctcaggcacacagcacactgcttgctgaggtcttgagctgtcatcagtgccgggggatgcagtcggtgtggtagagtggctgcccagaacgcgggtctcttgggcctcatccgggcatcctgtgagctctgttgtaaagagcagctgaggatggcgagcgctggggagatgctgtagggggcccgagaggagtcattagctgacctctctctccttgagacagaatcttttcccttctgcttttgttcttataactgaccctctgacagtttttcctcccttgaaagcagaggccttgagtctcctccagctgtcagtttgcgtgttcccctgggcataaactccaacacaggctgcccgataccagctctcaccttcgtttctgccctggagaaaggctgctttcaagttggtaaaagcctcaggagaccatggctggctccaagagcctctttgtgctctgaaatccagaacagccctggccttgttggctcagaggagccttccagaaaaacagaagtcctcgacttctgcctcatcttctagctcctgttcttttctattttaaagcccttaagaaaggaggtgcgaagtccatggtctgtaagcataaaggatttttaaactaaacaagaaaaccaattatttttcttaactgctttagtccttcaaatctttcactgtaatggagatttagaacccatcacagttgggctattatttctgtgtaaacagtgtcatgccctattgcaccaagcaaacagtcaattttttccattacacttagacacagatgatgagggtgccgagtcaatggtctcccgagcaggttttagttgatggggagcgcgtgactgtggttggaggtgaggaaagggttaaggcttacaggggattttggttcttacccaggggtcaccttttggcttcaaagctctgttaatcttcaggccctggcttgtgaacctcctctatccagagcatggagactgggggagagagaagggttggtgagagactagagctaaagtgagaagggcaggaactgaaagtttctttcaactggtgagagagggcacatctccagtgtccccatctccagagtctcccttcttccagatggttctgcttttggatcttctgaagtgcacatctgattttgcattccactgcttgtagccctgggataaaatccagacagctgcatggcccacgggcccctgtcctgtggtgcccacctggacttctttgcttctccagcactaaccctcttgtggacccctgatgatgccatgatgcctcacgctcttttcccagaatattcttcccacctctcccctttctctggcttaatgccttttcatcctccaggacccagctcagatgctgcctcccccaggaagcccttcccccaccccaaggctgactgcgggcctgtcaggtgctgtcctgcagttcccctcttctagcccatacccctctgtattgtaaccctgatctgtcttctccagtaaagtataagctccttgagggcagcctctctatcctcaccagcttagtactccctatgccttgcacagctttgacatacaataccttcatattgaaatttttatttatttatttttttgagatggagtcttgctctgccacccaggctggagtgcaatggtgtgatctcagcttactgcagcctccacctcctgggttcaagtgattctcctgcctcagcttcccaagtagctgggactacaggcatgcaccaccatgcctggctaatttttgtatttttagtagagatggggtttcactatgttggccaagctggtctcgaactcctgacctcaggcgatctgccctcctgggcctcccaaagtgctggggttacaggcataagccaccttgcctggcccacactgaatataaaatgaatagatgagtcccccaaaagcttcgcccagacctagctggcagagtagggtaaaagaatagttgactgtgtgcactggggcggcatcagccttgctgtccacagcagggatggagacagcagtgctcctggcagccagcagctcctgcgggtggaaggtggtaaagcagtaaagtgaagaaggcggaccctgaagccagactgcctgggttcaaatcctggccccaccactgtcacttgggcaagtcgcttaaactctctgtgcctcagttcccttatctgcaaaatgaggttaacaacagtagggcccttatggaggttaagtgacttgctagtaaagcgagcagttcctgctctggagtggccaccccaggagggatggctgttggcattctctttatgatgcttctgctctcttggctctgcccaaggttgcttctggcccatctgaagaccttgcttagagcagaggttggggaccccatgtggcatgtaaccctgggggtggtggctgcccacctcacaccctaccccctactcttttgtttatgccccctgcctggcctctgaggcacttgagtttgtgccttctgtattgacctttagctccatccaaggtttctcgaatcaagctggctctgctaacagactcagccatcaacctgcggcatttatggagcactttttttttttttttttttttttttttttttcagatggagtcttggtctgtcgcccaggctggagtgcagtggtacaatctcggctcactgcaacctccgcctcctgggttcaagccattctcctgcctcagccgcctgagtagctgggattacaggcggctgccaccatgcccggctaatttttgtatttttagtagagatggggctggccaggctggtcttgaactttatggagcactttctgtgtacaagcatcgtactcacaggtgacctgttgatcataaatgccttaaagagtacatttgagctgctccctaatcccatgaggtaggctggtattactcttcgtgttttctccagatgaagaagtcgagccagagagtagctgaaggcgtgcagctgcaggagaccatgcagctgtaagcccccaccccgcctgcgtgctgcccccagcctggggccctgctgttgagcatttttgttttcctcctccagacaagtaccctctcagcccttgactctgcagtaggcttcaaggtccacttctgccccagagcatcagctttctggaaagccatcagcatctggaggagaggagaggagaggggaggggaggggaagagaggggaaatgtcttcagctacaaaatgcctggctcctttctcactcagaggcttcctgcctgaggagcttgtcctctagattttgaggagcagaggggctgaggacggcagagctgagatgcagcttctctcttgctgtgggtgggcgtgcccttgctgacacagggggcgagggtgagaggctcagcagggtgttggagttgctgccggttcctgcctgtgagtgggccttgctttaagcaaggttgagagccgaaataatggatgcctatgaaagacaaattaggaggggattatcatctcacaaaagaaggcttctaaagtcaactcacgaacactcagagtgagagctggttcatggactgcctggcaggcacacctatgctcagtccagggaccggcctccttgtggcagggggcagggcgagctcaggggctgtggccctgcctgctttccctaagggctcttctggggaggagccctgcagatcagatccccttagtgaaggagtagtgactggggggtcccagaagacaaaaaacctagccatagtaggcagggggaggggcaatgccttctgacccctaattgaaggtgatgggaagggagggggccagtgtcctagagactggggacttcctttggggccaaccccatctgggctcgaatcctagctctgctgccaactggcctcatgaccttgagcaagccccttaatgtttctgagctttattttgctcatctgtaatatggggatgatactagtggtaataataatagctgttgttattgcgttgctgtgcgctgtgtgaaacactcagcgtggatcctggtacgtcgtaaacactatgtggtggtggctgttgttatttgtcccgtcacacggagctaccttctaccctgcagcaagttctgctttcctgaaccttttccctactcacagggcacactatccatcattgagttttcccaacaagccacttttcttttctttctttttttttttttggatggagccttgctcttgtcgcccaggctggagtgcaatggtgtcatctcggctcactgcaacctctgcctcccgggttcaagtgattcccctgcctcagcctcctgagtagctgggattacaggcgcctgacaccatgtctagctaatttttgtacttttagtagagacggggtttcaccatgttggccaggctggtcttgaacttctgacctcaggtgatctgcccgcctcagcctcccaaagtgggattgctggcgtgagccaccgcgcctggccttccacttttctttaaatgtcctttgaagctaacaggcggatcaccttccctcccagaagctcggggctgcctgcttggggatttgcccatgtattttgtctgtaatgcataatatatatgcgtgtgtgagtatgtgtgcataggtccccccacacggatgtatatataactcattccccaaagagagatttatttcaaggcacaaatgcttctagttagcttctgtgtggatctgatccagcccagagcctttgccatgagtagaattcattgacggcaaaaagaaatgaaaacaaacattccctgacatggggcatttccgtcggggggcctctgggaattctcctcctctattaaaatatctaccaaattggacagagaaacttggcagccacagcctgagctacttaattgtttctgtggggagggtatgggcagaagctatgcactggcctctcttccggaaccttcctctcaccactgaagtgcaggaggatggggctcttcgagaacagaggatgtttggttgcccctggaatccagctactacccaccttgtctggacaggtgccgagggatggtgaggggagagtgcctgctccctgaccctctgcaagcagctctttgtaaagtttgcaggggaaggtggccagtggctgggaactcacattcctgagatggtctgcagccttccgcttagccccagcagactgaatatgaatgtggttttgatcacaaccagctgatgggagctgacccagacttattatgattttgctgtttttttcggttttgtttttccttctccctcctcttctttatggggaagatgtttcttgaatgaatttgcttcaggggacagagttcaggacggaggcagatgaggggatataggaactctcacgcgaagttgggggtatttgctgatctgcagcacccagggctttttcctccctctctcctcttaaaaatgggccaccggtactgtttcctggggcctctagatgtgcactggtattcatagcagttgggtctagacgtgctcatttattcagcatctcatttaatccttctgcaaggtagttataataattttcattgtacccatctggaagctgagtcccggtgaagtcgaacatcccccacaaaatgacagagcttgtaagtggcagagctgttcaactcatgcagaccaggctccaagccagggctcctccacctcagcactactgacgttgggggccagatgattctttgtcgtgggcactgtcctgtgcattgtaggaagttgcgcagcatctctggcctttactcactacctgccaatagcatcccccacccccagtcatgacaatcaaaaatgtcttcagacattgccaaggtcccctggaaagcaaaattgcccctggttgagaatcactacctgaaacctaagtcctttcttctgcccagtgcctgccccatgctgttactctttgtgggaatatgactttgtgtactgtttttttgttgtttttttgtttttgtttttgtttttgtttttgtttggagacagtcttgctctgtcttccaggctgaagtgcagtggcacaatctcagctcattgcaacctccacctcctaagttcaagtgattcttctgcctcagcatcctgagtagctgggattacaggcgtgcaccaccacccctggctaattttcttgtatttttagtagagatggggttttaccatgttggtcaggctcatctccaaatgcctgacctcaagtgatctgcctgcctcggcatcccaaagtgctgggattacagggatgagccaccgcacgcacccagcctctctgtacttttgaatactaaggtgatcagtggacatctgaggtgcttgatccagtgttgccaacacatattcaacagatatgcagtaactgtgtattgagcatctgtggtatgcaaggcactgtaaggtgtgggcactaagtgaaacccaggcaggagtttattgctgtgcccaggagctgaaggatttaccaaaacgcctagggagggctccctgttctcacagaggtcccagttgagtgggacactcacagtcttgctgagtaacagatgctcacttttggtttttggatggacagatggtgggaacgtgggtgagtgtccaggtgtgccccaaggacacatgcgtgcacacaagagaggagagaataaagcccaagtggcatctttggggcttctggtcattcctcatcaggacctgataggtagtgtactgtcctgtcatctaaaataaacctccctcttgctttatctgagggtctgcatgcatttctcatttctgaaaacctgaagacattttttttcaaatctcttactgtttttgaaaatttacctttaaaacaaacatatgaggaaaggcttccaggcctttgctcttctagtttcaattaattggtaccaaaaatgtctgctagtgccacccgtaaccccatgtctcagggtgtcagaaccctagagagactaggattccttgggagtcctttctgaggagccccagataggagctagtgagaaaagagtgttgtctgtgtgtgtatgtgtggatgcatgcttgtgtacacacacacacacacacgaaaagaacatcagttgttccttttctcctttaaaaactccaagaatgcatttcaaactcctgtctgccaatctctcgtcctcccccagaaatccttggttaagtctttagactcaacaacaacaacaaagaacaaagccacagacaatctctccctcccgacaatgtcagctgtgaactgaagatctgaatagcctttaaaattgttttattgttgtcagcgctgcagaatggtgtgtaatctttgtattctggagaatttttaattggcacaaaagggcagtttagccggcatcttgtaggaggtttgtcatgcaaacggttagtgcctgccactcacaacatatagggctatccaagctgatttacatcagcagctccctctggttaatagccttgtatatttcctgggggtctctgagcagaagtcaagggaagatgaggcttccctcccctcctctgcatccacactgcattgcaacgcattaggaacctcctggcaccttcccctgagcctggatggaggttgggggtgagcagaatgggtccctcacataggtgggagccttcaactagacaactgtttcgtctagagtggcctactggggtgcaatcccaaacaagaagctgtccttcttgctacctgtattagttgggtagtgctagctgctggtataactgaactccaaaatttcagtgcttaacacaatagaagtctgtttcttgcccacttaacagttcagtacagaggtttctggttgccttttcttctgtgcagtgattcaaggataccggttgattcagggatccaggttccttccatcttagagctttgctgtcccttaggacctcagcgtggctgagggttgggcaccaaactaaacactttggatatattacctcatttaacccttaaaacagctcttagaagatgatagtgttttcatttgacaggtgagaacattgagattcacagaggctccgtcatttgttgaggatcacatgggaatgtcatgggttttccagagccaagtaaggaaatacctggttctcctcccagtccccatgccccaacccatctagacctgtctgttctcactctcttccccatttaaagcttgtaaaacaagattcttctttttccaaggcctcacccccgtctggccagctgtctcatgcttagcaagtctttgagacagggactttctcatagtggggacagaaaaattctaccaaattgagcctggccttaactgtggaaaggcagggtagggtcaaaagatgaattctagaccattcacttctgttggtccataaggcctggtgtgtgtgtgtgtgtgtgtgtgtgtgtgtgtgtgtgtgtgtgtgtgtgtgtgtgtcggagggtgaggaagcaggagctgtttatctgtactctggagaggtaaacacagcaggtgggccccaccgaaggaatctcttgacaagctgggctttctcgtgacacaattgcctgttaatggattcagcatctggcagtttcaccaaaagccgactgccaatgagcctggctgctcgaaacccttgacactgctgatcacaaatgggtttccttttgacgccctgcgctgctcctgaaatggtcttgatcaaacaacagagtagtagttaaccgaaacccatgtcctagaattctcctccttccccacctcccgcaagcaaagtgatgtcgatgtctgcaggggaaaatgagaatgggccctcaccccctagccctgcaaagactgtacacatttgtacaaagcctactgagtgctctgaaagtagcttttgcttatgcattgatgcaaaatgcacccaaggggactagactaagccagggagggccccaagagaaggcagtgtgctaggtgctgggggtggagaggttggcaaaaggaacagcttctgaagctttgagggctctgagagaaagctttctcttcttagatgttggggacttgacatccctgtccctcctgggtgatttcctggcagaaaggtcaggaacaagtggcagtcatgagtggaaggcatttgaagcaagagactatcgcagccttggtttaatccatgtaaccagccccttctgcacctccaggagtggagagagagccacagctattctctcttctccccactgctaggatgctggctgcagctcagagggtaaattaagcatgtagagagcacagagcctctgcccggcctgctcctgagaagactcgcccacccagagaagctctcgggtcatctcctcacgtgctctgtagtctcttagcagacggtatgccacactgggcacattgatggcgggcccactggctgcaggccaaaagccaatagacagttcatccagaggccccctctttagctctgggggagtttgacctctgctgatgagaagaagccatttggcagaatctgcaaggcagaatcgatggcacctagtgggccccagattcaagaatcctgggtgccctgctggctctgatgtacatctttaaagctacttttccagcacaaaagcactagagaagcctttatttgttacttaatgcttgtgttttgtttcaaattacagaacttgaagcctttaggatgcactgccagatatcttagtttcttttctcaagaaaggaaagtccacaggcccctgaagcacgcattgtactactatctccccgacaaaaccaagtgacatagacagattaccactgacgtctccatgttacatccaaggccagcactgatgtcattgggtttctgaattctcatgttgagccagagatatgacgaaggccaccgtgaggtctcagactgccctgggagaatcacacagtggttctcagagtcggaaggaattcagggatcctgttctagattttagtgcaaagcagccttggttttggccatgggcaagaggccaagccattcattcattgcttttgttcccccaccattgctgaaatactgatttcttttctctaggaaacaagcaagacttaactgtttaacctgtgagagagtcgctactttgtctctttgctgctgcatttgttcattcgttcattcatttaaatagtcagtgagtgtgtgctgtgtgctaatgccttcctatgcactggggtggaaaacagaactccagccttcatggagcttaattctggcaaagggctgccagccaaacaagtagaagactgtgtgtgccccagggggataacagataaggaacaggactagagggaaggggtgggagtgctttggcagagtggcaccttccagccaatagagccctacaaaatgatggagacccttgggctgctgggggattgggaggactgacagcaatcaggatgaaggacactctgagaccagccccacagtttcaagccattttttgggaatggggctttgagtgttggggttgagggagaggcagccccttttgccttgcgtactggggcatgcaggatttggagatgggaaaggttagtttgacctggagcataggttccttcttatgtcatcatattcctggacaataaacctggcctttgggtcttaactgtcttctctggactcagtgttcctgattgcttctttctcagaatgggttgttttcccaaccctgctgtgggtaaaacatcccagatactccatttttatatttaaggtttaatcgtaaatgataattatatttaattatgggaaattcaacatttctttcaatgaagagcaggaaggacacatcaaaagaatcaggattagaaattctggttctcaagtaaagcaaagcagcggtgaaagactcagacacatctgcactaattggagccactgaactttgtatttttgtttgttcttcatggtgggctgtcacctggacagcaaggttctcatggccacatctgagctgccatccctgagacctactgtgggctagacaggcaccttcccacatgatccatttgatcctcattgataggtatgagaagtgggaatttaatttttacacattgggagactgcagcttgtggagattgagtaatatatccaacgttctgccagcattcaaacccaggtcagaacaactgaaatgtgttatctttctacttcacattaccaactcatgaaggtccatttattttttttgagtcggagtcttgctctgtcacccaagctggagtgcagtggcgcagtctcagctcactctgcctccccaggttcaaacgattcttctgcctcagcctcctgagtagctaggattgcaggtgcccaccaccatgctcgtttaatttttgtagagatggggtttcaccatgttggccgggctgctatcgaattcctgaccccaagttatccacctgcctcagcctcccaaagtgctggggttacacatgtgagccaccacgcccagccacgaaggctcttttgtcaggagaaaaagctgtttcaaatatcagcctagcaaagttaaaatatgaagaattaatgttggcatgttagatatcaatgtaaccattaaaaacaaacccaaaataaaaccccccaaaagctataactttcttaatatttcttaggccaataaacaggactcatgttgacattaactgaagttcaggctccaaccagcagcaggagagttttgaagctgcagaagagatttcttgtcaccttcatcagagtatctgccttaccctaagcccttcagtaatatattcagaatttcaagattggatcatgtgagcaggacttaacaggcctacctctgcctgagcttggctgggtttcagacctcagccgcagagacgaggcactataaatagacgagggaaagagatttagctcaaaaatcctgtgttctcagaattgccaccttctaccttttgggccaagctgtcctagcgttgaagccatgatgtttgcctaggtaacttggcatgagttagttttcatgccagcccacaccccagtcacagaaccatggttccttgatattaggtgagcattgacaagaaggtgactttagccttggccctaaatatgaggaatacagtcagagaacttcttccttagtggcatgcagtgaaaggagtgggtttgtattgccagtgaccattaggatgtgaagactggagatggcattgataagggagactcataggatttcagtgactcatagtacaggatggtatacacaaggcactggagaaagacccatttcctctgggttcatggtaattacaaatgcctttagtaatctccccaggctgttaaccattgtgggtgcaaggaaatctgggttttcagtgacaaggtattaaagcctgcatttccctgttgttagtagttgctgcttcttagcttgatttccttgaagagactgaagagtagcagccggcaagtaatgtctttcaaaaggatatatccattctgctgaaaagcatggaaccaaaataatctgtaacctattccacccaaataaataagtcagcaaataagtctgctttcattgtattgtcttctccataaatatcctttaaattgaggctgagtgacaagatatgcttctgccactaaaatggtatcactgatgatattgaaagagcctttaaaataccacaattgtcactgaaactatactttgctttttttcccccttctcctttgctagtaactaggtctctttgggaatttttaaagtgacaattggtagattgtagtcgatgatatttcttccacataatacttctgaatgccactcaactctgccttgattggctccaaatatcccaaagaagaaaaatgtttcatttgaaaatgtaaagcttattggaggtcatttgctccctaacttttacccctttgcagaaggggcaaggaaaaggcaacagtggtaagactcggcctcaaaggaacataactgctgtcaaaatcaatccatagctatcggcttgagtacagggtggtatatgcttattagattctcaaatgttattcagcttgattgcagcttttatacaaaggagttaagacacgggtaggaaagataatagaactataaattgcaagacagcttcttatgaaatcagtaaattattcatttaacagttcactctttgttgatttcatgttgctatggcacctcaagatggaggcgagtcagtccaccggcccaaccaggggccttacacagatgcacaaatcctggtggaaggcagataatgcattacgtacaaccttcggccacatgataaattgcctgtttatctggcaaattccaaggagatctgctggagagaactgaaagagatatctcacagtggctaacatttcttggaagagacccagccatctcagggtttgagtcagaatctgtttaagaaggcattaagaatgcattgtcttggagtgtcttgcctgtctcccgagattgttggaaacaccatcggctcacagttgctttggcgttcacgctacagtaaatgcctgacttcatttattattttgatgggcaaagaaaactgcctgccgacagccatgctccttcctaagctcttcccagacttacttttgtagtccttctctacccgtgtacaatttgatttcttgctgcttgttaaattattgtacttacgaaatatattgccatggccaagtctgtcattcgtgtacatggcgtggaagggagtttgggtgccagaggagttaggaagcttgatgctgttgttggccgtgactttggtgacagtgtgaccttggacaagttcctttatctctagggtctcagcatcttcatctgaagcatgagaagtttggggtggtcccttccttctttaacctcccgagactctgtgcctctcacatgtatagattccctgtttgtagacagcagtgctgttatggggacctctgaaggctatctgaatgtgcctgcatttagcaagtcaaggccagaccctccagatgcactggactgtggggacattttgtgtgagtgagactattaagaatttagcagttcattctgacagcttgatagatggagtggttttgcatggcatccatgtaggaattgactaaaaaggaaacattttctgagagtccggctgtgtgtgcatgctgggaggtttttctcaaatcagattttaaaactttgctctgaaagaccaacaacaataacctaatccaatatccttgtatatttgattctactgaccataacatttcttaatttctgcttttggcttctgtagcctaatatactaatgataataagtattagtgttgtattaggaggtagatgctattatccctcttgcattggttggagtctagttaggggatagaaaccatgctagttgagctgttctgcttatagagtagccattctttattcctttacttttttaataaacttgccttaaaaaaaaaaaaagaaaacatgctagttgtttgtacacagagagttaagctaaggaagtgttcatggggatgtaaaattaactaactgaaagagtaaaaagaaaactaaggaattggttcttcaatattagggtgcatccgaatcacctctggggcttattcaaacacaaatgactggcgccccccaaattcacatttctaatacgttttcgagtgatgctgatgtggctgttttgcggggccacgctttgagaaccactgctgccaggtactgcggaggtagcaactgcaggaagccaccacccttaccctacctagggctgatgagggaaagactaaaacttagatgtttggaggaggaacccaaggcctctgaggagggatctgggccactggtgctcatgtctctgagggggtggatgctgtgttgctggttctgcaagtgttgggagaaactacacgctggattcagctgctggtacaggaaggcacctttactgccaggatgaagaagcattgctggggtgatgctcacaggaaccacaagccaataggaagcccccaggcagcagatgggagggagcaagaccctcttcctcctccagccttagggtctccctctagcacacgctgttggcagagcctaccagggagctaggggcaaatcaaaaatgtaagtggtttgtagggtcccaggtctagtggagaataagtataaaagggtgggtttggaaccgagagctggttttacaaatggagaaacggaggcactttcccaaggtctctcatactgggtggcagggatggaatttgaacccaggtagtttggctgcagagcccttgtttaaccccacctcaggctgttggctgagaggccattctctctggctcaccttcctccctgtgactgttcttggcctccgttagcagtcgcttctctttccctgctcctcaggcagatgcccgtaggacttcattccctgcatcttctccctccacctctacccctagcatcacctttaggtgagtgggtccatgtctgtacctccacccttggctccttcgggggaaatgccaagcttggaaggccagtgatttcctggacgtttcacctggaatgttctgtagattcctcaaatatttcttccccctcggaactcagtactgtcagcctcaacagcttcctttcttctgattatttcagattctaaatctgtttttcattagactggcttagtagttaccacagccttctttgtacacttctctacccagtttatccagtaaactgtgattagagaagtgtgccttaaaaacaactgtgttcatgtcattcctcttcttccctgtggcctctgaagaaagctgaggcttctcagaaagcagttgtcttcattgctgagtgcttggaccctctgtggagcatgccctgtgtcctttccctaggtagttccagcttctccagccctgctgggctactcatggccttggcttccgtcctctctcagaccacccatggttgtttttgtcactctcatgtcagcaatgccaccatttccaccccatcagaactcttacctgtgctcgaagacccaattccactgccacctgctccatgaggccttccctgcttctctctcggggaaacatggtctcacctttctgtaaactcccctgggttttatctgtgtcactcctgcacaggcaaggccctctgcccactggaggctgagtctttgtctgagcagattcatatcttttctgtttctgaatttcccagggtgcctcgtgtagagcccttagtgccggctcactgcagagctgagtgtttccagttcaaatgggtgttcccagagtgggttttgtttcccatttaagaacagccttcctgtcatccagcctcaaacaggttggcctggactattctagtcttaggaaaggtggcccaggtgtgaagccacaggccacactgttgcttttagcacaagtttcacagcgaggaacagggactctgccctcagttttctctgttgggttactttcatgtctactcaattgagagttttaaatccttttatttctaaagatcgcctggttaacgtatgaagctttcttgggtccatgttggcctgttgtttaatgtttctcatttgcctgcgtatctggaaaaaaacagactcatttgcacagatagaaacaaaagattgtgcagatgggagccacgcatggaagggaaggaatactgatctccctaatgcatcttccttgcgaaacatggagctgctcaggaaagaaagggcccgtgattcaacagttggggaaatgtgggttcaacgggctcccttcctgcagaccttcacggagcctttgatatgtagtgatgagcttcctgaatcttgatctgcatgctgagttcctcagatgaggttaatttgaccacaggagtgtggttccatggaactagtattccttggaatgtgctttgagaaaagttgccataaagactatgagtgtcaaagggatgaaggaagcaggagttcaggctgaggatgagccagtgaccccctgctctggccgtggaggggagggcatcactaggtgaagcaagccctcaggaacaaatctgcacctgtgttctgagcccactccactcttgcaggccaagactgcccacaccacaccaatgcaatagacccagcttctctgcctctccagggaaagccgttagggtactgcagggagggggtcggtttcgccaaccaggctcattccctcagtcacctcccaaggatacagtgtcagaataacagcttctgaaatgagttttctccactcatgcaaattgctctctgactttgaacacccacgtgagtagaagcagtgttttggctgcctggttggtggaggaggaacatcacagggttattttttcccctagcaaatgcagacaataccctccctctaatcaacaggttcataagcgtttgtctgagaaccagaaatgaatttacaaggggctctctcctagccttgtggaattagagcagagatattgctttcttttcacttcagttaatccaaatgagctgagtctcctttctatagggaagggcaaaacaaaacaaaaacctaacccagcaaaaacaaggctttcttactgccaaactggggctccgaaaatagtttgggtcattggaatcatgaaagaaatagtgtttatataacctctctcttgcagagaacttgaaagtgatttcctttcgttttatgcaaataatatatgggatttatattacccactttgtcaaactcatcttccttgtatgtgtttggaaagcttattcactggtggtcaggcttcttgtttttcttctgggtagactgccttttagacaataaattctgaagtctttgttaattccgagctgggaggatacaaatggcggtccatcctgagtgtgggaaggagaatcagtttgaaagagctcttttatctgcactccttagactttttagtgttgtttcggttattttagtgtattgccagactcacggagaacttcgtttgtccaaagctccacgaaggctgcaaagataaaccaagctgtccatgtccttactggcagggatcacagagtctagtgggtgagagagtgacagataccataatacaaggcaagtaagtactgggtgcatgcaaagtgctttgggattgtaaaagagaaagagaaaaaacccagccaagtagggaggggaaaagctgccatctgagcttcacttgcaggctaggttacatttcagcaggcagaggcaggcaatatggccctgagcaagggaagtacagaagtgggaagtgcaggggacttcagatcacggggtgagggaggaggctcactgagagagaagaccagtactgtgctctgtggggccagctcatgagaccgcaaagatagtagcagctttgatgccaggctgggaattctgcctgcgctgttgggagccagtcacgtgttccacacaggtgagtggcctgttcagattctgtccctgtgtgctccatcctagtggtacctgggagttgtcatctccgtgcctctcttttttctgtccccacatctccagttatcagtctttctattgcacccaaaaaaactgcttgcctctctccctagttgtatgtggtccctgtgtcctcatcactcatccatcaagtgacaaaactcttctcttaaccttcagccttggcctcctctggtctaccctttccatgctgccagagggatggttttaagctgcactggccatgttcttcccctgctcaatacctggcagcagccctgtcatctccccaggaaagcctgagctccttggtgaggctgatgaggtcctcccaggtgcaggtgcactctccatgcctctgccttctcacgcactcagctttaaccacaccaaactggatgcacttcctctctcttgtctctttaaagggactgtgtcttctgcttggaactttccctttgtgaactcccatagccatccctcagccaacagacatctgcacgcatgccagctccctccctcccctacccggtctattgggttgcgtctccctccctctattctcatagtacttggtgccccctctgtgcacacagcccggtgctttatggttactttttgcctgcctgtccatcatgtcactagatggtgagttcctcccagtgcctagctctgtgccaggccaatgataggaccccaggaaatgtgtgtgggagagattagaaggagagagctggaaggaggaagacccatttggagcccagggcagcagccaagccaccttcatttgtcccgacgatcatgctggtcccagagttggcctcattcctccagagggtggtactaagattactggagaaaacaaccagggggaagctcactggtatataacaacatcagctcccttctcctcgtcccaggaggaaatgatatttccatacatcctaaacatccgcctccttgcagcatctgcggaagcttgcttgaataatgaaagataatcagcaatagttgaaatttcctatccttgggcaggtctttttttcctactatattatgtatttaaatacatagacatatttaaccccacctaccttttgggccaagtgtttatggactagacttgttcttccccttagttttggaggtccagtggtgagtacctctcacttttcagagccagaagtgctgcttaaaaatgtgttcagatcctggccgggcgcagtggctcacgcctgtaatcccagcactttgggaggccaaggtgggcgtatcacctgccgtcaggagtttgagaccagcctggctaatatggtgaaaccccatttctacaaaaaatacaaaaaattatctgggtatggtggtgtgtgcctgtaatcccagctacttgggaggctgaggcaggagaatcgcttgaacccaggaggcagaggttgcagcgagccgagatcgcgccattgcactccagcttgggcaacaagagtgaaactccgtctaaaaaaaaaaaaaatgtgttcagatcctgcaaagtgacagcacattagagctggcggtgtgcagacacgataagagggaagatcagatgtgctggcagagagctccaaagtgcccttcccatgagtgtctctcggttggagagggaacacactgccaggagccaggcagtgtcccgaggccttcactctcagtccgtgcccagagatgcagcccccttatgctaatttatgtgtcatcagagtcattaagggtcatgaagagccttgggttctggtcgcagctctgttgccaactggctgagtagacttccgcaagccacgtgctttctggggcccaggcagccctcatctgccaaagaagggagtcggatgaaatctccaagagtctctcctgcttcccacttccatgagtttatgaaagatgcagggatgtggtgttggcattggggtctgatggagcttctcaagggagaacatgcccctaaagaggcatgtagcagctggggagggatggaaggggagtgagggctggagactttgggggtccaggagcaggtgctcccagctgcttgtggcaagagaggaagggagggagacactgaagagaagagcaggtctgcaggcaaggaagaagcagccaaatggccctggggttctgaccatgagctttggaattccagagtggccagggaggctcctggcacggccagtccctcagtggacagaggccggcggggccagctggtacagcccagcagctttcccagaacctctgtgggttgcgtgcctgggaggactcagccagcactggctcctcttctgtcctcagaaccatctccaccttaactcctccctggcacatgcagctctttctcaattatttatcagtagcagcatccatattagcccactgtgtgctgggcacagtgccggacactggtgactgagacactggtgacccaacctttgctaagaaacaggacttggggagaaagaagaaaagcaacaaagtgggttatctctaagtccaagtatctcttggtgttgtagctcctgtgggcactgcaaactcatgtttttattatttgaaggaagaggaattagggtgagcaggagggtgacgagagggtgattggaaagtccagatgttgggctctatgaacaacttatgtctgctttaaattctcataggagactgaaaaccaagaatatacctaatggtaacaggcagtagaccaaagatcatggactgtggctctctcccagggcaagctctttagtctccctgatcctgaatttcctcatctataaaatggggatcatcaagcctatctggaagggttgcactagagatgcaggtgaaatcgtggatgtatgatgcctgccactcagtagatgctagttcttctttctcttgctgatttagcaacaggcttccttttaggccccacagagatctctcctttgttctcttaagtctaatatgtttagatctattgctgacacctgatgaaatttgccaagtgtcttgaagtggctacagtgccaaaaggcttgttcttggcaggtaccatatttcagtttctcagatctcctctggcaagagttctgcagacattctctaatcggagtttgggggctacttaaatgattagtcccactgaaggtagacctctgctttgaaaacagccctctgttgtccaggaagggcttgtgcatgcctttataagaggtcatgtaaagcatggttgggacagaagttgtattgggttcacttgtgtgtcctggctcctaaagcaaagggattatccttgccaaaggagaaatatttggaataaaataccatggctcatgtttcaagatatcacaggccgagaagcgaccatgatcttggtgagatgccctgatgtttttttctgtggggcacatcataaaagaactttggttaaacattttggcctgctcctcatttcccagctccaatcttccagattttctgagtagctgacatgccttctaggggaaattttgcattcttcacttcctctacctctctttcttcccctctgtttttttcttttctagccaggggcagcagcttagtacttggaacctgccacttagaatggctcagactccttggagccaaggggcacgctggcggtttctgccaagcacctggccagggttccggggtggggaggacggatgggaggtgtcacactgcccctcgtgggccattgcctcacagcttgcaggtgtcctggcgctgggataaaagggcttatccttgagacctcaggagcgtttctgccaagcgctcgcattggtcagtttattcggattctcctgtagaggggagttacctgcttcttcctatttctgttttctgttacaagacctggctagaggcctctctgagagcgcagtcaggcacaaagcccggcagaggcattggagaagacaggtcatggagtgaatgagcgaaggaactctgagattctagggtgttaactcttagaatacccagatcctacatagctgcaattcagcagaacattgaccctggcagccagagtacttttcagactagctgaggtgctggaaagcagcccaggaggacacttggggcagaggcagccagcctggggttcaacatttgtggctgataatagagacctcggataaatggaatatagacatgttacatctcctgatgcagagctcctgcagccagagggtcttggcctttgggggacctctttgggagggcctggggtcagatgggggtggacttgggcctgagtccatcagagaaaatgtggggagttggggtagagaccaatggctgccaatgctcacttccaattcaggaatcattgcgccttcctgcaggaggatggccaacgcctaatgatgatgatgattttttcaaagccttcacgactgctctaatgataggcatatgaagccacagttttcctccttcctgctgttcattcaacctttctagcctggcagctttgcctcagttttcctccctggatgatgaatccacaagtctggccagaaggaagatgagcattactctgaaagtcattttgtacttttaaaacttattttctttctctgagttctgtattagtgttgtaatttgctcctgataccacctaaatcagttgcgattaaagcttttctatctttctttttttgtttaaaagaaaaaaacagatttgctgcctggagttcacgtattaacaaagatgaaaaagatagtgtctgatttataatgtactgaattgcctaagtctttcatttgtaattcttgacagtgttcctctagtaaagcgaggcatcgttctgttgtcaggggctcagtaatcgccatgaaaaacgggggaaggatttgtgagacattctatatgagtaccgaaggtgatggacaagtaaaaatcaggacggcataaattactcagtatctttcttctccacaattattttcactgtggcattactatattggtatgtcctccgggtccctttaaggtcaagaaatcaggagataaaaaccttgtagcatttgaccagatcaatactgagggttctcaaatagatatctaagtctttggcagctgatgctggatgggcaagggaaaaacatagtttttgataggtattgaagaagcttcagcagccgctgagtacatggggcctctttcccatgcgtctgatgtgctgtgtgccagtctggggaggggtgagggaactccatttgggttctcagttttgttttgtttttttttgagacagagttttgctcttgttgcccaggctgtagtgcaatggcacgatctcaacctctgcctcccgggttcaagcaattctcctgcctcagcctcccaaactgggattacaagcacctaccaccacacccagttaatttttgtatttttagtagagacggtgttttaccatgttggctagactggtctcaaactcctgacctcaggtgatccacctggctttgcctcccaaagtgttgggattacaggcgtgagccaccatgtccagcctgggttctcagtcttttgtggaatatctttgttcttcctccattttccatcagttttccactctggggagatgagaattcgttaaaacagagtgagccagcgtaggatggggtagggaaatgaagcccactgtaaactctgtgggtgctgagaaacctcaggctcctaggtaaaaggaggaaatccaaggtggctgtccagacactgcccaactgtgccaccagaattctgagctccggccagcaggctctaaaggacaggtgggcaccttggagacgtgaggagcaatcatctttgcttcatattctacctgtggttgcctttcagcagttttgggaatgggagctttggggcattttatgtcctttgcattgtccgaagaaaggtaaaaggagcgattgctgttacactggggatttctgatctgtctctgataaaatctggttgcatagttgatcttcagcaaaagaggaagcgatgaatgaaattgctgtcctcacttgccacctccccttccttttattctttggtttttaagtgtggtgaaaatatcaataaagaggctggccattttggtcccagtcaatgaacacttgccatggggtagtccttgcccagtggagatccagcccatatgggcaccgttgcattgcctgtgggtcataatgttttaaggatattctgttcagttgccctctgggtccctccaactagatgaaggcattctagattgcaggggaggcgggaaacagtcttgagctgcgggatgatcttgtctcctagtcacgagaaggagtattggagatcccatcatctcatctgcctgtggtcattattactaaaaccttcttcagctgcccaaaccacagtaggaggtagccttgctcttcctccccttggagccattttcatgtgggcatgaaagtgattgacaggctgtgaagtacctctcccaccatcacccaacactgtgaggtaggcggagcagggaaagttttaattaccattatacagatgaaaaaactggccctctgcagaagttaagtggtttgcatgagcctgggagctggcactgcaagacaagtctacctgctacggacagagtgctcttgtaccctcggggttctgcctctggtcactctctacatagcagaagctccactggcacttttgtattcacaactaccgggtgcgataaggcagtgagggttattatgataccccttttcacaggtaaggaaacaaggctcagagaggttcaacaacagagtcataattcttcttgttggagaattcattttgttacatttcattcccaccatctgcagtaagggagacccattaaaatatagtatcctgatttttaaagagaaggtaacattaaggccaggaggtttgggatttgcccaagttcactgtgggcttctggactcccatgcccaacagcctccatgatgcagaagcgtcccgcaagagcctagtgttttgattcttttttggtgccaggagacagactgtggacctggagtgggtttgggggctggagaagtagaggaggtggagtttctagaagaggggtatattgtgggggtaataagaccaataactacataaggacctgcgtttggtcttagcagtgaaaattgcatctttagccttatagagaatgttgttttcctccataaaataacctgctttgagcaccgctgttgtgctgggcaccattccagttgcttttgcatctgctctttaatttaatcctctcagcaatgctatgaagtaggtacctgcctcttttttcctcagttgaggaactgaggctcagtgagttgaagaaacttgtcccggaccacacacctggtctatggccatggcacgtggtcattcagcaaacgctgaacacatgctgtgtgtcaggtaccatgctggacaccagggataaatcagtgaacagaacagaaacgaatcccggtcatgacagaactcaactcaagcggagggaggtataggataaacagcaaaaatataccaaaaaagaaaattacattgcacaattagaaaacggtaggagccacttaaaaaaaacaacagtggaacacagggtaaaggagattaggaagtacctggagtgggttgcaattttacatcagctgaccaggctgggctgcagggagagggcttggaggaggtgagggagtgagccctacaagatgtctgaactgacgctctctcttcagaaagaaagggaggcccagcaagtgggaatgacttggccaaggttacccactgagttaatgtccaaaccgggtcaagaacctggggatcctcacagctgcctttgaaagcttcatatgggccgggcacggtggctcacgcccataatcccagcactttgggaggccgaggcaggcggatcacctgaagtcaggagttccagaccagcctgaccaacatagtgaaaccccgtctctactaaaaatacaaaaatcagccgggcatggtggtgcacgcctgtaatcccagctactcaggaggctgaggcaggagaatcacttgaacccaggaggcggaggttgcagtgagccaagattgcgccaccacactccagcctgggtgacagagcgagactctgtctcaaaaaaaaaaaaaaaaaaaagaaagctttacttggcttctctatatcccctgaacatctctgacctggctctcttgatatcagtctccatgtccaattctccatgtctgccttccagcctcttccacagccttcaacctttgtggcattgattcctggtggtcccatcctagcccccaaaccttctctgtcctcaaaagtcccatctctcttctctcttcagataaacgtacatctcttcaccccagcatcccagcgccctgagtgaggaattaatgcttttatatttgaagagatcggctgctgtcatttttgatatcttctgtttttgtatgtgggaacgcagagcacaattagaatacagttatatatcctcatagttattgaagcttggattaacatgacataaagttttgtctagggagtcttttgctatggctcagggagcattttttgtgacagtaataggctacagttaatatacttgaatgatactagaatctgtgttataaggcagaacaaaaggggtttatctgaagctgaattacaaaggtggaattatcactgcgaatgatccacagagatctggggcttaattattgtcgcttgtgtcatttcggcataatatgggtagttactggagcagagtagaagtgcgggagggccagcctgtcaatcacccggtggatgccaggattcccaccccttacacttagcgccacgccagccgtgtgccctacagagccacaggaatggatccctttggccatctgtggctatgtggtactttcagttttcttaatgttttaatgactcccctgtcctacctccagcccaatccccctctccccacttaggtcctttgccctcttggccctgtcgaaccttccaggaggctgatgaacggtctcatacactgatggcattttctcagcccggtgaggccgccaccaccttccagagcctaattgttttgacaagcgaaggaggcaagctaatgtgctctgtcagccatttggtcacatttggtcaaagccaggtgtctggctgcaaataggtgcactcaggtaaaccacatccccgtgtgctccgggaggacagagcacgcaggaggcgggagtgttgcgggcagcccttccccatccctggctccagcgcattcattctcctcccaggctccagtcaagtctgagggtgaagggtgggaacaagacagttcagcacctgaacagggcagggcacccaagggcttttagaaatgctgttagatttatagggaccatcatcctcttcttactatttttattatcatttttcattatccacctgctaggtgtacaattacaacttgttttgttggtggctaaattcagctgtcctcctcaccttactgttaaccaagagaggtatggccattttaaatggccaaagtgtttctattggaccctttaatttttttatttgagatggagtttcgctctcgttgcccaggctggagtgcgatggtgcaatctcagctcactgcaacctctgcctcccgagttcaagcgattctcctgcctcgcctcccaagtagctaggattaaaggtgcctgctaccatgcccagctaatttttgtatttttagtagagtcagggtttcaccatgttggccaggctagtctcgaacccctgacgtctggtgatccacctgccttggcctcccaaagtgctgggattacaggcatgagccactgcacccagcctattggacccctttaaatgtgactttttctgccagacttgttttctgagaggtcattgcactggtgctttttgaaaagctactctgagtgaccccacgtataaagcgaggaaagggaacaggactttggcaggcagctgtgtgtggcaggaagtgaaccaggaaggtgctgggtgtagtcttctcccaccctccagcagtgctggggagctgcgcttgtttgggaacagagaggttcaggaatgtcgggtctttgtcaaggttacatggctggaaaatcaaaaagacagctacgtctctctatgtctgaaggccatgtttttcagctagtcctgtactttttttaaagtatggtcttctaaatacctcatcagagatgtctttgggccccttatccaaaatgaagattcctgggcgccaccccaagacaactgaaacatgctttctgaaggagcaagcagcttgggctgtgcatgtaacaagtcaccaggtgtgactgatgcacacgcaggtagttgggggccgctgcactgtccggacaagctgatgacagcgtcagccctggtgttcccatagatgcctaggtattagtttgaacaccacatgtcctcagatattcttcataccaagagagctggtccttggtacattataccctactgggctggggtaacagaaagtgggagccatgacctcaaattaaattagagccaaaaagggaacatgtgggattttcttcacatctcccatttaataaatgagagaactgatcctgcaagtaagagaattccatgaaggacatacattcacagcagatctggtcctagtagctgttacccccgctacccttaaaaagtaaatatctatcaccacttgccttcctattgctacgatgatttaaaagaagagttggttttaattagaataaacatggtatttttcttgctgcaacaaggccttcaaaggggaaaaaaatctcaataccccaattatgccaaagcgttcccagtcctatccaggagtaattaaaaaatacagctgacgcttgttctcttgcttgtttttaaatgagtagctaagtatctgtcaagatgatgagcacctaggccgctgacggccttaccatctcaatttgctcccaggaactgcagagatgagaacacgaaagctgttgttttgaactgtgaggtacctggctaccccaggcacatgcattttgtggttggtggagatcatctctccgaccccagtaccaaaatgtgggatggaaggccaggcctcatgtccacattcttatgcctggaacacatctcttctttccctatgggcagctgaagtggcttcttcctgtgccgcgcggggagctcagcttctctgcagtacacagcatgttttgaggatcgttgggtagaattaggttggctttgttgggggaaatcccctagttgcaattcactttttaattagttcatggaacctttctttctttttttttctttttttaaattatactttaagttctagggtacacgtgcacaatgtgcagatttgttatatatgtatacgtgcaccatgttggtgtgctgcacccattaactcgtcatttacattaggtatatctcctaatgctgtccctcccccctccccccaccccacaacaggccccggtgtgtgatgtcccccttcctgtgtccaagtgttctcattgtggaacttttatttctaaaatatgcccccaggtgaattgagaagtcattttgcatattaacaccatccatttggtgacaattgggctttttttcctcaagctaagggcaaggccagacgcggtggctcatgcctgtaatcccagcactttgggaggctgaggcggatggatcacctgaggtcaggagttcaagactagcctggccaacatggcacaaccccctctatactaaaaatacaaaaattagccaggtgtggtggtgcatgcctgtaatcccagcaactcaggaggctgaggcaggagaattgcttgaaccctggaggtggtggttgcagtgagccgagattgtgccacggcactccagcctgggcaacagagtaagattctgtcttaaaaaaaaaaaaaaaaaagggcagctaagggcaattctgtatgcattcttctcaccccacccacaacacacatgtttttctaaagacaaaatcaagggcagacttgaaaaggaaataatcataaaagtttctatagcatttggagttcttaatatttacccatcagtttacagcatgtttttatatatgtggtgttccggttatctattgatgcataacaaatcacccaaaaacttgttggcttaaaacaacagcaatcgttatattatttctcgtggtttctgtggagcgggaatttgggcgggactcaactgagtggttcaggctgggagcatctcatgaggttgcagtcagacatgaggttgtagttctagtggctgccactggcacaacaggggctgacgaagcatctgtccaagggatctcaggacttctccccatggtctctctgcatgagctggtttgagcttctttatatcatggctgcctcaggcagtcaaactccttgtacagaagcttagggctggagcacaaatgtttccacagacaaggcagaagcgtgttcacttttttttttttaacctaacctcaaaggtcaaacaacacaagtgagtctcaaactctcaactggaatgaaggggaggggacatagagctcacctcgggattggaggcgtattgaggtcctatcgtagatcgcatgtggcacgggggagatattgtggccatcttaggagaatacagtctgccacatgtggtcactctcagacacgctcaggacgggtaggaggtcttattatcaccattttacaaactggaaactcaaagccagagaggtaaagtagtttgcctgcagtcactcagatcttaagtggatattagaactcatatcctgagggatgtgagaaaaggggaaagaaggcagcaccaagtagcttgtccaggtgacctttgggggcaggtgggacttggtggctctatacctcagatctctcttcgccaccatatgaaatgagttgcgtcttttttttttttttctctttctctctcatatagactcttgggtgcagggagggaagagccaggtggggtgggctagcaagaggaggagcgagctctggaggaggaggttggacagttgcccgcttggtagagcagctagttttttacaaccactgtcaggagaggaagggccatccgggtctgtagggtgtgtgtgttgaccaggctttacccagagcactgtcctgtctcttctgaaggtcagggcactcaatgaaggacaagtccagctgtggcctttaaattagaagactagccaggtgtggtggctcacacctgttatctcagtgttttgggaggctgagccaggcaaattgcttgagctcaggagttcgaggccaccctgtctctaccaaaaaaaaaaaaaaaaaaaggattagcaggggcatggtggcatgtgcatgtagtcccagctacttgggaggctgaggtgggaggatcacttgagtccaggaggtcaaggctgcagtgagttatgattgtaccactgcagtacagcctgggtgacaaagtgagaccctgtcttgaaaaaaaaaaaaatgaaccaatatgattaataataatggcagcatcaagagcctgtacttcctatgtgtttccatgtgtgtaaatgctctgtcacaccgtctcatttcacctcatttccccataaagaacattctattaactggggttcagagagtaacttgttctgtcgctcacccaagatcgccgtgtggttcctgagtgtaaggtgtgaagccaagtctctgtggccctggggcccgagccctcaactgccctgctagggtccaagctgaccactgcagggccttagtctggaggaacggcttgactccggacatctgcaggagtgtttgctgtgttgagttgagcccctctgccagacgtgtcaaaacaaatgcttttgtgtgtttactgcctcacacgctcagccagaagctcctgttttatcatctagtttagattgaggggaagaggcttcatcagtaaggacctgtctcactcttcatcccacggccctgggccaggccctgttagctttcaagaaggcagtttatccctcaagggtggtcctgcctccaggctgcccccaccccatccctgtggttctgcgcacagaatattgttagatttgatttttccaagtcgtctctctcagtgcctaaaagagattctggcgtgctcagggaagttttttgaagtgaccaaatgaacagtatgtgtgctgattcatctcccctcactactgtcagggtgaaccaagttcagccgttggcaacgagacggacctagaatagcccctgctcctggagattttattcatagacccttcaacacagcctgctcttatagacacagtcattacatgtcttgggtttttcaggaagatttagattttctgtgtcagatgatgtatttaagataacttcagtcactgcgtagctctgcaggacaaccatttattacaggtctatttcaatttttgaaacttatagtagagacagttgctaagttcaagctctcagagctcacctccaggttgcatagccagtttctaggagggtcctgggtttcaagagcaagagattcccctcatcctccactcctgggctataggcaggtacagagtacaaggctcagaagggcccaccagcgatgtggggctctccaagggtcctctaggaaggagaccccaggggagagagaatgagttggggcaaccaataggaaaagggctaagaatcacgttaacatttatggaataggccacgtgcacctggcatttcacacttggcacctggttctttaccacattaaaagatgagtttaacttttctcatcttacaggtgacgtggtacagagtttaagagcatgggctctggggtccactgttgggtttaaatccaggttcttctcctcataagcaggatgaacttagccaaatttctcagccctctggatttcagtttcctcattgataacatggagacgatgataatagtgcatcctttgaaggtgtaatgtgtgaattgaactagataactttgtgaaatggccggcatagtgtcagatctacagtaattgtgtaataagaattagctgctattattattgttgttgtttgagggatatggacagggaatggagaagatgactctgagatatatatatatatatatatatatatatatatatagtcatcattctgtcatgcaggaaggtctgggctctagatttaagccttctagcatctaatgctgggtcactactgtgatcagaggtcctgatgaggctgtttgcgtgtttgtgcacagaggcgcatgtgttgggaaccgaccacctacccttccccagcaccattacatacccaggctctgctctgaccttacagcccaccctccatggcccccaagtggtcttgggagcagatgcacagctggtggattgggcctgggccctggcttgctcaccaagccctgagcttctgtttatgactaattgctttgtttgttctgtatgagacacttaattttttttttcagtgatttactcctctttgtaattaggtgtggtgattagaatcttgttcctattacaatggagttttccttttaattcatgcacattcaccaggcctatctccgtctgttccattgattgtccccagttggcttttcccaagctgtcatataaatcacagttcaggggtggcttagagactgatacgagtccaaggaatgaaagagagctgatggggagttttgttatattcagctacccaatagtgatacatatttaaggatgaagtctcaataaatcagggcacaaggagttggcaaattactttaataagtgttctttactatatcttctgcatgtgatttatttttttattaaaaatgtcattacacacacatatacgttttgctaggaaaaggtctgaaaataaacactgaagtgttaacagtgggtgatttgtattttcttctctttgctcataggcagtttctgccatgtatatatgacacatgtattaaaaaataagaggttttgcaggccctcctttataacagattagaaacagcacatttgtcaactagcccaaggtcacttcacacatcagcaaaagactccaggtctttaaagttccagagcaattgctcagtccccagagctgacgttcatccgtcagtcagtcagcaagtagtcattgagtcctgggtctggggtgaggggcagagaaggcataagatgtggttcctgttcacaggtgcttatggtttagggagagagttgtttttgtttgtttgtttgtttgtttttgagacagagtcttgctgttgtccaggctggagtgcagtcgcgcaatcgcggctcacgacaacctccgcctcccaggttcaagcgattctcctgcctcagcgtctcgagtagctgggactacaggcgtgcaccacgatgcccagctaatttttgtattttaagtagagatgcatgttggtcacgctggtctcgaactcctgacctcatgatctgcccgcctcagcctcccagagtgctgggattacaggccatgagccaccgcgcccggccgggagagaggtttttgacagaaactttctcttcccctgaccatggctctgacctctcaaattccccagactttggtttctcctccacggatcctcctccttcatgatgctgtgaaggtggccgatgccagggcattgccctctcggttccgcctcttcctgcagggcaccctcccttcccgtggtctcccatccagcctccttgttgctagctcttgaggctgtgtgccctcccgttatgacctcacaaggcagccccccgggattctcctcatgcctttccttcagttttcccttctgtggaacacagacaaagtcatgttcctcctaagtaaagggctggagagaattcagtggaatgacagaccagtggacttgactgggggtgtgcgtccgaggggacctagatgtgatgctggaaggcagggtagcttgcctcgggccatgagtgcttggatatttccctgtgggcagtcggagacatggaaggttttcagtgatccttcaggaaaagtaaccgggtcacagtcagtgatgccaggaaggtggccatcttgtgttaggtcacaacttacagtgacaaggttctgaagcaaagagagttgtagaaaaagtggctgggcgcagtggctcacgcctgtgatccctgcactttgggaggccgaggcgggtggatcagctgaggtcgggagttcgagaccagcctgaccaacacggtgaaaccccgaatctactaaaaatacgaaaaattagccgggcaggtggcaggcgcctggaatcccagctactcaggaagctgaggcaggagagttgcttgaatctgggaggcggaggttgtggtgagccgagatcacaccattgcactccagcctgggcaacaaaagcgaaactccatttaaaaaaaaaaaaaaagaagaaaaagtaaggaaaggggagaatggggggtcccatcaaaggaagaaataatagaatgggatggggtagcttggaagacagaggaccgggcaagagtgtaaagctttcaactgcaggaggttggggtcactagttgaaatggagtctgggggaaggtgtgtttgtcattgttaagatgtgctggggttggaggtcccagaatatccatgtcacgggaaaccaacagcaaagaagtgagcctgctgctctggggacaggcctggcaacagagcacagagaggcaatggctcttcttgccaccttcttgcataggggagagagctcagatggcgagggtgggggccatggatcaggtaggatggatgacgccctggagttttatggggtgagagaagaaaagggagcctgggagagttacagagagggggtagagcacctggggcctagaaaaccccagagaaagcatggacataagggaaggttgggagtttaggtatattcttacattttccttgacgtgttttcctatttaataaaaaggggtggggtcttccagacttactgaacaaattaacaaggaaaaagctcatcccctaacatatgcaggtattccttgcttttagaaagaatgcctcaccagagttgcttaagcagaaatgtgtacaacttggtaggctattcactcttttgccaggggagtaaaaaccaagagagaatgaaatttcaggttaaagctatgccagtggttatttggtatggccgagtgccatcttggtttgggggtgcggcggggggttgtgtatatattcaagttagtatgtaagtcagggtggagtcgggggacaaggtgaaaagcatatgggaaataaaagcagtttctctgaaattctgtggctgtagatttctttctctggaaccaaagagaaactttaatgagttttcctttgcaggtaaagcagttttattctgtagctgagacttctctaaataaagcagccttccttctacctccactgctcaggctctcccttcctgatggccccctccagactctctttaaaacagagtttcatgcatgaggaagcatcataatgtaatactcatcttatctccacacttacccagcaggcacttacaaaaggacagtgggcaaaccttagaaatctctgtggcaagcggaggtgggacgttttctttaaagacgccctcacctaggtctgtccagggcaggaccctgatgggccaattagccacgatcagggtttccctgctccggctctttctctttgaaaggcgtgggctcatcttcctttacatttccaaggttctccacttgtctccctcgtgataaacagtgtaaggcggagtgtctaaaggactcggggaaaacctgcggggttattatggctcatttggtagatgagagggatctgtaattttccgtggtgtatttgtatgcacagagatgtgataaagatggcttgtagcctctttcattttccagatgtctcacaagtggataaacatcgcttctttctctggctgtgggtctgctctttctggtgtgctcctgatgccatgttccctgggaacgttcgcagtcatctcaccgtccccgagaacagccattttgtcttggcaggtcttcccctggccttccgagggagtagggagaaggctgctgtcgggggaggccatgggagtggagggggctctgcctcgtcttccagaaccgttcaaacatctggatgtgtttagcccttttgattcgagttgagcaaatctggagcttgctttttgtgcctgttgaagggcaaaccttcctgtgtcttcctccatgtacagactgtggggacagccagggttagacagggcgtcttgggaggggaaggacttaaatctcatgaagacagatttctgacagctaggaaatgcctggaaatggtgtgtatgttggggtcagggaggatctgtagggtgattttcaagccagtgcaggcccagcccagactcacaaacctccctgctgcttggttaaacacatcttaaagatgctaattttgttgtacattgacatggtgaatgttttcctagtgttgaatccataatgtatttggtatgaagctataaaaaaccctttcttatttccctcccttttattttacctccaagatttgttaaatgaagaatttgtctttctcaatctatctgtttctctgtgtgtgttggggggggggggtgtaaatctcttcccattggtttttgtctttgtctctctgtgtgtgtgtgtgtgtgtgtgtgtgtgtgtgtgtgtgtgtgtgtgtgtgtgtgtctcccccacccccgacaatgactaagaagcattgagaactgggctttttcctacagatgcagtgtgtcttcttcaaagtgggagtctgtgtacttcttccaaagatcctgcctttgctctgcgcagtttcaaagtgttcactgtgaactcatattcagactctagcattttcttctgaatatcctcactggtgataaatctttggcctttgaaagtggatgtgatttttggaaaccattgccagtcttggttccaaatgacttgtggccaagattgattatgctgtttttggaccaaaatgcaataggactataaaataatgactagttgttttgcatgagttgggaactgactagaagggaattccccacccccctgacccccgcctcaccaaagtttcaagaaaatatttcaagtcttagtgaataaagacagggccttccatggtgacttctttgaaggggatgatgaccatatgacgtccactccggtgtatttgtctatcaaacaacaagacagagggtgtatttttttctgcttttaaatttgtaggacgggtcttgttgtattgcccagactggtgtcgatctcctggcctcaagcgatcctcccacctcagcctcccaaagtcctgagatgataggtgtgagccgccatgcctggcttgctgcattttctttttaatccttgctgtgcattagatgtggcaccaagccagctgatgctagataaagggccagggtcgtttatgagttagtgtttagtgaagacctacttcagagcgcagcagcagcaggcattgcccttttaaaactcctgctgcaggtcagcagcagctgtgtctgggagctcatggccaggacagaggaaagccatcctgagtgcttcgtcacccattcccttgcctgtggcccgctattggctggcagctctggacaggccattctgcattgatatgagacccccacctcaatgccacacactgcaaccacaccaccccttcctctgctgcccgtatccagcgcagacttcccggacctccagcccctaccatgtacagaatttgaggcatctacactgacagccctttctttccctgtcctgcccacaggaaaatcaacacattttcttcactaataaagtgaagattcaaatgacaggaaccttaaatctcattttaaagtgatgaatacaaaatgcatttgaaggctaaagtttagggtgctccaaatagcttaaaagatttgatgctggctgggaagaagtctggaagtgtttctttcagggagcaaagaaaagccataccatgggacataagcccctctttggaaggcctcttccaaagcctatagtttgcccccagaaagtgatgttttggttcagatgccatcagatgtgtgggattggcaagacatgggaaacagagtgcagctcacagatacgcgcgtgagcccggcaggcctggccaaggggagataggaactgggagatgtagggcacctgctgatggcagacagtgggctgtgctgggaggcttgcacctggctggataaagtgctgaaggagcgtgttcttgcacgtgttcatgcacccatggtcagaggccacaaggctgttccgggacccattcattagaatagagtcctcaagtcctaaagtacagtgtcatcttcgatgaaaaatggtttctgtggtccaagtgagaggacccctgagtcagatcagcatcgagtcattgcagaaatccacagggatcctcgggcagccctgcctccatcttcccagtctgagagatggggcaaagtgctgcttctcaagggttttgaggattaatgagctgacatttgaaaactgcttgggagacgaattggaagtgctaagtattactatttcatgtggaagtctgaaaataactgcaccgaagtgttctgataaataactaaattgagctagtgagggggaaatttcagccgtctagagagtgtttctcttaaatattttttctctcaagtggaaaggagtgagggggagagtgaggaagaatttatccagggagaatttgtgtgcgttatgccgcccacaaatggaagaatattgagtcggcctcaccagtctggcgtcatcttggttgcttgctttttgttttgttttgtttttgagacagagtttcactcttgtcgcccaggctggagtgcaatggtgtgatcttggctcactgcaacctccgcctcccgggttcaagtgactctcctgcctcagcctcctgagtagctgggattacacacatctgccaccatgcccggctaatttttgtatttttagtagagatggtgtttcaccatgttggccaggctggtctcgaacacctgacctcaggtgatgcacccacctcggcctcccaaagtgctgggattacaggcgtgagccaccatgcccagctggttgcttgctttttgctccttcttcaactccaaacccaaggcattgccaagcaaatgcagtccccccatgattaattcagttgtctctaccacatgacaccttcacaaggtcttttctgctttttcaaaactttcccatcctttacgattagtgtcattcctgaagatttttggccaaatggcagtttctccattccttctgttgtagcacctgattgtgccacaatcagtcactgcatttgcccattggtttaaatgtctgtttcagcttgcctcttcacctggggcatgggaggcagaaagggtgcatttttcatgtgtgctgggcctgccacgtatttgttgtcagtttgttcttaattgcgctgtttgtcacaccaccgttctgccccacgaggtttccccatctactccttcctctgtcttggtcccataggactttcagccttttgtgtggctgggttttctgcaggcctctttgggggctggtatggatggccttgggtggggagggtgcctgggcccctgaggccctcttgatgaggtgggatgttgtgaatggtggccccatccccagggagccctctcgtttcttcctaccctgatattttataacaagatgctcataagcctttggttccactggcgtgagctcctaaataatgttgcactcctcttgtttttttttttgtttgtttgtttgttttgtcttttgtttttctggagacagagttttgctcttgtcgcccaagctggagtgcaatggcacgatctcggctcactgcaacctccgcctcccgggttcaagtgattctcctgcctcagcctcccaagtagctgggattacaggtgtgtgccaccacgcccggctaatttctgtattattagtagagacagggtttcaccatgttggccaggctggtctcaaactcctgacctcaggtgatccacccacctctgcctcccaaagtgctgggattacaggcgtgagccaccacacccggcctcctcttggttttaaaagccatgcgagttctaaagtctgctggagctggccaaggcagaacactcatctggaaacaccttttagaaaataggcttatggcacatttttgtgtttctctggctttagtccatggcacataaactggggttgggagcaggcatttaaatccccagggctagctcttgtcctgtctctgcctcgctgtatcccgctctctggaggtgggagggagctgtgcctgccatgcatccaccaagcagatgcttctgtccctggaatcccagctttgcttggtgatcagaaactccaggggtatcagtcagtcttgaccctttggaggaggtcaccaccacatccaggcagggacagcgatttatgcttttccactgatacctgttctagaaccagagggggtcagccagcatggtgcactgagtccccagagcagggtcccaggtgcagcctgaaggatggaaaagacatgggccctgccctcagggagcggatgctctggcaggaacttaccatggtcatgcagacgtcagggtggaacaaaggaaggcgcattaataaaccgcaaatgtgaagtgagtagaataaaaggtagagtggcgacccacccgctcaaatatattgagtagcctctccttccccttaccgccacccaccccacacttacccagagacacagagaaggttcattaagctggaatagtcatctttccttcctgcgtgccttgagactggggctcctcggctttcgagaccatctgggctcaagtcctgctggctcagaacgcctctcatttgctcctggagcggggtgttgccctggggaggcaggtttctctcgtgcgtacggatgttgtttcccggggttgatgcagcgtactaaccccagctctgcctctggcctgctgtgtcaccgtgcacagcagggttgattaagcccctgaccccttgacctcagttggcactgttggatgtcccccaggctatttggcaatggggtattggtttcagcagagactgaaggtggtctctctgacatcattttgttcccccaggtttctttctgaaaagccagaacctcaccttcagggtggaggcccagccattccgcagctcacacaggccaggcccacacagacagctgtgctttctgcagtttccctgccctgctcccgtggcttacattccactccagacacacacacctgctgctccattaccaggtccctggtgcccctttgcttagaaaccacctcctgccatttttgtgatgaaccgtctcccccagctaagttagtgtcatttttaccctgagtattcagagcccttgagtgcatgaatgaatgactaaaaactgggccttgacagagtgcctgtatgtgcgctgcatggggcctgcacagcctagagcacttatcacgtatcctgcactgatggcgcctctgtccccatgaactcaaggacaggaatcaagtcttcctcatttaaaaagtctttgggcctaatatggtaaatatgagttgattaattttttttttcaaatgaatgaatggattctaaaggtagcaccactgcctctgacaaacttctttttaagttaagggctgcccatttgctgaacagaaggagctcattcagcccagttgttagggcattaagtgggcttagggtaatagctctgaagctgctgtcacctgttgccatctggccagagtagcctcctcaggtaagggctgaatctctttgctatgcaggatgacacagggggtcctcactggaatagaggttggcctcagtgagttaatttcctcgttgaacagaactcagaggccgcagagtcttagttaagacttggctgtaaatcacagaaaccatctcatgtcggcacaagcctgtctgtccctctctgttgcctggttttccatgcttctgcagccttgtggcaggacacggctgcctcccatgtgggcagcatgggctggacagatagatgttagagaaagtggccattgtgtctcatcctgggtactccttgctcaggtgaagccagccttgccactaattttaacttcacttagcatcaacatcctaactgtagaaagagggaggtcctcagacatgaacaatactagatcttctgaccagctcgctgaggatgtaataataatggatggcagctgtttagttcttcttatgtgccagaatattgcacatgaattagcttcttcctttttttttttttttttccttctgagacagagtctcactctgtctcccaggctggagtgaagtggcatgatcttggcttactgcaacctccacctcccgggttcaagcgattctcctacctaagcctcctgagtagccggaattacaggtgcccgccaccactgctggctaatttttgtatttttagtagagatggggtttcaccgtgttggttaggctggtctcaaactcctgacctctggtgatccacccacctcagcctcccaaagtgctgggattacaggcatgagccaccacgctcggctgaattagcatctcttaatgctcataacagcactatgagataggtaccaacttgaagtgaagtaacagaggcacagaaaggttgagtaatctgcccaatgtcacacagctaataaatactagagccagcatccaagcccagggagtctagctctagagtttctggcctctcccattagtctgtactggtgagctgggacctgggtctaggtgccctagcaggcactgtttgtggacacatgggtcattggcagaagaactgcaatgccttttataaatctagaattcgacagtgtcaccaagcagatgggattctgcaaaagacaggactatatgcccatgaccacatttgccatcatttgattttaaattgacagcagttagggcggaggggctccttcactgcagtccctcagggagcctcacccccctcccgggctctcaaaccctctggccagctccttgtgcttctcctgtggtgatgaagggcagtttcttgagtgccacatagttcctgagatctacagagacatcttgaccttggaaattcctatcgttcttagaaaatccctagttctggagctaaagtaggaaaaattatagagctgagtagttgaggagcagtttaattaaaaacgacaaaaaaagaaatgtaaatgaattaggcaaaaatcttcatggggcatcattattggtagaggaggaccctgagaggagattaagatttccttttatttatttttaagttccattgtaattgaacccttaggcttgagagggtaaggattcctcacacagtctgatttcaacaagaatttgtctttgttaatttatatagggaagtgtagtaaatctaccaggaacaggacgttggcccctgtactatttcaagggggtcttgagagtaatagcgcctgacagttttccagcagctaagggatttttttttctgcttcagaaagcaaaatgttgtatgagttgtgcaaaatgtagaaatgatttgaagaattagggtgcagcaaatagtacagttttcagcaaagcactgaagacttcatcaagttataaagttagcaagtggagggaagacaggggtggaccagtggggtacagcacaggtgtgctgtgggcctgtcattcttgtttaatttcctttttccctggtcccaatttgaattgccaaaatatgttagattgcagtgcattatttcatttgcctgctttgtaattcctctttacctcaaacagatgaaaacatggcactaaagcaaattgacagctcttgaaatgagaaagatctttatccttcagagtgttgatgtagaaataaatgaaagaaaaacatacttgttgggtcttgaagcagcttgaattgatacttttttttttttttttttttttaagggaagatatgggtttttccctctccgttcttttttcccccttagggtgttgtgtggctcagggattaagtaggagggttggttattctgtcaatactcatttacaaagatctgagtcatgatttgggtgtaaggagtagaccaaaaatttccaacctctcagggtcaacagaaggaatgccgagtcctcaagttgacttccttacctcaaaaaatctatcaggcaccatgggtaccccaccccaaaccacatatgggccaactgaaatgtcaggcctgcttgccttacacagagcaccccgacacaccccatcccagccacttcacgctgccaaaaagctccagtgatgatcaggatgaatattgataaatgattttccatacttcaaaagtaagtagtttggtgtatgaaagatctcaaaacatttaaggtctgtgtttcaaaaattaaatgaaagacaggcctaatggctcaaaatagaaagattggaaaccactgggtttgatgctcttttttatctgagtctattttgttttgttttgttttgagacggagtctcgctctgttgcccagactggagtgcaatggcatgatctcggctcgccgcaacctccgcctcccgggtttaagcaattctcctgcctcaacatcccgagtagctgggattacaggcgcctgtcaccatgctgggctaatttttgtattttttagtggagatggagttttgccatgttggccaggctggtcgtgaactcctgacctcaggtgatccatttgcctcggcctcccaaagtgctgggattacaggtgtgagccactgcacctggccttatctgaattcttttctttatcctccaaaatcttcctgaaactcaacagtacgcacttattggacgcttatttttgtattaatccctctagtgggcgctaggtagggaatgcagagctgtatatgaaatttcctgaggactagggagaggaagcgatgggggagtgtggaccaccaattcatgtattcatgtgacagaataagatttcagagttgtgtatgccagcgccaaatacaagaaacagataagggatagatatttctactgtatgcctaccttatttatgcctactttatccaaatcaacagaaatgagggcatagttgtttgtattataaacagatctgccatggggtttcttgaaatcatgagcccccttgtggtttctttttattattattatacatttttattttaaaatagtgtaggactcacaagaagttgtaaaaataggacaaagagctcttgtgaacccttcatccagcttcccacaatgatagtactcccataaccacagtactttgttaaagccaggaaaccagtgttggtaccttatcagttttcatgtgtatttgtgtgtaattctttaaaattgtactacctggagatttgagtaactatcactacaatcaggatatataatagaactgttccatcaccccaacaaactccttgtgtttctccttaatagttacaccctggccccactcctaactcctggcaaccactgatctgttcctcatcacaataatgttgtcgttttgagaatgtcacagaaatggagtcatacagtatgtaatacagccttgatactgactttttcacttggtatgatccctctggtcagttgtgcaccagttgtgtaccagctgtattccattgtaggaatggaatggaatggtttgtttgtccattccccctgtgtttccaaaagatggtttatttgcatgcgacccattgcatcacagtacatcaagccgggtacacttacaaagttaaacctcactcatccgtactgatttcacaactttgtagttatcaatacaaagtctgttatcccattatgcagtcctcatccaacagatatttgttgagcatctgtgcatgccggggctggaatgcattctggtaatagcatagggtagtcatttgccacaggccaaatgctttcctgcgtgttgtatcaatagtttctacttttcaatgctggggtgaaggttaacagtgatcacgtgttccttttacacacaaggaagctgagctgctttggaaagccatgcccaagatcatgcgtaagtggaaatggagtgggatttgaacccaggatgtgtgatggcatgccaagtttcttttattctgtaactgtggcttcaactgtacccgctgaattgcttacagccagtttgctcctctagaaaatgagtggactggactcatatcctttttatcctctctgccttgaagagtttatgatcctccctgaacaagaagtaactttgcccagtgactgcatctctcagcctgttgctgcacttgaagtttgttctcagcagcattttcttagccattatttgaagacagtttcggaattcaaaagtagcaaattagaattcctctaaaaacagtcggtagttcagaccttccctcattttgctaatttttgacagggtctttgggtcaggaccaggactgggaaacccatgggactctagggatgactttagggataaggggattggggagattggctgccaggcagcccaaaggggaaggagcaggaacttccttggatgtcatcaaagccccatgaagaaactctggggctgagtggtgctgagtgcgctgattcgggtgcctgatgctatacagttcgcagaattctgccttgtgccagaattgctggggatcagaggaggctgctatttcaggcatctaagtgctactgctgctgaattcaggcctgagcagcttgtccgagagggcggggcagagatgctcctccaagcttttgaagctccacgaagggttcaaaggagtcttggagaagggattcctgtactgggcgggaagtggaaaggtgacctttgggtcacttctaactcctgagtctgtgattctgaggcaaatggaacttcctctctccctcggttaccaacatgcactccaagatctggctgagttcattggaatcaaaggctggtaccttcaaagggctggtggagagaaaagggcctggggcttgggaaacctgcagctactccgtgacctctggcttatccccttgcccctcctctgttgtggccaagaaaagtggtggggctctgggacccaacagaccagagtccacctcccatcagagtggcagaaagagatggtgggggatggggaggcaccgtagtacaggggtgtcagagagcccaaaggtcattctaaacacacattttttcatctgtgctctgcaaccaactctgcgtgtttgtcagacaaaagagctttaataaatattagtttaatgaataaatgtgtcaccttggcagagctctccctctccctcagtcttcttttttcatcagccagtcttaaagagagcagggtggaagatgtctgaagccctgtcctgaaagctgatgccctcagaagttccctgcactggggcccctggcctttctgaaatgtaggcaagcccttcatcccattatcaagccatgttatttaccctccctgttttccagacagaaagaaggtgcagatggcccatgggattaaaattgggattggaaccaagattttccaagcctacaaaactcctttctcctctccccctcccctccccaggcgtatggctgcagctacgcttgtcaccatccgagactgcattggccacaggagatgtggatgatttttccatttgtcctgatgtttatttcatgcccatcaatatcagcccgtattaggacagatgaggtggctatttacaggctgtgcattttcacacttggtaattataaacccttccctggttcggtcagagtcgtggagatccattttggcaattagcagtttagtatttgtttaatgggaatgtgagagagtgttccggcacatcagtgctcccctaaatgatttgcctctctcctctggagctggcaggcttgggcctttttcatggtaggtgaggcctgatggggagaggctggagagggggagaagggagcattcagcagttcagcagcctgcctgccactcccctcccccagcacatgcacgcacgcactcacaatcagtgctgaacacgggcctggatttccagagcacagcagccgccacttgaaggagcctcacacgagaggccgttaggccagatgccatttccatgtgacagctgtcaagcctgccggatccaactgctgctcctcaaacagctctctctctcagtgtctctctccccttccctcatcgcctcctctctacaccccatctcagatatccccagtgacagcctgctgccccactctccagggtggtgcttgggcccacggctttgcaagctcagccagaatggagctcccacccagtcctacctctcaccgggagactctgccttccctggcttagtcttgagatagggcctcctgggactgctcccccaagggcacactggttctgttagtggccttcccttggcatagtccattcacaataagaaaacccacagcattgggtgtggctcccggcttaactgcatggaccatgtatgggtgtgtgcatgcaggcgaggggattgccaggatggggcagtgaattgagccagtgtctgttatgatgagcattttctgtgtggtaggcgctcactggctaccacatgagccttcctaacaactccaggaagcaagacacactgagtatccttagagtcactgcacggggcggggagactcgcatggctgagcctggactgcgttccagagccctctggcagttccagctctgctagaggcttgctccatgactatggaggagcccggtgatctcgagcttttggaattcacttatctaaaaggaagagacccaatatcctcctctttcctttacctttccaatcattcctcctctcccgagcctaccggggcaatatacctccatttccttgaggttacctaatcacctctattcactttttggtagagttttaaagcagtgtttgttggttcatccagcagacaggggcactgcacaaagctcttagggattcaaaaaacagaacacaagtaagggagaacagaagacttagggactcatctgattttaactactggctccaccatttacttacctgtgtgatcctaggcaagtcacttactgtcggtgaaccacaatttcctcacctgtaaaatgggtgtatgatgccacgtgtgtgggcacgtgcctgtaatcccaagctactcaggaggctgagtcgggaggatcgctggagcccaggagtttgataccagcctgggcagacaaatcgagaccccatccctacaaaaaataaaaaataaaaatttttaaattttaaaaagagaaaaaaaatgggtgcctgaaatgggtatgatagtatctacctccaagctattgcagtaattaaatgagctttgcaaattgcctattacgctccagtaaatggtagttattataacaatcattatttcaggaggatagacattttataacttagagtctgatacagacttgtggaatcagaatctctgagcaggaggttttgccttaggtagataaaatgtctacgtctccaggattaagttgtctgaagaccccacatctttcagttcccatgggcaggtgtccctttgttgaattcataactgctatctgataaacattgtgcgttttttcttgtaagctaaatgggaaaatagaatgatcccacaagaataaaagaagtaaatgtaggaaaaaattaagggctgtaaaggtcttgctaatggggacaaaatactctggccattgtaaggtgtgggagccttctgtgaagagttcgagaaatgttcttaatgccactgaactgtagaccccaaaaatggttaaaatgataaattttattttatatattttttgccacaattaagaacaatttttttcatttaggagatattttattttatttttgaggcagtcttgctctgtcgcccaggctggagtgcagtaccatgatctcagctcactgcagcctccgcctcctgggttcaagcaattctcctgcctcagcctccagagtagctgggattacagttgtgcaccacgacacccaactaaattttttttttttcttgtatttttagtagagatggagtttcaccatgttagccaggctggtcttgaactcgggacctcaagtgatctgcccacctcggcctcccaaagtgctggaattacagacgtgagccactgcccccagccctagttgaggagaaattatgtagactttttctcttgttagtcagtaaaggcctgggttcaaattaaaataaacaggctttcagatggatgcaaactagcattttttgacatttggaatgaaggaaaaacgtgcctggcagcagcagctgggatagaaactccaagcgcaccttcatcactgcagtcttccaggggtaaacacacagggacagaaaggctggctgtagcaggaggaggccaagaacctgagatgggcaggaaggcagcggctggcaggctgaggcttggactcaaaagcccagcatctgaaccccaggcccagcccctgccggctctaggacaaaccagtaggaaaactgagtctcagagaatttgtaatactccctttctcgtggggttattgtgaccacgaaagtagtaataatacctgtgaaaatattggtggtgatgggaaaaaaaacaatggttttgttaggttttcttaaagccctctgttcatttttggctcttccgagctgcttctcatatagaactttggctttcttgtactaagactgagttaagcttaaggagagccctaagaaagtaggatgaggcaaggagtgcctgctcctgacttctggcagggaatgaacttctaatctttaggcagcagaaggcccattaatactcatttacttagggcctgtctacacacacatatgctgtgttacggctcaactcagctctatttagccatttagaacggtgggtctcggccttggctgtaccctggatcactggggagctttaaaaaatcctctttcgggctgcccactccagagtactgatttaataggttggggtgtggccttggtgagcagtcacggctgaaaaatcactgatgtagatttcagaatgaaccaatgggattttccagtctgctccttcttctccgtccttcctctttggagaatggttaaagacagaccaaccccacccttttcaaggccagagcacacggaaaagtcttatttcaataaactacacattattcctgagctttacggaaggaaccgatttgggttttgcctaagctggcagggagagaggtggagacagtgccttcccatgttctgcgtaatcctggacccaggcagcggctgtctccaccacaggccccaggcacctgtggcctgggcagtcctgccacctcagccgagtctcactcttgtggccttagctccttgagtttacagagcataatgcctgttaagcctgacacactatagtatcatggtattgcatttgagggtgtttatttatactaacacttggagcgtttgagtgggagcaggaagagaaattcaagggcatttgttctgggggagtttggagagctgggtttcttctcttccctttcccctccctccttgcatttgaccagataatttaaggatcatctgaagtgccgtttcctgctttgttcttgatatgtgtggcttgcgggtgtgtatatttatatccccagaggagtaggacatttctcagggcatgcatcggccacagcaaagctctggagcagcctcacagcacagagagtttgcaaaagcccagtggccaagtcaatgcttccagagcatcgtcccagctgcctctggagtccatgttagcattccaggcagagagtctttatgcatggatcttaggggccatctcatagaatttcctcctttcacagaagaaaaactgaggatagaggagggaggtgactggtcctcagtgagatcctggtggggctgggattagaacctggactccctccatgcttggtgcggcactccccaccacacccagctgcctcccaacacctgctgagttacgtaccagcaacactgctctttagctgtctcctgggaacaagttttttgtgtcctcagatcagttcagcttcactcacctactatgtatttggggagccaaaactgtaaaaccttcagcagaagaggcagtggtccaggggacatactgtaggttcccacccattagccagctaactggacaatagcatttttgacctccctccatgtacctttgcattgtgtcctttttttttttttttgaggtggagtctcactctgtcatccaggctggagtgcaatggcgtaatctcagctcactgcaacctccacctcccaggttcaagcaattctcctgcctcagcctcccgcgcagctgggattacaagcacacaccacaacgcccacctaattttttgtatttttagtagagacgggatttcactatgttggccaggctggtctcgaactcctgacctcagtgacctgcccacctctgcctcccaaagtgttgggattacaggcgtgagccaccacgcccggcctgcattgcgtctttaaagttttcctattcagccagcacgtgagctgggctgtctcaagtctaacccctggatgtggtcagtaccatctggctacttctaaaatcacccagcaagaatgcctggctcacaataaatcttttgactcattagaaagagggttcactcattcactaaatgaattaggattagagaggcatcacccactgacttgagtggtaattattgctgattttcacggtgctcatttagtgaggaacatgttgccagtttctcttggcgcttctaggatctctgtctccaaccttgctgatggggtgagatttagaagaggtccgtccacaccttaatgcctgtgttccatgtggaatgttccatgaagagcgtgctccatgtggaatgtggaacctgatagtttaattctctgccacatttagcactttcccttattctgccccttttctttcctttgctttctagtattattttagactgtctatcttctgattacaagctttctttgttgttttgggggatttttttagaatgaggaccacgtatgagttacctatggccacaagaatgctgtgtaactaaccccaaaacttcaggggcaggcagtaactgtttatctcacgtgtttggagtaaacttggagtggttctgctgatcctggctggcctcacttgcatgctttgagggtgactggctgtccacccatctaggctggcctcggcacagggaagttggccctgctccatgtgccacccatcctgcatcaggctagcctgggcatgcccttgtcatggtgatggcagaggtgcaagagagaacaagcaggaacttgcaaatcctcttaaggctaggcccaaaacaggcatactcttccccccaccgcattttattagccctaacaaattaagcccagattcaagggatgaaagtagactccacctctttgggggagaaggaccgcaaactcacagaggaacgggtgtgagaccattcatatcatcagtccaccatagacctgtgtgagttgtcttttatttgtacttaggctgatgttttgcaaatagcgaatgcctcatacatgcatgttgcataaaagtaaataaagttaccatttgctaagttttctattcaagattggattggctgcataatctagacatgagtttatctgttagatagatctagacatgagtttatctgtgaataagagtttatctgttagaaggaaagtttatgtcatcctagtagaatctggatttttctttcatcgggtgcagggcaagttggttgccactaagaaatccctcttcttatcatcttttccatcgtggggtctaccatcatcatttttaggattttagaatataaacatctgagagaaggggaacaaagagagggagaacttgccacactgaagtgtggaacttgctcctagatgggaaattttgtttcatgtattgaccactgagtgtatgttaaagaggaagaagcaacctctgcccagtgtctttaacctttgctcttgcttcttacccttagagtagctcatggaaagaggggtctctgggccagcagctgcatcagcatcacctgggagcttgttagaaatgcaaatactactgaatcagtcactctggctctgaggcccccgggagatctgtggcttaacagtccctctgatgatgattctgatgtggatgatatttgagaatccctgccccaactccagcagccatagaaactaacagattaggtcccctttgttgactctcacatacttctgaggatattacagcatagtctgaaccgtgcagtagtcagaaatatgttcaataccttctggtgtcaggacaaagacagaggcatcccattccccaccagcttacctaaatgttactttactttgcttttttggggggggcaggtgggggaggttgtgttttgagacagggtctcgctctgtagctcaggctggagtgcagtggtgcagtcatggttcactacagcctcaacctcccaggctcaagcaatcttaccatctcagccatctgagtagttggaaccactggtgtgtgccacaatgcctggctaagtttttagtatttttttgtagagatgaggtcttgctatgttgcccaggctggtctcaaactcctggcctcaagcgattttcccacctcagcctcctaaagtgctgggattactagacatgagccagcatatccggcctattttgctttttcattcacaaagatacaccactaaagatgtcagggccatatctcaaacctgccccaagttattacaaggtacatctcaaggttggaataagctccttttcccaaaacagaccagggttctgccaggacatgggacaaatcatgctgaggatcagacacctcttgtccttctgtctccctcaggggagccactaggcctgcaggtgcccatttcaggtacaaagaattttgtaaggcaggtgagcgcgttgtcaacatgaagtaagtaccagagttaatcataaggatgagggtggtgtccctagaaggggtatttcataaggggttagagaaactcctgttcctggccgggcacagtggctcacacctgtaatcccagcactttgggaggccaaggtaggtggatcacaaggtcaggagttcaagaccagcctgaccaatgtggtgaaaccccgtctctactaaaaatacaaaaattagccaggcatggtggtgcatgcctgtaatcccagctactcaggaggctgaggcaggagaatcacttgaacccaggaggcgggggtagcagtgagccaagatcatgccattgcactccagcctgggtgacagaatgagactgtctcaaaggaaaaaaaagaaaaaagaaaaactcctgttcccagcttcccctaagcttttgggctctcctagcatcttgaatgaggcctggcctgtgtgttcatgttgatgagtcttcatagccccctgatatacctgggtgtgtgtgtgtgtgtgtgtgtgtgtgtgtgtgtgtgtgtgtgtgtgtgtgtgacagagagagagagagagagacaaagacagagaccgagagagttatcagctggctggctccaggattgaataccagttaccttaactgtgccccttattttcccttgactcacacaagccgcttctgtttgattcacatagaaccgtgagaaacagtctcgtatgtgagactgtgtttttcattctattcagtctttgtatattcaaattcttctagtttcagctcttgctgttctgccagatttccatcgcattgatggcttctctgaattaataagtattttgcaattgctgaaaagttttctacccccaagcactgggacttatccatattgatttttctcccgtttctctttcctctctagctccttcttagatgttgtattttgtaacgtgttaatagaatttttctttcgtcctgacactttatctattcaggaggtctttgcgagccccattgtacagccggactacagaggaaagagctgtattctttatgacaatggttgccctaaaaacatatacagatcctcccccacgctcaccagggtggagcgaatgttgagagggcgctattagaaaacgtccaaacttaggaaggaaaaggagagccaattatgcactgttgaaaggaggttttgaaaatacgttttaaaaaaaatccaaaacatttatttcctaagggaatctgagtcccagtaccaaaacatggccagcacagaagggcagctgttttccttactgttaggcattttcagttcaaaataaggatttggcaaaagtcttagaaaatatggagatgggtgcaaaacagatgtcacatttacctgcgtgatacctggcaggactcatcccccacccacccacccacaccccaggcattcgaattcctattgagtcccagggtctgagtctgagatatgctcatatcaccatatgctcgagtgtgactgctctgtgtacaaacacaccagttgatcttatggtgattttgcctgtgtggtgcacgggaggtggaacggctgttgtgtgtgtggccccagcaggttaccgtcggcgggggctcttgaagcctgcccaaaaggagtttgtcctgcctgggatgggcatggggatctccaaactagcattgcccactcccatcatcctggtgcctgggagagagggggcagctgcctgctggaggagccaccatgccaggccattttcctcccagtaactgacttcagaaatggggagcagaaggggaaggccccaggagcctgtttgttcaggcttggttgcttagcaacaaaagggggccctgacttgagaagagatttttaagccaggccagtccctttgaggtttatgaccggcttgcctacccccatcttccattcttaccttgactttgctcttccccctattacatttgatcgcatctagaaaaatacgtttgatttgtctgcaggcaccattttaaaccttggtttattgctttgcccagcgtcttcccctccattggagattgtagtctgggaggagtgaggcatgaatagcccacgattccttttctcaaagggattagcgccagcccccaagctcatttgtgagcctttgagtgcacatcaacggtgctcagtccttcttagccacaggcacacagtgaaattgctctgaggacagggccccccgctaacagttttaccccccctacagccacacggactgggttgtatttttaccatcaaccttgagcacaaagtaaatgaagagagtaggctgcacactggtcagaccaggtgccctcccccggtgcgtagctgaagggtgaggacaaacacctgtgctaaagatgtgtgctctgtgggataaaggagtgggtcataaatactcataaaaggagtgcattccagagcggaatctggttcattaagtgtgagttccttgagctctacgtgggagttgagtgtggaccctgaaatcttattgccagaaacatgcagaaggggttacaggatgcgtgggaggggtctggaagggattagcaagagagacagaggacgcctttgctattttattatgttcttctctttgatgtttttaaaaaggtcctagcatcagtgtatttgtttgctagtactgccataataaagtaacgcagattggagggctaaaacaacagaaatgtattttctcacaattctggaggctagaagttcaagatcaaggtgtggcagggttggtttcttctgaggcctctctccttggcttgcagtcttctccctgtgttggcacatggtcttccctgtttgtgtttgtgtcctaatctcttctgataaggacaccagtcatattggattagggcccaccctaatgatctcattttaaattaattacttctttgaagaacctctctccaaatacggtcacattttgaggtcctgggggttaggacttcaactatgaattttgggagacacagttgagcccataacaatcaggatgttcaagcttcactgtttatcactaaaaacaattcacatgtctattagaagggcaataattaagtaagctatggcttcttacactgggaaatatgcatcggtcaagatagtagtatacatgatatactaacctggaaattgtttgccatattgtaatgttacaggttaacaaaaggacaaattccatatactatatgatttaaactatattgaaatagtcatagttttttctttctttagaaaaaaaatactccaggcctggagcagtggctcacacctataatctcagcgctttgaaaggctgctgcaggaggatcacttgagcccaggagttcaagaccagtctgagcaacatagtgggaccctgtctctaaaaaaataaaataaaataactgggcatgatggtacatgcctgtagtcccagctactcaggaagctgaggcaggaggattgcttgagctcaggaggtcgagactgcagtgagccgtgatggtgccactgcactctagcctgggtgacagagtgagaccctgtctcaaaaaataaaaagcagacactaaagggaactatataaaatgttaactgtatacaacggtgtggagtggaaagaccactgtttttttttctttctacttttttgcattttcaaatattttttgataagcaactattacttctgtaatggaaactaccccctcaccccccgacatgcatataatgttttgtgtactttcttaaaattcctaaggcagcctgtattctatatttgttttgcaggtggaagatgcaatgctgatgtttgataaaactaccaacaggcacagaggtaagattaccccagtgtaagagggttgcgttcaccctctcctggcctctctgtctgtcatccccagtcccactgacaaaagatacagtgaagagtccagagtcaagcaggtagaggtgaccatccattgaagatctttattcacggagagtcccagtagcacaaagagttccagtactggatagctgaaaaaccatttccttctggcctaggaactcctgtttagttatgcagccatccctgacacacatattcagatgtacctctctaatcctgcctttctgggtcccttgctaacctcggcactaagcgatccaagtggaaattattcacagcagtgactcaattgagttatcaatttgtattgaaggaggttctttaggagcagactgtcaatctaaagagccaaaaaatcaaaataaaacattgtaggttcgttgggtgtgtagtgattacagccttgggaatgctccgtggggcctctggaatgtgtagagggcatctgtacttaattgtgtttttccctgtgctgcttctgtcccatccactttacaaaaaatgggtcttaacctggagtctatgaacctctgcaatgacatgcaaaatgtcatatgtttatacttttcttgggtgaagatccctaggtttggacaaattctcaaaagggtctctggccctgcccttagtctcttccttccccaaaaagaacacattaaatttattgctttaaacagaaaaattggaggcatctagaaaagtcctccctggaggtagcagagtcaaaggaggtgatgacttagtgttctgttctccggaagctcaggtttctggggttcctattaacagggtgttaatgagcagagcttcctaagggggtggcaggaaatggtgtgctggtgccctcaagggagggagcctgtgagtgagcagcatttccttgccacttggatcgcatttagatgtttcctgtgttgtttacattcctgctgtcacctgtgattagaaacagttacccagcactgactgtatgtctttcctgtttggagaaggcagagtgagtgaaaggcaagaaggagtggagtgggaatcattgctggcggggctgggagaaggagggggatatcctgagtgcgtctggtaatctggcttcaaatgcatccctctacagcatcctcagaatgggagaatggagcattgggtgcacaacagtggtgtcaagtggtatttatggagggaagagatggcagggggtggagggtggggagcagtggagaagcagggagagaaaggaggggcatgcaggtgtggaatgatcgattttgtccactgcattgctggggagtgagagcccagtgagtgagatgaaggtggtgcccgtggtgggcaattgaggattatcctccatcatcatccacattctgtcaatctagctttatggtttccaagccggacttccagatgcatctcctaatgtgaccttcacagcagcccctggagggttgttgtgacattgggaaaaatcacttaacttctttatgcctcagtttattcatctgtaggatgggggtaatcatagaacctcctcacaggattgctcggagagtgtaatgccaagcatctagtcaattgtgcgtaaatgttagctcttattattagcgttatcatcacctccgtccggttggaaaaataaccaaggctcagaggaggcaactgagagacccatggctgagcagggtctcaggactattgatttcaaattctgctgtttctctgctgtgtccagatgggaatgcatttgttaaaaagagcactgccagctatttattttcagggtgggtgatgcccatttgagtttggcacctggtgttcagtgttagaattcatagtcctgggagattccagagttgcccccaggtgatactgttgtccttttattttgaaaatcagtgaaagtattttttgatctgctgtgtgtcaagccctgtgctgggggctcacactggtatcgtctcattaactctcagagccgggcagggagagggctggtcatggcagaggtggggttgaaacaccggactttggacttctgggtgaaggcccagaggatgtgccgggaaaagtcctctcttatttttaaccagatccctgttgctgtgggtgaagcctcttccctttttccaaaagggagaaaggaaagtgctgggccgcagagatggggtggcggttcgtctgggacgggcgtgggaagagttttttgcccgttgtgaggtggaggatggtctgttggaaggcccgctgctcagaatggcttcgggacatcattgctggctctccaggagtcctggtgggcactggcaggaaggagcgtgggcagggccttggtgcatgcacactcctgcccccagccaagccagaacctctgctagcaccctcggacctgccagagctgaagatgcctgcagtgggggcaggaccaactctaaaatgtgtggagcccagaactagaggaaaggcagggcctcctattcaaagatgattgagaagctggcctgaggggctgcagcctgtggagggcagagacatgccaggaagcctcagcagggaagagccgccatcccactgccctccctctcatccagggccctcccactctgcaatgtcgtttctgtgtgggtgggagcagcggcccatacacacgttccaacccctcaagataccggaggaggcatttctctttgaactgggtgctaaagttggtgtaatacttcactgcatttagaacattgaagagagtgaaaaaaaatttttgtttttcaaaaagaagaacatatcacagcagaggcacagatcatatatatggagcgagccggccccacatctgtggcctgatggagtgcacatttggagtcaggtgataagcacaaggaagtaaaatcctcatgcagccaccttgccccaaacttaccttcacctcctcggttcctgctgtccatgatcttatcaagaggaaagtgctgcagtggcagaagttgaggacatctccctggctggcgccgcctccagctctcttcttaaagaggcccagaccatcgacccagaggtgttgtcacagcacatgctcagcacttgtcctcagactcctagcccagccctgtggggcagcctggggcctcaactcatccttaccccaggaattttgacagctacctgtgtgtccttggagctgtgtgacatgagctgtgtgacatttgctgctcggggataaccacagggaactgggcttaacatctgatgagcgtcaggtgggccaggctcccagggcccattcagtctccacttgctgttaggagccacaggtcagggcagaatttccactccttgaccccactggtcacctcctgtccctgctccctgttggtctctgttggggcagggatgccctcagttccatctgcatggcggcagcttgtatctcccatccacaggagcaccagcctggggctcactagtgccatgggagagaacccaggacctaggagagaatgagcctcccgcaatgtatgtcttccaccctgcaagcaggaagagggtcccacgttcagtctttgactcacagtgggtggagccctggagatgtgggggctctcacctttctccttgcagatgggccttcctccagcttctgctgctcccatgacatttttcctgggggcacattccctgacctctgagcatctcaggttcttcctctaaaaaataagagacctgggattgatgagccccaggacctgaagtatgtttctggcctttagctttttaactgtgagaatgttcaagatgaattcctttgctgtttttgtgactaggggagggaatgggcagttgttgcaggttgggttccctgggaagcaactctaggaagggattagcaagtgggaggtttatccagaagtgctcttgatcaggagagggcagagggagaagctgacttgcgatgcccttctgtaatggggtggttcttcaggggtccccagctggggtgggagtgccatccttgatgcctgcacgctggcctgtcattgggtgcagcccaccctgtgaggctgatgtgacctgggcttcccctggggaaatcctggaggggacttccagctggggactatcttccagcagcactcccagccactgggaaggaggtccttcattcctgaaggggatctaagcatcctgacacagcacccactgtgatggtgtgtggagttctgttgctgtctaagcaggccatgttagcaatcttgatagaaacagccaacactttctgagcacttacaacaccaagtgcttagcacagtgctggcacctaccattgaaccttgatgacagacagccataggtgaaccgagctgcccagagtctcacactggtgaaagcagagctgggacgtaaacccagcctgtctgacctggagctcaggctcttacactctgcaagcattgtgcaaggtaactggttaaagcggaggagctggtcattttaagggtttggtatttcctcattttctgtccttctccacaacagccttcttgctggatgaccgtgctcctccatttccacttggagaaattaaggcacataagtttggaatattgcatagcagattcctgcagccagacaaggagcagagctgttgttaaaacctggatgccagtcggcacgatggctcacacctgtaatcccagcactttgggaggccgaggcgggtggatcaccagaggtcaggagttcaagaccagcctggccaacatggtgataccctgtctctactaaaaatacaaaaattagccgggtgtggtggtgggtgcctcctgaaatcccagccacccgggaggctgaggcaggagaatcgcttgaacccaggaggcggaggttgcagtgagccgagatggcgccattgcactccagcctgggcaacaagagtgaaactccgtctcacaaaaatataaaacaaaaacctggatgcctcccttggccctgtccctcacttcatttcctggccttccatacgatgatttgtgcccagggggagcggagaatggtggctttccaatcttctcagagtcacttcatttgctgtctaaaagttgttagagatggtctggaaaacactgggctgatcgtcaatggatttaatcattaggagggggaagtttgttgctttatccttgtaaaagtcagataagatctgggacttggcattaagtattgatcccaagtggggctggaggggagggacagggagggaagaggcaacaaggtgctgtccttccagtttgctctgttgttggcaggaggccggggagtagacagccagcgggagggaggaagggtgcactggccagctctctctccagtgtccccacaacctcagccctgatggagaaagtggaatgcgggcatgttgcttgctgaaataatctcacactcacctccttatgggggaagggaaccctccccattgtgagggtcactgtagaggatcctcagctgtccttccctccaatttcagagccctgggttcctgagccctgcacagctgggttcctccagggaagatctggatggttgaggcctagttgaaaggaggtgaggagtctctgaagctaatcccatagcctggtgagggagtggtttctggcagaggacatccctgtggccttcattacccagcaggcctgcttgccctggaacattgccagaggcaaaggaacaggagacacggggagagaaataaagattagtgtgatggatgactcttctgccagcagttagcagttgcttattaaatgcaatgctaatggctttggagaggaataacagccctgagacccactggaagggggtgggatggttttgtgagccccagcgagcaccatcagtggcaggcctcttgaactaagagggtcctttcccagagtggctgtggtttatcccagttcctgggctggaaaggtgcagtggttggggatccagccagagggaggagcatccaggcaggtggccggagagcttgggttcttcctggagcttgctcagtctctgtcccgaaaagcagctggccaaagtttaaggtctttgtaatttgcgtaatcggtttatttattaaaatggtgccagtaagatgtaacttaagctgtgatagaagataatgcttttctaaggaggaagaacagcccttaatgttttgaatacctgccagacactcacttttgaaattgacctctgaagtccagattgactcttttatgtacgatgtataaagatgcctaagaattgcactgtcattatttgtttattggtgtctattactcaaaaaaaaaaagagggcatagaaaaaagtttcacaaaggtgtaggttacattttaaaataatttaaagcattgcttcacttgtaggtgtgggatgtcagacataatgtatgcatgtccttcctaatgagagtctaacattctgactttatttacctagggaagaacgttgggactgtataagctgtacatgtgactttgtaggatggaggaataagtgtatttgacaaaaacgatcagaccctctggccagaaagggcacagtccaagaagaagggttgttggagggagtagaaagtatgataaggatgtgtagaatcacagctggtgatgacacttttgctgatgtgacaggagggcagcctgcaaaagattggctcccacgctgccctcgtttggggtctggagcaggatttgctgcctgtcttccctgctggcattttaccggtagtattttccccacctctcaaatctgctcttatcttttcactaattgttgatggtgttaagtatccatcaaatcctctcccaagtctgagatgtgttaaggggtttattggaagcctgtaaaccaacagttggtcactattggtattgatcctaattctgcaccaggattagaaaccacttgacaagaaagcggacagtctgtcatagaccaccaccaacagccagggttcctggcctcccagagctttcagtttagtccgtagtgtgatgtaacatgccagctgggttctcttaggtaagttcagggtcctagatggggttaggtgaaaatccagttctctttccagagtggaccattgttgggtggcagagggtggggcggtgggcaactgtttaagaaagacattgaccaacaggaatctgggagagaatggtgagaatggggtagaaactcaatatgattgagtccaagaggtcttgaggggagtggagagctgtgatgtggtcattcattgcagcctttgggtacttgaagagtttccattggaaaagagttctgtgtagcctcaatgttgggcacacttgagttagaacaaggaagaatcgcctagtccaacagtggcaataagaggacagccattgcccctctgccagattctcagaacccaaggttctgtgcctccagtgggctcattctaaagctgggactgtgtgagggggtgggcatgctgcgtgcccaccgtgaggggcacacccgcctcttcactgccttgcagggctgtatccccaggccctgtaaccttgcagcgatggagggcaaaggagggggtgggataaagagtcagcccaccctttgccatctttcagagaccagccccggagctgtctgcacattttattttctcgttaaataaacaccattagccttcctgagaaattggtgcaaacatgacctcgcaaataaccaattaaaagggtagggttgaaggggaatgtgaatttgaaaacatgtagaggaggccattaaggattcctgtagaatctggcaacatcgatccaagaccttaattttatttctgacaggaaagcaaggagtgtgctttcatttttttcccccgagttaactcaattccggaagcgcccattccggcgctgtctcttgagatattaatcaacacagtagcttggtttctgttcacctgctcttctttggagacacggagtaatacaaagccctcaacttcctagcaacagggctgggggacagggtgcccggggcaagagggagcttgcaaagccagggggagtttggtacccaggatgagctgcacttttttagccaaaatacaaatcttaaacttctttcctttggaataaaagccctggcaccaaaagggtggtgacctaataggtcttcctgcctccccctgctgtggcccacggaagcagaaagggagtgggctcagggtcagcaacttcactgacccagaagtggtttttttgtagagagggacaatgaatcttttgtttggtcctgttcccatagaggcccaggctctgactctcacaacatggtttaagatctcggtgagggcagagtgtggagatctgaagagaaaggagcttttagcatggcagcttgattaaaagcaccccctttcttagcatcacggcactgccagtggccggagagggctgggccaggggtcgccgcaagccctgggtggctgcctccccgttgggacttaaggttcctagaggggtcccggttattatgcacctctggacttcagcctctgttttcagtttgtggatcagagggtgtacgctatcccatctgtatctgtatatcagcatggtatgctgcaaagagcttgagttttagagttggtcatactcggtttcagatcccagctttcccttgggcgtgatctcaggcaagttacaagatgttttactcccttgtgaaggtaacacacccgctctgtaagagttaaatgattccgcttgcgaggtgcccactccccactccccgcaagtggagagtgcggggcagcctggtttcttcccccttcctccttaagtgaaaccacctgcttaacttctttaggcaaacaaactaaaatctgtgtttgagttttggggaccctagtcttgaaaaataaaaccctttcgtggttgttttttcctctgctttgcacacacacatatgcttgcatgtgcatggaatatctttgaaaggatgcctgcaaaatcggtaacaaggagttagaactgcatattggttaagatcacatgctctgaagtgagacaaatctaagctctgggacttaatagctgtgtgaccttgggcaacttacttatcttctctgcaactcagattccttatctgtaaaataggacattgggttagcctgaagcttacgtcatttaatgagtataaagggtttggaacagtctctgcccatactaaacactcaaatatgttttatgcacacgtgcatatcatatgcagatgtacatacattaaaaacatacatacataaaaaagtgtttgctccttttttatggggaagagaattaagcaacctgagatacagagacggagggaatctttttattatatactcatttactttttgaattttttttttttttttgagacggagtctggctctgttgcccaggctggagtgcagtggcgcaatcttggctcgctgcaatactttttgaatttttgtaccttatgcacttattacctattcatttacttctttagtgtgagcttttaaaatttattccaatttgaattgtcaatgcagtgatagaacaacgtgaaagagactttttgaaagaaagaaaatttaccagccgggcacagtggctcacggctgtaatcccagcactttcggaggccaaggtgggcagatcacttgaggtcaggagttcaagaccagcctagccaacagggtgaaaccccatctctactgaaaatacaaaaattagccaggaacggtggcacgtgcctgtaatcccagctactcaggaggctgaggcaggaaaattgcttgaacctggagacagaggttgctttttgtttccataaacagatgatctgatggatagatgaggattttcttagtagtttctgctcttcccagacaacgtgctattattagaatagccagactggccctggtctgaaaagaagcctggtttgcgccagttcatccaagaccagaggggaggagggccagaacagggaggtcctccatcccaggagctcaaagtgcttcgtaattcaagtttaaaaaaagttaaaagcatttttctaccccaagttatgactagtaaacacgtggggaccttacacagcgtggcaaatgcagaatcttcctctgcattcccattgtttatggcttaggagtcaaggcaacacccggttaatgatgcttgtgaagtgtctgggccatgtggcaaagggataagagcttaggtccagattcccactgcaggactcactttccagagcaaccactaatcaattgctgtgtgaccctggacaagttactaaatctctctgaacctcagttttctcatctattaaatggtgttaatgttattaactcatggacttgggaagtttaagtgagatagtttatctgtgtgaaacatctgatgcttggaaggctatctgtaaatgttaactttgtcattatcatattaattattgttattttactactaagaatactgtgactgtcattacttcgggaatggaggctcaggcttgctgattggagagaatgttaacaccctagatggctgctggcagatgctgtcaagttttccaccttgaagggtgttgtgggctgaattttgtcctccaaaagcataagttgaagtcctgacccctaaaagatacccccaaaagaagtcctaaccccaaaaagataagttgaaatacctcagaatgtgaccttatttagaaagagggtctttggaggtgtaatcgggttaagaggaggtcttagtggagtgaactgatctcaccatagtccttataagaaggaacatgtgaagagagagacacagggagatggccacatgacctcagaggcagggacaggggcagtgcggctgcaagccaaggattgctgaccacaccagaagctaagagaagagcctgaaacagattttcccctgagccttcaagagggcatggccttgccaacacctggatttcagatttctagctttcaaaactgagacagaataagtttctgttgttttaagctcccccctcccatttgtggtagcttgttatggcagccctaggaaaataatagggcaaagcagagtttcctgcccagtatgtccccttgctcactactggcctgcagtcctggtggtcagacttatccttctcgctctgtgccttgctagtcacaacccccctaagcaaaatgatgtgcaagagaagttagagaaaagacctttcatgcaactgagaacacagcccccgaagcctgacttggttcacaccttgcccaagtctaatttgccaaagaccttgaaagtgaccttaggatgttaaagatacattttggtagagagagagagagagagagagagagacacttcaagaagtctgaagtttacattttaatttagtggcctgcagggctcagtcatttctttataagccaaggaataaccagtacagttatgagttgtcagaattcccaactccagcgacacaaaccatactcattagagtggcgtttctagctggttcattcaacttggcaattcagggaaataatccagaaaaagaacgaaaggaagaaaaggaaggaattcaggagagctcatgtgtatgacaacatgcaccctggcatccctatatacctgcctcctttctatcctgaaaaaaaataagaaaacagcaagacaacactgaacttcaaaagctgccaaacagacttctttatttctttatgttgtcccagaagctctttcaggcaggaacatttgccaattcaatcctggagtgaatttttaagctaaattaatgcagttgggggtcaaaatggcaacacctacaggtcttcagttgtaaggacaccggtgggcacagcagtaattgatcattatagcactcatgtggatgtgcttctcttaatcccctggtttggttggcaaaccaagtagtgtataaaaatcactgccatgattttaaagtgatcaaagttgtacacctttgagcactccttacgcatttgaaatttctccctcaacttgccacccatcttggtatcaggaaataactgaaagtgccttcttccccctgaatgtgtccagcgttggtgcctgcgttctagcaccctaggcaaagctggcgcctctgcaccagatctgcaatgtgcgtacgcaatgctgacatccgatttattatctcggagggctgggctggttcatggatgattcatgactctgctttccactgccgctggaggtgacatcatctattcgggacccagaatagacacaggagcaacagtgggccgtgttttgtgtgtctctcaccagccctgggctccctcccacttgccaccccgctgctgggtgttcattgagtgagaatggtggtgacccaaggagtccgtcggaaatgtcttcttagtggaaggtcataaatgtgtttcaacactgttgcacaataaagcagagaagggacctttcccaaagttcatctcttcccttacgttcttctagttggaatttagatttcactggcaacccaagagctgcttcactctgtggccgactttgattttctcatgtagagacagggttggttaggaaagtctggctgagataatttatcccacagccttagcattggtcaccctgcatgatgactgattaatgtcatgttagatgttggaattggatcgatggtttccaacctggttgtacactaaaatcccctggggagtttttaagatgtcctgatgcctgagtcccaccccagaccaattaagtgagactgaaagatggagccctggcattggttatttttaacatttttccagctgatgctaatatgcagtcagggctgggcaccccctgggtcacatgaccttcaaggagccttccagctttcaaaccctttaaaaaggcagcactgctgacttggaccaggtctttgagcctggtctgtgtctgggcagtctggcacgtgtcctgctgttaagccctgggaggtggggatgcctccttcatgtggggcccttcgtgggtgactaggtcagctccatccgtcgtctgtgcccatgacttcttgtaattttcctttgtggcacttctcagttcttaatgattgctatttgcttgattatttgatttgtatctgtgtcttccactctcctccatgtcccctttgcccagcaaataccattaatctatgacaagagggtgggcactcaccttggtctctgtcctaatttgcctgaaaactgagaatggttcctactcaatgcttcccatctcaacttcctttgctctaacaaaacggaggtgcaggagccctgtctggagaggcgtgtaggagctacacctgtcttctgaagagggccttggagacctaaagaaatgatctgggaacactttttccagcacccaaggaaagaacccagcaaactaatgagaattttttcttgctggcttaagagggggggaaaatgcctttagtgttgttgtagctgttcttaacagctgatttagaagaaacactgaaagtattggtttgaatcaaaaacatcagtcctgcctgtagttccgccttggacccatgctgcctggttgcagccctggaaggctggggggacggcacgctttagccaggggtctgttgcagtatttaaagtgcctatgcatttctaccccagaggccaggtagagagaggtgtgtgcttacagatcgagttctaaatttcctccccacttccaaaatcactagttttggcatcttaagtcttcttttaattaagttgattcatttgctctggaaagagttttcctgattcagctagtatatttatgtataaactactctggaaacacctggcaatttttctgagtgacaatgaggagacgtcgtttgaaaattatggtttaatttgctccctcccccatgctgtcttaccttttcaaaaatgggtaagatttacaaaagaagctttgtattttgcccatatgttttacagcagagatatgtgtatcaacaatacctaataatttcccttcatgttatttttagaactctagcttttaatggacaattgaatcattccttggcaaagaggaaatcatctaattacatgtttttatttattatgaatttgcaggtaggccccagagagattggtgagcatatataaaaagttagaataaacagcatcttaatgactattttcaggagtgaaaaactatgttgtctctttagggttgcatcccagctctgtgtgttgtgtgtatgtgcgtgtgagtgttgcttgcagagtgtgtgtgcctgtgagtgtgtttgtgtgtaggtaggagggtgcaaggcacatttgaattggacgtggccctcggttggtttcagaaagtaaactggaatcaaaaacgctataaaggatcaaaataggagagaagacacctgcccctgttttattttgctttattttaggtttatggcctctttagtgtgggactaattaaaatcccctgataaggcctagtaccctggcctggtcattagcagcgttgttcacttttcctgggtaggataagtggcttccagaaacaaagtggtttgaatcagaaatggcacctcctgggttcatcccctcttttcttttctttataaggttctttcaaaatgcacggggtagggcgctgcaggtagcccagcgaatcttgctgctgccagggcagtagcagctggggtgggaagaggagagcagctggggttgtgttattagtcattccatgaagagattgatttgataaataataaagcagcgatattagcaacacatgcttgcaggtcagatgacttcgatgaaaacccccagttaagtgtgtgtaatggtttgacaatatatatgccttctaaaaacatcctattttaaaatggaaattggactgttcttgcaattcttagcaaatatgccaagaccattaccaaagggagcttggaaatctgaagggtgatgtttctatttaatttggcctctaccctccccctttcaaaggatgcttaaactcactttgttttcctgtccttgccttttcattttgttaactgttttgatttgtaaaatactatgcctcatactacactcctttatgatgatttactgtgctgttcttatctttcaccttaaatccttgataagagcattttaaaaatgagattgctacctgacactattataaaatcttggctggcagccagtggagaaacaagcacgtttggtgggggaggtgggggcagagaaggagactgagtttagagaaaggaaagattttcaaaggaactgtatagcagattttcccccctctgaattctggaggcccccccgttttttaagtagagcgttaatgcaacctcataagtgcctcctcactattgcctagtggaccgtggggtgggcggtgagtgaattgaacagacaaagattctttgggcaaaggttatctgcgctgaagatgaaactcccatatgtcctttgctatgaattggaactgggtggatggatggaccagacagatggatagcagtgaaccagctaccatatttatagctaggagcacgtgcccttctcaactccagacatccccacccctgtatcccaccttgttctgttccagacacatcagagcagagccccctttagttgcagcagctatggcagccgactgcccaaagatggaaacttctgtgtgtgtgttttgtctagagatctccttttatccacaaagggcatcaccgatggggggaccagtaaatagagctgtctgaagtagcaggccgttgaaattctagtattgtgacttaatgaactcttgtctttaattcctatgacttggagaagacagccattctctccccataatggagctcgttaacccatctctgtactgactggtgcttttattattattatgacgactggagaacataagtctgaatgttagaataacaggtttcccaagtgcctggcagagaagggggtgtataatgatgatgatctttcgtgggaataacagcggccaccggcttatctggcgcaggcattattacatctgagtcgcctgaagtgccatttgtgaagacctggtatttattgtcctagattattggggtgggggagggtgaggcagcagaggggacacttatcatcccgtcagggctcgacagccgaggggcagctgctgggtgcgaaggccacagtcagcgggaggcccctgtgtgtaactggagattccggggcgattatgcccaatttatcacgcacctcatgaaaatacaatccaccaccaaaatgactgcttttggaaactgtcttgtctcttttgagccgagactggagacaaccagacaaggttcggtggtaatgaataaagaaacattactttctgaacacaatcttctgtcaccagtcacttttcaacagacattcaatcaaaatgctaatagcagcggcaacaagggaccgcggttattgtaatactaattgattggttggagggtgggttttgataagtgcagccgaagatttctgaaatatgattctccttaattactgtgatgctaataaaaacgaacaaatgatttaatgatgatttcctgggtaatggcttaaagattttgtttgagtttaaaatgagatagggtaaaaaatacaccagaaaaatagggctctggtgggtggccttgcctttatcaaacctaggcatggggattcaaatccaagaatgcccttggaaggctgtgtggcatggtgataaaggcctctcctgggcagccagggacgaccaggctgtgggtggattccagcttgaagtcattggcacttctgagagtggatgctgatctgtccatgtgttccctttgggtttccccaggatggccaggctgtagcctcccgctgtggggcagagtgaaaccccctgccccaggagaggtacatctgtgcttgaggctctggggcttcatgctcttgtcccacggccactgtgtcctgggcccttccatgttccaggtgcaatgctagttctggcagtactgcagggaacaaggcaggccaaatcccagccctcctgagctcatgttctgcggggagaaggaacatacatcacacgatttcaggtactgctgagggctaagaagaagagaaaatagggagctgttggcgagggggcctgggcctactctgtttaggtgggtagctgggagtggcctccctgaggaataggccttggacttgggaggcagagaactgtgagaaaggcattccaaggagcagataacagcaagtgtgcaggacctggcatgggaaggaactgattgatgtgttggtaggacaggtggagggctggggcctccaagagggacagtggtagagatgactgagagaggcagacaagcgctggatggtaaatgacttgtgagccaggcaaggcagatgggaaccctcaggaggaggtcagaagggcagaggcatatggctggtgctctagaaagatcccagtggctccctgaattaaggaaggacggggatgcatgtttggaagcagggtggccagtggaagtttattggagaagtgcagtggagagctgatggcgtcttgggtgagggttgtacagtggaggtggggagaggcagtgggatttaaaatttatatttggagacaagttatggtagattctgatggattggaaatgggttatgaggtgaggggagagagaaaaattagagtgaactctaggttcttgggttgagctcttgagggatggtagtgctattcaatagtatggggactgctttggtggaaggaacacattttaagaagaaaatcagttgttctgtttgaaattcccattgggatccatttggtgatgtttagtagttgcatagacaaaaagtacacacacacacacacacacacacacacacacacacacacacacacacgtctctggagaattaacataacctacccaattgtttttgcataaacctctctaaggaaaggattgtttcaggggaactctgagtagattttatcatcagtgtggtagacagtgaaacttggagaaagggtggttgtttggtccctaaacactccagtttttctagcattcagggtcccctgtgcttttctgttgcagttcatccagagtgttttgtgaatgatgttgcattcaagaatcaaagcatcattgcatccaccccaacagggaagagagatcccatagatgtggacgctctttagtacgcatcgtggcatcctcctcccagtgtgtgtagaggggtttgggctcactgtgaatgtcctaggaaaaccaactctggggtccaaagccctgaccactcccttcttcttaacagctccctgggtctctcagatttcaagggcttaacctgtacagaggggcttaccctttgtatccctgtccatgcagatcataggtgggcctccctggggtgggtgcagctctgacatattaattcgtttaaaaaaaaaatcagatttgtgttattggggtgggagtgggggcttaattggggcggagaggcagtgatagccttcctttcaatttgtcaagctttctttcaaaagatctgccaaagaagaaagggtaattaataggcttgaagtcatttccgatgtgtcaggatttctgccttgcttccaagtgataatgttcgcaggctccgggcctctagggagccttccgtcttattaacttgtctgggagaaacagggagtagggacagctcgggccagtgggtgacaggaaataaagatttgtggtgtagtgagctgtaaacactagggctggagaagtttggtgtggggggctgggagcgggtgggggtggtgcagagggagagggtttgctctcaaactccacttcatgaagcaaagtcctagagtttcctgggtcagatggccattcggagtcagcccggataaccccagggaagaagtgctttttaatgagcagtgtttagacactcggcaatttttgtgtgtgttcacctcttcaccccttacttctcactgtttgtttacccttcccccccccacccccccgccaaaaaaaatcatctcccactgaaaagatctttggactttacagtggttattctcacaagccctggacattgtctgcacacatagacaccaaacttttgacttttccaaagacagaattattttatttgtttgttttttaaaaggcttggtctcactatgttgcccaggctggtcttgaacacctgggcttaagtgattctcccacctgggccttccaaagtgctaggattacaggcgtgagccgccgggcgccggccgacagaattgttaatgagtatatattaagcatctaattgtgcatgctgccatctaagacttggccagttatgtgggcttggtgcctagcctgcaggggtttatgctttgcgaaaacaagcccacctccccactgccctttttttttttttttttttgcaacaaatgggtttagttgcacagtgcccagcatgggctgctgtccggcaactaaagtcgtggttgagagtatggagaagggatactgttttccttccatttccggtagttgctcactaccatgaccctgttgttgtgatagctctttgctgtcctttctacctcaccttcaccctatcctcagctataataccgtttagctttgcagattaggagctgggtgaatataatggttcgagtgaatggatgaatgagaatagtcattgtaggcactgctgaggctttttcatacatccccacatttaatgtttacagtctagcccctccatttacctaatgggtgactgatactcagagaggttaagtaacttgaccaaggtcacacagccagtaggaggtggagattgggatttgaacccaggaatcctgtttgacgatagctccttgacccctaggtgggctcctgcatttgtactcaggggcaaggcatcagtagttggcagagatcttagcttgatgcccaaggccttgctgagtagagaagggagttcaagagaggcttggagatggtccctttttggagcaacctctgactgcagggaggtcagttgagaccctggacaggcatccaagcatttggaggagggttgatgctggagcaggagcagcatcttcacaggctgtggtcactcctgagctgggggaagccaccctgcctgtctcctctccctaccccatccccgccttagttgtcagtgaatgcggtcttttctgagctaattagaaatctcaataggatcgagaatagctgccgaagacaaacgccccttttaagtgctatcagtgcatgggagagggggcttgcagaactgttcttagagcttgggtttggtggctccggctggcagcaggaagcagtggttgtcaaggccttacggcagctagcctggggaggacagcatcccaggcgaccttcaggatcagtgcaagcacagatctccttgacggacacccccgtttgggacttgttcttctcctttgttaacaaaagtgcttaagaagtaaaaattgagttagtataggaaacctgaagtaaataatgctggcttcagctatatgcaagctgttcctcacacactgtgcttttcattgtttaaaatagcaaggtttggatttgggggggtcacagggaaagaacacgatgtctcttttacttttgtttttgttttgcctctttttaccttttcttttccaaaagtaatttttgggacagaatcagaagtgaagcaaaaatccaaacgagctctccgttttcttaatacctgtctccccttgtctttttctgtcaggtttgaagccgggctggaaaatgttggagattttcagcctggggaagagtcgaggttcaggacatttttccttttcctaggaaaactcagagcagggttagacagttcgcacatccaagaccaacacgcataggcacacacgtagccctctgtctagggcctgattcagtctgcattcgagagtgttctgaatgagagcactgtgttggcgtcttccacaccagcctcacttcacaggagaatttttcaggagccatttttctattaaactcaagagcagaaattgatggggggatgggtgctctctggagatgtaatttgaatttatttattttaatgattaaagagaaagaatggttattattcacatgaatgaccttctcccggtgcttttttgaaaggagttgtgttggtttattcaaagtggcttagaactcacataatggcttacttctgtggagctttctgaatgaagccatgaactgggagggaatcaaagtccccttatttcagtgccgggaggtaaatggataggggacaaaaggagcaatattatgtctcagactaaataaggtctccagatcaggggctgaacctgccccggctccatcctgaattcttcctgtgcgggtaggtcctcactggactcacctgggctggagaatcagcttggccacagactcctggcttggtgtgagcctcggggattgctgccggagggagggcggaggtctgtaggtggagaggtaggttcaggtgggtggagaaggcacacagaccgccgtctgggatgaggttgctattggattggaaattgctgttcagccgagggtagaaatcaggtgcctgatgtgtgccagttgctgcatgacgtctgccgagccccaggtgcacccatggggtcatgcatgtacacacactggtgttcccacacccccctcttcctgcactgccatgccccaccgcccttcccccacccactgctgaagtcttagctttcaagtgcaggtgttgaggttaataacaagaagtatcccagttggccatttgcatatgagacttctcactgggttctaaaggtgggaaggaagggatttaaaaagatcacgggcgtgaaagctggaaacagtggcgtccattgcttggggcaaggattgactagaggtgattttatgtgctgaccgctcctgtagaaagagaagcttaggcagatgtcatgccctgcctgtgcccacccaacctttctccccctggctggagcactcactccaagccaatagcccagcttccctggatccctcagctccaaagggttgcctcctactccacttgctgcatagaggggttttctggaacagagaatgtgctggacctagagcccctcgtcctggggctcaaggacccagctcatgtgaccttcagcaggtctctcctgctgctgccccaggactggccacacaccagggctctgtcccccgacttcctcactagaccctcaggccatctggtcgtgaggtttttactgctaacgggacagagtaacgcacataacccatgggggagttgcagcggtctaattgaagttcagagtgatgttcactggtctgtaattcctgactcccttcctgagagagtcctgggaactgagcttggctttctgcctgctgcttgtctctgattatggagaccagccagcaccccccaacccagccccccactcactgccctgctgcatccagcccctgggtcttccacctcctggcacgctctagcctaggcctgaagtagcagggccagacgctaggtgtcgccgtcctggacctgcctccatccccggaggtcttggctcatgggctttcttgatctctgagtgtcttttttaatccctattgcccagcaacggcttccttggttagagacagtctggcaagtttcctctggttcaaacttacgtttgaagtttttctacaaccagaaggtgattctctggcttctgagcttcacccaaccctctctgagccccaacatgggggaacactggtctcttctttctgtgactggtcatcttttacagctttgattcatgctcttagtttccagttttatatgtgcttaagcattataagacacctcagtatttttaggaaataagtggggacataaatataaacaacccggaaatcactgcccctagaattcacagagtggaagaaccaagctttttagggctgatgtggcgtgggctgggagacttctcttttgagaggctgatactggtctttgaatgaactctttaccccaccaaaagtagaaaaaggattccagtgacttcagaaatttttgttgttgttttgagaatgttggcaccactgggaataatgagagacgcctggcctattcaaaagtggcatcagaaacctcagtgttggaaatgcagcctttggttgtccatccccgcagctagagcatgagccccccaaggccagactcgagggctcagcgcttcagttgagtagtcctgattgaactaggctcatgggcacagagcactggactggggaccatagtggatgccaaggctcgaccagtgcaaaatcagcccaaactgaaagctgtttgggaaggcagaatgaatgtatcatctttcactcggcaatttttcaaaattcagccacaggtcttcctggacccctagccaggttttgattttctaggctgggatgaaagatgaaagagacgtttatttggtgggagggggattgggacattgagctgcttttaaatgatgttaagaatcccattcttctccctgctttcccacttctgccctggtgttgactttgaaaaaccttccaagacaggctgaggctaaggagatgggggagctttcctgagcagctttctgaggtccgtttttttcttttgaaatagactggaaatctatctcggctctgaatcatccttcgattctcatcgcggaggggcagagaggagggtgcacgggcagcccagctcatgtgcctttgtggccatccctcctcctggccaagagataaccggttgtttttgaaagtcctgtgtttatcgcgagagagcagtgtggtcagagaggcggtgaggaaagagccggcagcccttctgtgatggatgggtagccgacttttcttgtgaagcaaaggcagcccacaagtttgtctctttcaagagaagaaatttaaagcaaagctccagagagagaagttttttcagtctggtccttcatgtaggcttaacaattctaggagggccctgaaaatggcagagacctcaattctcccctccctccctgcccctttatgggctccctaactagagaggtttgcaaagcttaaggggattaatgctctttaaacctctgcactccttcctgctcctcatgggatccgggtgctaataaagatgtactagcttggaaaggctggtaaacgctgctttgttgccacggcaacaggcgaaacaagaacgacaccaagtattgctaagaagagtccttaggatcaagagtttggggcgggggaggggggggatggttcttaaaaatgcagagagtcttggcaaggtaattagacttggtgctctcaaagtaaattcatagttttatggagcattactagagagccttgttacttgcaaagtcaccctccatcaagtagaaggaacagctgagagccgccagcatctgccgccagttgctccagtgaggctggggtgttgcgtcctgagacaccatcccccctctcctcctcagcaagtagtcaatgtgtgcacacgcgcttgtttgggaagcgttaaaaagctctatttcctgcctccttggtgttgaaagatatgagggaatgttctacacctgccttctatccgggatgatgttattgtttttaacaaggatgataagacagtagctaagcactccgtaagcctgtgtactgggctgagcaattcttttgctttatctcatttcaccttcaggctgaccctgtgtggtgtagctgttattatgcctgttttttctgatgaagaaacagaagggttaaggaacttgcccatggacacacagccaatgacagagctagggtctgaacaggtgtggctataaagcctgggctttggcccgtgggccatatctttacagactcacaaccatcccttcctgctgctcgaattttcattcttgaggcatgagcagcgcctgcagcccctgctgggatgttttgctcaaacctgctgagacttccaagggagcctgggactctgctctcctactcctttcctcccttgtgtttgggcactcggctgagctccttggaaagatttctgcttcctgtgggtgagaagtagggcagtgtgaggaggcagggctgctaggctaagatcccaggctgccccactgacccatgtcccttcctgggtaatggtgcccagttgctcaagccatacctgaggcttcagcccgggccccatctcccacacatctagccagcgtccgcaccgccagctctgggtcgccctgtcctctgcacccaccgccatgctctgtttcagacacctatcccatctgtccctggcagagcagcaactctccggggactcctgcctccaggcctgtgacccatttagagggatctttctgaaatgtgattctggtcgtgccaagtttagtggctgcctgctcaggcgcctcagtgtggcctccagggtaggcgtgatggagcctacctctccattccctgtccgctggggttccctgctcagcgcagcagggaccccagcagctcctcaaccagccaggttccctgtcaacttttgcacatattaacccctacccacctttcctttgataaactcctgagggtcctcagatgggtgccccttcctccctcctgaaccccctgagcatgcctccatcattatttccctacactgactcccccagttactatgaggatcttaactgcaggagaccatattctgttcctcttggtgtccccagtacctgggacataataggtacttggtatatgcttattaaccagaagagtgatggtgtttatcctcaccaggttgctatggcaacagatgctgcagcccctcgaggccaagtgacttgagaccttggaggtccaaaggtcacacaactaccttcctggggccccacctggcatcctcctctccctacagccaggacaggctgcccagcctcagaaccaccacttgttgtgactattaaaccccatgtcccaatgatgcctggagaccatgcctcaggcactttacactgttagtggtaatggtgacacattatctgagttttgttgcttgtaaatttcttttatgctgataagcttggaactggattggaattgagtgggggacattgtccagtgtccatcaagaatgtaatggtaaacatttaatgtttttttctccttcttccccacagtatcagttttcttattgaatttgggaagcaatagcaattgattaagttgcagtggagcttgccctaaaaggaaatgattgataatccgtttaggtctggcttgctcgcttttcccctcctgatttccttggccactttttcaattaccaactgtatttagcttggtttgcttgttgtaactcatttccccttcctccaggatctgcagggaagttgtaatgtaatgttagagtagtgacatctaattatttccctgagacatcagttagaaatgtaagaatacttcttccttgaggtgggcagacgagggatgtgagtctgtgaggcagaacgtgtctgtgctgccatcagtctttggggtgggagggaggtcagggcgtccagtgacatcacagcctcctgtcactggactcagagcccatgtgggctcctgaggcaagctcataggattgttttgcaagtggactgattggctggttgggtctttgccattaagtgagtttatgaggccctcactactgggagagaggctttgcagaggcttgcggcactatgacgagggtcacacctgatgttcagagctttttgtttctttagctaatatctttaaggtaaaaccatctacaaagtacttttacccactcagtgacagcttgagatcctcccaacagtactaataaaagaaaggagaaattgaattagcagctatgtttaccctcccaaattaatatatgtataatgtctggccttatttggtgtttagtaatgcatgctgtcatggccaccttctcagtggaagcaccgggtgtgggatctccctgtttcacaggtggattggctgaggcctgaaatggagaagggacttgtccaagatggttcagggcatggagtatggagcccactgttgggatcgccaagatgcccgataatagcgttcctcatccctgcctgaggagtgaacagactgaggggtaagccaaaggcatggcagatggtacacggaaatatcaccttcttaagaaacgttaacgatgaggggcaggccgcctgcatgagaattcctcagtcataggcaaccagatgggaggtgggctgacttacatgggacagccagggcagcatcttgctacctctttttacgcaagatgagtccaggaatattccacacaaaaaaagcacaggagtcactcaggacctggaggcttttcccaagacatcatgatggagtcttcagggtctgccccaggggccaaagccccctttcccgctcctgccagactctcatgcataacaagtttggaatgaatttggcaatgccatcaccacccagctcacttctcagttactttctgtttgctgtgtactctggaaggtgtggattacccagggagaaccctgccttgaagggtgtgtggccagggacaggttctctgggctgttggctggtaccccacagccctgggctggggtgttcccccttgtgcccatgccaaggcaaggctttctgcgtggaagtctggcaggtgtacattcgctccccagtgggaatggggagcagaggtttcgttgaggcatctcttgggagtgcacagtccctaatttctgaaataccattgatgagaagcagccccagtttgggtctgagttaatgggttaaaagagcagaactgttttcttgggcgctgaatatttcttctagatgttcaggtccataaccaaggcagctaagtcagcgaattgtcagcattccagaaagaagcgtcatctccttgggtgctgaggacctccggggctgcagctgactctgccctcacacaccctccttcttggctttcatgatttattttgtcaagaagaatgagggagttaggagtggcatctctcataacagcctcctcccatcttctgagagtgctcaagacggagcttgcctgctgctggcgtggggagctgacaaaatatttaaataaaggctctgggggaaaaggacatgcttagattacaaagagaaattccacgccgttatggtctcagcgtattaggcgcctctgtaattgcacctattcagcactgccatttctagtcaccacgcagccatccgagggaagacggatgctctaaaaatggccccgagaacagtctttttaaaaaggcagttaacgatctggagctataaatagtgtctttccaacaaataacaaagagggtcggttcccctttcgcctctgctgttgaggccccgcatcctggagtaagtgagtggggtcaggagggtttgcacctcccctagagtttgagttcttggaggcctgatgacacccagcgtgttgcctagaggtggggatgagaccctggctggctgaactgccgctcaccgtgtgtttttggagacacatccctcctggtggcacaacagaaaaccacgactctaagtcacttgccccagccctctgacctctcttcagcccagaccagcccttctgccagttataaagcaccagccctgccaagagcaaagagaggcttgctggatcccgctgtctcttcatggagttcctgaatcacagaacctcccagtttgtctgtttgcctcccatgtatcaagaactcagaggttcagccaagcgcggtggctcacgcctgtaattccagcactttgggaggccaaggcgggcagatcacctgaggtcaggagttcgagaccagcctggccaacatggtggaaccccatctctactaaaaatacaaaaaaaacagcgaggtgtggtggcgggagcctgtaaccccactactcgggaggctgaggcgggagaatcacttgaacccaggaggcggaggttgcagtgagccgagatggcaccactgcactccagcctggatgacaagagcgagactccatctaaaaaaaaagaaagaaagaaatcagaagttctttgacatcattttaattcataccttctccaaatcagaaccacaaaagcagcattacctacacccagaatagacacagacatcaacagaagcacaaagtgagatggaaccctgtctcccaacctgagagggagagtttgggctaaaacacgcccatgtgaggacagcatttggaaagttaatgctaaggaaataagaaggatgggagtaaaaagaggacaagccccgatgtcctgtttatcagctccccctctctcctctcctgtctcatccgctcccgccttgaggatagcgtggtttccctggactcctttccagaccagctgcagccccattggcaataccaacttccctagctggggttggctggacggtgtggttcttggcagaagatgacacatgggtagcagagtgactttggctcctgcatcgagtgcttgtctcagccccatccatagccatatagaatcctagtggtgaacatgcaacacccctgagagccactgaccaggcaggcactggggtgagggaaagtgaggggactgtgtgggaccagctgtgctgacgacagcctgccacccaagggatgcctgtccctgcaccctggctttgttcctgcacctggtccccaggaagccaaatccagtgcatttttccagcttctgctcagagacagccagtgtctgcagaagggccaaggccactggacgtctggagagagtctggccacaatggccaagtggtggacgtctccacaggctgccccgtgcccctgcagaggcagggcttcatgaagcaggagcaggcagctcagacctgggccgggccacctgtgcaggtaactccttcactgctattggtcggtggaattgtaagatcagttcttcagcaggatgctgcgggttttctgaggcccgtggccatctggatttgtgctccgaacatattataccatgttaacagcttttaaagtagaaacacatgtgattctggaaggctgggatggggcaatggaggagactgtttaaaattgctgtttggtatctctcgtagtacagtagcaaaggtaaaaacctattatggtccacggaagcagttcattgcgtaatgacatcttcataacttgccctgctagctggcttttctcacagtctctgcggggaagttttgttcttttaaaatattttctggggtggtggagggggagagtttggaggcgctaagcccctccactgaaactcctgggatgggggacttgcagtaacccgtgcccctccgaggagccctggagcggggttggtggggacacttccacccacttccatggggatttacaaggtctgcttcatggacattttcaaaactcttctctctgctacttcctcccaccacccccagatcaccacgttttgggagaagagtggttgggaaacaaagactcagatatcagcctgccttttagaaatcccagattttaaccacctaccagctgagcaaccttaggccagttatataatcctcagagcctctgactccttatctgcaagatggggtaacagtaacacatgcctgctattatttattactgatgttgctgtttctgagcagtataataatgctgctattattaacaattactgccggtatggagaggagtcattagggcaatgcctgtacggttcctcgcagctcagtaaaggcggtggttgccaccagcacaagcatgccttgcaggttggttttggttatttaatctttgccaagtaatgcattgtgggtttctgttctgtgagcatcccaggaaaggaggcaagccagtttcgccccagtggaactggggcaggaatagaggtggaaagatggaaagcccaccatcctcccagctccaaaggagctgctccctgcttcaggggaaatggtgactttccagagcccatctagctgatgaagcaaatggcggtgaggtcggtgccctctgcacaggctgatgtgcacatttagggagtcaagtatggaaacctcttgttcttgcactgtctgttcttgagcaatcatgaagagacctcacaatccagaagaaaccaagcgaagtgatgaaaccacagccctgagatggagagatggcggtgtgggtgggcctgggagctttgcacagggttctgtctaggtggagggtgggaacatttgatatttttgcccacctgcctggaacacactgtatgtgcagttgcgtcacccatgtctcagtccctgaggcctgtcagccccaagcaggccccagatatcacaaaaatccccgctcttgctctcccgtcttgctgttttctgaccccagcatatccatttctgtgcggtttattctgagaaatcctgtgtgaattgtgcttgaactagcgggtcagagactgtctcccacctccacccccacctgacctttcatccagactgcaaacaggaagcaataagaattgtttgcccagttgctgctttgatcttctgggccccttttggggtaggaggctgtgctaatgaggaaacatgggccagaagtccacaggcaggggagctgtgaggacgacagaaaggtaggaaacccgcagccaggtgctccaagaaatggtagcgtgtgcccaagagcagtctctgccgcccctcttgaagcagcacccctttatccagaggggatcggctgcatgtttaatgagaactttagaggcctggaaggtgcctacctaagcaatagcaggtggcagtggccccattttaaagatgaggaaactggcacccagagaggattggttcagacgttattcgaatttgcagctttggagcccaacaggcctggattcaaattccggttctttctacttattatatatataagctacttaacctctctgaccctctctgattttcctcatctgtaaaacagggataagaacacttcttcagatgtgattgctatagattaaatgagggaacatatataaagagcctgatatatagaagtgtccaataaatagcagctgttgttttccatttatctatccatctgcccgttcatccatccatccccatccatctgcccatccatccatccttatatcccttcacccatccgcacatccagtaaacagtgattggtaagccaagtgctgtggcatctcaagatgttcagaaatggatcctggccaagaagcttatgtgtctagagacatttctaagaccgtacttcccaggcctcttctcatggtgctttcatacacagaggaagcattcttctcttagcaaaggcattgcctgctggtcccaagcaactcctaccctgggcactggtgttgcctgtggcctgaaaccagggatctccctctcctaggcgactggaagtgcagagctgcgtaacacagcccttcttagatctgtgctgtcgtagcacgcgacagtgggtcccagctctccagcagaatgcacccactgctgcacatgctgttggccagctttctggagggtggaggagagccatcttttaaaaatactatgttgggaaaaaaaatacttctgttttcatttcaccaacataaaaaaatgtagtcactgcaaacactgacaggcaaactggtggctaacaaatcagatcctcagggactgcacgaatggagagataagtcttggtgtgtgaattgcacacggactatttttttttccttttttaaaaatgcgtacaggccgggtgcgatggctcatgcctgtaatcccagcactttggaatgccgaggcaggcggatcacctgaggtcaggagttcgagaccagcctgaccaacatgacgaaaccctgtctctactaaaaatacaaaagttagccaggtgtggtggcgcatgcctgtaatcccagctactcaggaggctgagacaggagaatcgcttgaatccaggaggtggagaatgcagtgagcagagatcgcaccactgcacgccagcctgggtgacagagcaaaacttcgtctccaaaaaaaaaaaaaaaaaaaaaaacagtgcatagatttgtggggtccatgtgcagttttgttatgtgtataggctgcatagtggtctagcaggattttttttatatccgtcacccgaacaacatacattgtacccattaagtcatttctcatcacctaccccatccacgtggaccatttttcataccaatggctgcacaccttagaggcttgctctctttagtgatttaattgtttctcctgttggttcctgtggaaagttctgtttctctccagccctacacttggggaccatttatactcactcaggctttcccacagccctgtgagataaggacccttgtacacatggaaaaacttgagagcaggtaggccactgcccaagatcccaggcaagctagaaccaagctgggaagcgggctctgggcccaggatcagaaccccaaggcccatttccattctatccccaaaatagtgaatgacattggataaagcacaatccatgtcagtaatctccagtccttcctaatgtggactctcgccttccagcatttaacatacccataatggccccattttagtggctgactgtctgtctgtctgtctgtctgtctctctctctctttccctctcacacacacacaggcgcgcacacacacacacacacacacacacacacacacacacataggcctctgtacagatggaccctgcttccaaaatggagagtttgcattttcctttcatccctcacctcctagtccccaggccctccgccctccctaaagatgctgtggtgaaggggttctggaagatcccattgtctggcctgttacacgctctgctgaacagcccacctgagccagaatgggcctgggcacctcctctgaggcgtgtcacatttcccaagcgcagcctgatgaataggacgtcctttatggccagccccctgcacgtgtttctctctgtgcagctgatactgttgtgctcaagacacaaaggcccccatgtccctggctgcccatcctctctgcctgtgtgaagggcgtgccatgtgtttgtggatttcttgctggaacagggcacagatggctgggtttgagtgcagcagtaattaagaattgcccaggagctaacatatttatgggcactggcccaggacagcccagaaggtcgccttgtaatcaggcatcacgtgactcctaggagccagttaacaatggtatggccgtggcttgcatcctctgccctgtgcccttagagggttttctttttaattggggacatttctgaatgcatttgggtccttcctctgctttgggggaagctctgatgtttctgggcctcagtgggtccaagtgaggtggcctggaaaccaccagtaagcacacgaggttggggtgatgatgatggtgaggccattctacccatctcatggctactcaaagtcagtattgcagtctgagtcctgggcagggttctggagacagtgctgctgtcaggggagctccagccctaataggagactatttagggcatttatggagcttgcagcctgtgtccagcacagtgcacagatgtataaagtgtctccctgacctttggaattgggagtctcatcaagtatgtggttaatgctaaattgtatggtatttcctttgcttgttcattcaataaatgatgcgagcacacagtaggtactgagtaatgcagttatgaacccctgctgcactcttttgtctactcactggcacttacatacagccttttatccattggacagtacctcttggcgcaatcgtgacgccttgggttgttggttaccattctgtgcgtttatctgtttcaccaccttcattaacaacagccgtttatggggcacctaacagtgctagatgctgtcctgagtaccttacatatgttgccttatttaatcctcacagagttcctctttgacagatgaggaaactgagactcagagacatggttacttgctgaagacacagaatatgcatcaaaggtggtctgacttgagagccagggtgcctggtattcggctgtgccaccccatctgcatctaaggatttttttgtacaatccacagtgcctggcactgtgcctagatagcactgatgcttccagagaaggaagagatcatgctggatttcccatttttctgtaggataagcacagcatctgaattcggttccagccggccttcccagcctcacgctgtaccattccctgatcttgagtcacctgatcctgcctgtagtttctcagtgcactcagtgctcccggaggcttccctgactttgcacctgcccttgtctccacctggaatgtccgtccctgcccctttgtgcctggaggcctcgtcttctgtctagaataggtggatgccacctgcctgaaagccttcctgcattcttgcagacagtcatccttccttttgtcctgctccatcacagccttaccagttttgtgttgggattgcttgcctgtccctctcctgctaaggacagggcactctctgaagacaaagacatgttttattttataccccctcgactaacacccatgcctggcacatcagccaggctcagcagacagttactgagtgaatgcattcattggagcagctctgtggagcagttgaagctgtatccacctaggctttgaaagcagaggaagggaaggcatttcaggcagatgcccccttcttgctattctcctctttctcgggctccctgggttgggtgaaaattggctgtagacatgagacacccctgttgcctcctaagtaacatctgtttactttcccagggagagtagcgatttacgaagagcaaatggaagcgaaaaccccttttcttctttgggccggctgtgtattgctggggcacttgggcagacccccaaagacatccttaaagacaagagaaatcgggggctgtgtgaagatgtcacatctgcagatagggttcgaggtagagcggccttttgggttttctcctcatttggagaaatcgagaagtagcacggaagaccttcagacccagagcttgtgtacggcacagtccttgaaggatttgctcccattctcagggagcaagacccatcttaaacgtggaaacaaatacagcagagtaatacatacttgaggcttaatgtaagttaattcctcttggcacagccccagatatcttgattaaatggtctgcgaagtgctgagatatcttgataatgtacgttttacatttgattatataatcaattatgtttctcctaataaaatttaaaatgagctaaaaaagccatgagaagacagtaccacatatcaaaagaaggtctccagatgaatggaaggaagccctggccccctgggtcacatgttggtgttctcaggcattggggcccggtatttcctgcgtttacctgtgcagaagtcatcatagcttactagatttgtgttggtagagggcatgtgcagagtgaggtatcatttcaagacacagaatatagcgcagcattgctttctgggatgaacgtggttttattcactcagtaactgagagattgaggatttggctcatctcaggaagctcaaggcagagctgagaaaagaactcaacgaagctgggcttgcccgagagactgccaccgatctggttggggccaccagtcaatttatgaaacaatgtaaggaggagtgttcagaggcgcaccaagggcctcgtacagccaattaggagagttgctggtggctttctctgcctgcctgtgaagcagcagtgcccgctggggaggtggcaggatttaatagaaggggcatgttcaaacccattcttccagggagtgtaggagaaggacctgatgagtcttcctatccgtgccctggagggtgatgtttctccaaggatgcttccatgtagcagggagcttgggaggtttgggggacaaatgctcgttcttattaatggatggaagggtctattccagacaatccattctgtcccgcagacaggctgctgcaccatttttgtttccgtttaaaacattgctatcaaccagttggaatataggcccggagtatcgcagggagtaatctaattagtatgaagtcaattcagtcgctccttttgtatctcgtgattaaataagtggggaaaatggcttgaaaattaggtgctagaacgacccaattacatttctgtagctttttgtattcaatttcataaacaattttgctcttcgctggttaatcagtgaatgcctttttccagtttgaaaagcacttttgaaattataatgcaattaaattgtgtgtggatgttctggcatagcgagtgtgaaagccaggggcttggcaggccgccatgttgtaccttgactgtaatgagtccctgggctggcagcttgcgagtgtcattcataatattgtccatgctgggttactgtaaagtgcagctgccttaaccggcagttaaccggcgactgccagtctctctctgcagtgggctgtgcgtgcctcttccaacagggctgtaccccaaagacggcagagtggccaggctcctctcagtacttgcccaggcattgggaagtcgggggtcttcctggtggatggggccactgcctcagagatgatctgattacctgtccccagggaagggtggaatgtatttatccttcttcatctccttggcctagcaggcttctctgtctacagttacaacagattatgggaaggggaagggaggagacagaagtcttaagcaccttgctctgcacctagcttacaataaatacctttactgaatccttccaataacctttgcaagagtagtattactgtctccatttgatagatggagatattgaggcacagcgggatttgatgacatcccataagtggtggctctgagattgggacctgaattgatctaactccaagacctatgttctttcagcatttctgcaactgggaaacaaactgaaataaaggctgggggagctgggtgcaggagagtggcatgaagtcactgctctccgagaggggacgtgaggacatgaaccttcttccttaggctgggagaatgcctcttggtccacacaaggatgccatatagaaaatgaaagatgctttagtttttcaccaaattatatttaaccatatttccactcctttggacatttcgatgtgagttgggatgatctataaggtgggcacaagacacaagacagtgactcaaggctgggatcatgagaagcccctagggaaaatactggccatggcataatccagtggcacaatcctgtctcagtccccagatcttgccccaatcaagaacaaagactctcgtgcctctagtgccttaggatatgaggcctgtagaaggtggtcgacccccaaagggcctcacagcaggaggtggtgagatcactctgattctagaactttcttgctgattaatggctcaagtcctaacagttaacacctagcctccacctctaatccccttcttccctattgattctttttcctgatagaggccttcacactaaacccggtttactgcaaatgagtgttattaaactcctagagggtgcttttcagcacattccttcatgttaaaattgccatagactttcaaccaaaggaggggagtacctgtggcctggttatcgtaatgcttgctgagtggaaatgacaagctttacaccaaggtgggcctccagggggctggagcactgtggtggtgtttattggtgagagaggaaaggttagcaggtagaagtgaacacacctgggcctggctggtaccggggagaaggagggacagagggagaaatgtcctgacctaccttggacttggggagattgtttcctgttgtagcctcttttaaaaatttttttgactgtgtctgggagatcatgggtcaggtgcaacatctcttttgcagtaaagcttggcaaggctagggtggggaggtgaatggggtgggacggtggattagagagaggaggggagatagggcccctgggactaagcttagatttagctgggaagcatgttagtagctgccagcatgtgcttctaatcatctattcgccagatgttcccggaatgggaaatagaggggccttgcctgatagttccctgatggaaactggtagcttcaaattggaaatgggctccagtttgctgccaggtgtttgctccttcctagaacatctggaaggaggacagtagaaaaggcatctctgccccagcctggagttttgcgggcagctgtcttgctgatggatctctgaaagctggacattgtggtcatgaggagagtcatgagaatcttctgaaatgagccctccatttgcaggagttcacctcagagtttaaacttccaggattgagcctgaggctccaaaacagggcaccttgcaagcctgggctaataaggcacctatttctggagagatgcagatttttcaagatgttagaggaagaagcaagaggaagatgaagaatcagctcctgacctaatttctggtccaaagtgaaaagattgaaaaatactttttaaggtggtgactatcctaaaccagtgagccttgtggaaattccatgaggatctcacagggaaaactggaccccgaatgaattaacatggaacccacctaaccacacaagtctttgctctgggtatgtggaaccaaaattatcttcctggctgaaatgaccagtttctcaagaattttagggtgcagtgcaggatcctaagatggtgtagcaggaggccactccctgggcctctgagtgcatctgccatcagtgggaaagggtgtgaaatctgccttgggagttacagggaggtcctcagcgtagacacgagccacggctgacacacactcaggagaacacttacaaagcaaactgaaaggaaattatgggacgctcatatgatggatgattacacatccattaaaatggtgtttacagagagtttttaaatgacgtggaaatgccgatgacatagtattgcacaaaaaagctataaaatttatatacgctgtgaatcatattagaattagaatcacctggggagctcttagagaagaccaactcccaggccccacctcagaccaagtaaatcagaggctctgagggtggcgcctggacatccctgtcttttaaaaccccccaggtgattatgatatgcaggttgggttgagagtgattgcagtaaagcagtattcatggaaggaaagaaattctccacactttcaccagtggttttctctggtagaggagttatggggtgggttgaaatctgtgccttaattatttgtgagttatccacggttttgcagggagcataggagctatgatgagaacaggggtctcttccagcaggtaaaaatggacagtgctggagacccaagtcgaatctcttctctgcaacactcttccctgcctgccttcttgtccccagtccttgggattctgttaatttggggatttatttcatgctcttggtgatgaggccattatgcctattcagattgtttatcagaaaagccaacaaccaaaaacaacctatttgagacaaagtgggaggcccagcatggcgcccactgcaattgctcatatgggtgtgacctgagttcacagggtcgccagagtctggcagcttgggatgcatggtatgcagaaggctgctggatcctctcttatatgggggttcctggcaggccgatctggcaggcaggtgtgtgagtcctggctgggttggctttcctcccaggacatctgggagaaagaccagcatgggaagaaggcagtcagggcagcagtgacggcctctggggcccctccccctgcagatttgagcaaagcctgagccacaggtgggctcagggtaaagaccagggtaggagtgtgcactcagccataattggccgccttgttgatgtattgggtccagtgaagagcctctgagcagagggatgctgtgccaagtttcatttctggagctgtggtggctctaactaggaatcgagcttttgcccagtcctgacatcatttgatcatttagctccgaggaaccagaggcaggaagcatgccactaaccttttactgcctgtcactgttgaagaggaggggcaggccgccctgggaaggggagaatcaatccacaacttgcttttgtcgtttgttaagtcttctctccccgcatttcaggctgaggggcctgaccttgccacctcagaaccatgagacaggaggatgcaggaaggggagatgctctgagggaatgtggcagcccccaccaggccccgctcctcccaggagatgggtttctggtggacctggtagtgttttaccttgcctttacctcacgtacctctggattctgaatattctcctctggttcttgtgctctctgaatattctcctcttggattcgtggtgtggtcaacgacaagggtcacctagtctatactccagtttcctcttgggttaaaatggataatcctttttgagatacttcatcgaatgatagtaaggataaagtgaaataacctacaggaatgggtttggaaagacagtgggaaagtaatagtaatgataataatgtcactttgagagcacatccagacactcctctgttcttttcctctctgttcccagctgggcaggtgagcagcttacaccaaatgggaaagccaatactttctacagccgactgcgtgcctctgccttccccgcccacatcaggagagggtcccaaaccctccctctctgcaaatgcccacttccctcatgtcctctcaatcccacctacacccaccctagttctccagacccctaaggaagggtactttatcattaggccaactaattgttcatctgtgcttcagtgggtgtggtgggggagctagaaagctgatcagccgtgccaaagagtaaatcaatggatcgtagccaagtcaggacaggtgaccctgacaggtgtgtgcagcagaatcggatcctcaagccagagcctgctgggaagcatgaaggatttggcatcaccaaggaggaatgtcgcaggtttgaataaggattcagaggtttaatcagcaaagctatttaggtcccagtgagtctaactgtgagaattattttgagcttcaccctgttccagaaattttgggttcgctaagcaagatggtatttggcagcagcaacctggaaaagagtgaggacttgccatagaagcctctgggattagaggaatttgcagagcctcagagcccaaggctggcgcccagtaatttttgtgggacatggtctcagaactctagcttctgacgatttgcttttaaaagtccaatctgtctgcctttctccttaaggcaatctgtcctgaattcaagatattctgtgtctgcttgtctttgtccattttgtcaccttgagacatggctgcagcctcaggtacctcctggcacataagcaggtgctaaaccaatattgattgaatcgaaggaggctagcacgttggagggaatgtgttgccttctgtgtaaagagccctcctttccccagagctggcatctctgctatggaggctgccacccaccagctcagggcagagagctgagctcggccgacctccattcgtcagcacggcgccacatttgggtagcacctgcttccccgccgtcctgatttagaggagcctggattcaggtttctgttgtaaactctatttttaactaaaccgagtggagatcaggctgagatggctgtaacttatgggcatgaggtgaccaatgcaaaggtaacaggatgcattctcactggaactgctgtgcaagtgtggacgtgcccgacaactccgtctgaggatcccacatgggcacagtgacctgggatggagcaggagtgccccctcgtagagtccagatgcacatgtccaatgggaaggcgagggcagtctcctagaatgcctctgtggtgggcggtacggtgttcatggggaccacttgtcagtgtctgcccttatttgtcagcattggttactagttattgtaaagatattgccttacatttatatttcccaaatgcattgatccctataatgaccttgaaaagcaataatagcgttataataatatgtaataatagtattaatgaccagcaacttctgcttattgatcccttaggatgtgtcgtgctctgtgccaagtgccctcctacattatcactcattaataaaccaggtggggaggctgttactgggatttccatttttcagattcattcattcatttgacaaatttttattgagaataagttctaggcacagggaattcagcagtgaaccacccaggctgaaatctctgccctcaatgaggaagctgagcctgttgaggtcacctgagttgctcagggtgatagagcccatagagtgaggctggggatcaacccccatcactccagacctgctgagttcctgggccaccacatttatcagcaaggataaccgaccagccattggcctctattatatggcagcttatccagggctgtgttaacactaagccttccatttattttggttgatcttccaggggctgatggaggagtgacaggctttagggacagacagacctgggcttacatcccagctcagcgactccctgatggaaggagggcatggacagtgacttgactttgctgagcatctgattcctcatttgtctaactgggataacattacttgccttgagggcgagggcaggctagaaggattagatatcatcatatgaaggggttgagtaggacttataagccaagtacgtggtggtggttgtgacgataatgatgacaacctaataagaaggaaaagccaggcggggaaaggaatatggctcatcctagaggagaacaagtcaggaggtagctctacccctccctccctgggctaggatttgtcagtcccaggttgggaaaggaactccagcccctgcacatctgtgtctccccagccccacccctcatatcctccatcctagccccagcaatgccgctgctcctctggggaaagctaatggccaaggcattacttaactcctggcttttctccagcctttgctgaggcctccaccactgccagcttctctctcgtcactatttggttatgttcctttacaagccaatgaaataaaataagaaagtccattatacctctggttggcagaaaaccaggagctaagaaccagagtgcaaaggccctcatgagtctgtagcacaggccattggatggggatgtcttccttcagaaggatggtgcatgggcggggcagggcggagaagccagcccatgggccagtccacagagcccaggtcaaggatgcaattctgggtcctgtgtccccatggttgagcctctggtggccacccccagtctctcctagaaggtttccagcctggatgtgtcaggctggcatgtgtgccaggctggatgtgtcatatggggcacagcctttaggcgcagcagtaggtgaccctttgtagggcaagggtctctctctgagtgtgggttctgtcctagcttttgccatctatcttctaccaactactgtggagcttcggtttcatcagtcttaagagatgagcaggacagatggctctgccagccttcaaagacacaaattctgcattctctctctctcttttttttttttttttttttgagacggagtctcgctctgtcgcccaggctggagtgcagtggcacgatctcagctcactgcaagctccgcctcccgggttcacgccattctgctgcctcagcctcccaagcagctgggactgcaggtgcccaccaccacgcccggctaattttttgtgtttttagtagagatggggtttcactgtgttagccaggatggtctcaatctcctgacctcgtgatccgcccaccttggcctcccaaagtgctggaattacaggcgtgagccactgtgcccggccgcattctcttttttaactccctccccccgccaccccccggctggagcagatccctgttctggctggtcccatcccctccacaagcagcccatggacactgaagcttattcctggagagaaagtgattgggagatccagggttttgcctggcttatagtttctgtggcatcatttgccctagatgctcaaacgtcctatcttgtcggtggaagtggcaaaaccacatttgacaccgctctaggtggcggctcaatgggagtggagtgctgcgcatctcctgtttgacctttcagtcgctgcatggctcttccaagctgccgcagcctggagaaatgtgaactttcaccaaagcctttgcaaatgagcttttccagacaaggcagatggctttgtttggccaggcctgaggaccccgggattgacttcctttctgctctttcttctcactgtcctcttactcccctgcacctcagaccttcagctaagcagattccactccccctggcccaggctctgggtagaaattggaaaaggagccgggcgcggtggctcaggcctgtaatcccagcactttgggaggctgaggcgggtggatcacgaggtcaggagatcgagaccatcctggctaacacggtgaaaccccgcctctattaaaaatacaaaaaattagccgggcctggtggcaggcgcctgtagtcccagctactcgggaggctgaggcaggagaatggcgtgaatccaggaggcggagcttgcagtgagccaagattgtgccactgcactccagcctgggcgacagagcgagactccgtctcaaaaaaaaaaaaaaaaaaaaaaaaaaattggaaaaggaggctctggtggattgaagaagcagccctggcgtatttttcttacttaaaacttggtctgggactaactgcctctggtcagaactgatttagtttttaggaatcatttgtaagacagacactgtgggaaggccatcctttaaagccattgattcctgtaataattatttgctgaacactggctctgtgctgggcacttatcaggggctgaggatatggtggtgaacaaaaccaacagcagtcctggagctcaggctcaacaactctattccttgcacacattctagccgtggagaatgtgggttgtgtgcttctcacagccttgaaggcaagggctggatcctactctccattgtatcctaaaggcccagctgagattctttcatatagaaggtatccaatgaatgtttgttgtaggaatagatgttttctgtatttcctaagactctaaaatgaatgttacttttataatcagaagaccataatccatgttggctgggtgcagtggcccacacttgtaatcccagcactttgggaggccgaggcaggtggatcacctgaggtcaggcgtttgagaccaccctggccaatatggtaaaaccctgtctctactaaaaatacaaacattagtggcacggtggtgcatgcctgtaatcccagctacttgggagtctgaggcacaagaatcgcttgaaacttggaggtggaggttacagtgagctgagatgcgccactgccctccagcctgggtgacagagcgagaatctgtctttaaaaaaaaaaaaaaaaaaatgactataatcgatgtctaattttaaagaaaaaaaaaaaggaaggttgggcagggcgagattttgacatggtttataggaagcctggggtttttttagttgactgttaagttttctttgaggcaacaggtgatggagctgctaaggacgccaccacaaagggaagtccagtccggtatttggttgcactgctcagaccccatgtggaatattccattccaggcatttattttaagaggggcattgacaagatagaccacatcagaggaggtcgtctgatggggaccaggacagtattacgggaaaaattccagaggaaccaaggagactcgaataaggagaaatgaggtggctacgttagatcttgaaggactacccctgggaggggggccaggctgcttccccaaccatgagtggccgtttgtgaagttaccaagagaaaggctgatccttgggctgaagaatttagcaacacctcaagatgcccaactcaaacaagctgtgtttatgaagtaccgaggggtgatgcccctttccccagaaatattcagagactagaattgatgaggcagcaagatggggccagggaccactttgcaaaccactggtgggtcctgcattatgaaagtccagcctggtccaaaccgtcccatttccagacccatagagcccaactggtaatatttcaggaggattctgtataaaattatatctttaagccctggtctccagtagatattggtttaattaccagttatttactgccatgctcagtagatgatagacaagcaagagaaaaggataaaatgaaaaaaattaaaaagaaaattccaaaccctttgaggtagtaggaagagccccctacttgctgaagatgattaagaaataaagagaaagcttttcttggagtcatgatgtaagcccaaagggaaagtaggttcttatttatgaaaaaaggttataacttaagctgttcagaagcacagcaattacttggagtaagatgcctcttaattcatttggcctcctttgtaggtggctgagtaagtgtttctgcgtcctcggactccagcccttctttggtcgccacttgcttttgttcacggcaggtcactgggtactccagaggcattgttgataataacatctctttcctcccccacaccacccgcaagcaaagctttggaaaaacagccaagtgttcagcaaagtgaaggcttcgcttttcttcctccccgctcctccccttgttgagaaatcccattatccgggagaatgattgtgaaactccaatctgtctgccgctgagctgtgggccgttcttcttgcctcctccgcccctgccctggtccccttgtctatctgcagggggaagacaaatatctatatattaaagctttaagaatctataaatctgagttgattctctgctggtgacagcccaagctctttcccaccacgtttgacatgatctaatgggtttacagttgtttgagtgcttctctgaagcaaatgaaagtgcttagttaggggacgtatgaaatggcattgtttgttctgggcactacagcaaagctaggggatcatctttaaattatccaccctttctcttcagccaccccgcagaacaaggggctctgccgctgaaggagctgcaaagacagttcctactggccttgcctttctgcttgagaggtgccaggactgggggggtaggatgcatccccagctgtattcatttcgccaggaagcttggggctaattgggaacagaagaatgcccaggggatgaggggaaggggacgggagaaggatggtctcaccaaggtagaggagtgacaaatacttgcttctagcaaaacaggagtaaaaacaagagagactcctaatgagagctttggggcagtttgtgctttccattctcaggggccagcagtgtgggttggtgtgattagttgccttgctacttggcgcaaaaccaattcctcttttcaatatcaagtttcataagcgtggaacagtaacaaatcattataaaccctctgggactggtgggtgtgtgatgatgcggggttgtttttctttttccccctcctctttgataagcccatcttttcagcccaggtacatttttcccattgtaaacagaaaatggcatgggagggagtgtgtctcggaaacttgctgtattgttaatctgttattaggcaaaagtcttaacaccaggctgggtgctcagatgcctcattgtgagctggggatggaattatgcatcatgaataaaaaccgctgtcaacatgcattggtttcaaaacattagagcatatggtatgtgattatctgtattgtcaagtgcaataaagtgaatttggatataataaaggatgtaatattttagaaatttggtaataaactaaggaaaggatgacagctgaggttccttaaggccccagacacaaataaattgaagttactggtctctgtggccaagtggcagaatggccgtaacatggctatctgtgctcggtgattttcaagttggggaaagctctgctgtcgctcggttgccttctctggaggacgcagggatgatctggcccccatgctgggtggtgggagaggcggtggctcccgttggagacccaggtcttgcctccttgcctggcctcaaggtgtgccctgtggcctgctctgagtggcagacgcatctgcctccagtcaagggccgccttgtgccagccatcaggacatctgaggacccctctcccctagacagtcacctctcagttaatctccagccctctttgtccccatttggtcaatgggaagatgttgctgtaaacgcaaggaccctgagcagccgccccttggaggcagccgtcttctggaacccacatcctacagggccaaattattaagtcatgacagcaagtcaatataagtaatgagaatggtcctctagagaggcgtgagtgcttcagcatctgatgggggctaggaactgtgccaggcttcggtgtactctctccttaaatcctctataaccctataatgctgctgtccctatttgaaggatgagaaagctgagacacagccaatcagttgtggaacagagattacaacccatgtctgaacccaaagcccaggctccttccacttacaaccttttctacaaatccagaggctctttccattcatagtccacaaataataacccacatgttcagaaggcctcaccacaggaaactggaaacctttacattactgggtacctagggccttgaaagaatgttccagaaaaaaaaaaaaaatagaaccaggtgaccagctgtctcctctctgttcccacttgggcctagcaggggctgatctgccttcattattcctggggttttcccttagcactgatttttctgtccagctctagcagggtgaacccatttatcatcatatcctaacagtttgccttggttcagaactcatcttcctcctctgggaagggctcctgcccccaccaaaccaaagtttatcgatgaaggctgaggcagcatctgtttgcatctcctgactgactgcttttgtgtttctgaccctggctttaccttgacccctggcatttgacttcagggcttgccttggcccccagcctacaggaaaccccgggtgaggcctgccccccacaccctccacttaggcctggccccttccttccaccccggcattctgtggctcttccagtcctggcttccagtgctggtcttgctagctgccctgccaggtggacggcttcattagtaagcgtgaaaaattgggagtgccaccatcaggccaggctaaagcaatttggatggctgggaaaagagaagacatttagtccatttcatgcctggatacccctgtaattcctgggacaggctgggaagaggcttcaataaacccctctggcctaggaatcttgtgaccagtttgcactggagacgacaactaggtgagttcaaatacacttccaaatcgctcagctttggtacctcagaggtggctctgctaaagctcttatcaccgcagtcaacatttattgatagctaaagtattttcaagtctcagctggtagcccactcattccaagcaatattgggtataaaatctttatataaaaacaacagacttgtgcaggcataaccagaactagcattatctcatttaatccccatgccagccccatgaggtcagcatcttttttttttttttttttttttttttgagacacagtctcgctttgtcacccaggctggagtgcagtggcacgatctctgctcactgcaacctccacctcccaggttcaagcgattctcctgcctcagcctcccaagtagctggaactacaggcgtgtgccaccacgcctggctaatttttgtatttttagtagagatggggtttcaccatgttggccaggctggtcttgaactcctggcctcaggtgattccccagcctccacttcccaaagttctgggattacaggtgtgagccactgcacccagctgaagtcagcatctttattcctactttataggtggggacataggatcagggaggttgatggcttgccccacatcacacagctagtaaacaaccaggatttctacgatgtcctcggatccaagattcaaatcctcccagtccatggaatttcactcatctgtcttaaaagagtgtgttgctttctcctcctccccacccaaacccttccatgtaggttcttttgagtaggctacactgagtgacatctgagaacaattttctttaggaaaaagagaccttgagtcgctgtctcgtgagtttctcccagacacagtcttagaacatgtagaggggctgagggtgaaccccgaagaacacttgtgttcttgctccagatccccagggctgcccactgacaactgtccccaccctgctgaagagctggtgaaattgaaccaaatgctcctaatgatctgtgaatgtattaatcctactttctgttaattaacaatatgataaaaccagcatttcgtaagtcgtcgcttaacacatgttttagcaattatatacttagtggtttgtattcagaatgctaatagaataaaattttaatgaagatacgatgctatgaaaaatttattgagacgagttcaggtatggctgccgttaacatgcaggagacaagcatctcagtttgaagagtgaacctccccaatgcctctcagcactgtgtgctgctcagtcaggaggacccaggagatcctgaaattggctgattcttgactcccgtgaatttctcatgcaaagatcccttcttggtgtggggaggggtccacacccgctggcagtcactgaaggtccctgttcccaccctacctccagacttctagcaatctctgtgaataagaggcaacttcagaaccagagtccatgatgtaccatctcaccttctcctagagagtctccaaaattttttaattgtgcagaaaaaaaaattagcatgccgccccccaatatatcttacctgatttttaatttatatgcatgtaccgctatgttaatattcatgtatattataaaacctatacaaataggactataataggatacattaagaattttatttattaataattaaagtaatatttttattactttagagagcaatatgattgaatatgctggttttaaaaaagaattcttgatttaacacttcatgatccaactctaaaggttggattctaagtttagtttattttgatacttggttttaatgcctggcataactgaaaaatacacctcacaagataaacagatcccagcggaggaagcacgattcactgtgctggctaaatcatgatactaatttttcaaccccatcctccaattatgcaaaggattttgttgaaattcagcttgtaaatttccatcttccctgatgtcaatcagtttttcatgcaaactaatcaagtgttgcatttttatatttttaacaaatgggttcaaaatccactgaaatgttcatgttttttttcaaatgaatctttacagttctgtttccggattttaaaagtctgcagatatgagagcttttgtagatgacctagttacatcatttttagcaacaaaaacactaaacaatagaaatattttccaaacatttgttttcaaagcactttctctacggtaccagtttctgttgaaaatcaggttcttcctcattcacttggctgcaacttgtcccatctgatcaagatatgtttttgggggtgtgatgtggctggttaggtgtcttgcctaagggtatggaaagggttggctgaccatttacttttgtggcatgtgcttgtatcattagtattatctccaatccatgttttctttgcagttacctactttgtaagggttggttttcttaaagccagatcgcataatctatacctccatttactggttacctgtaaacagcacaaggtaccagctgtgctcaggtgagtaaatgaggagccccaccctcatggaaacatttcctcttttcctttagtggcttataaggacaagtgtcttgctgacataaggacatgtgaaggcactgggattattcagtcatatgataaatgttagtgaagctggaattatttccaggtgacaaaaattaggcattaggcattatacttttttccttctcccaatgtttctttttttttttttttttttgagacagggtctcactctgttgtccaggccgcagtggcatgatcttagcttactgcagccttgacctcctgagctcaagcttcccaagtagctgagaccacaggcacgtgccacgacgtcaggctaatttattttatttcattttttgtagagatgtggtttcactgtgttccccaggctggtctcaaacttctgagctagagcaatctgcctgccttggcctcccaaagtgctgggatcacagacatgagccaccaaacccaacctcccaaagtttcttaaccctaactgaatcacttgggagattttaaaacatacagatgctggggtgctacccctaactcaattctgaggatgggacctggacatcagcattttgaaatttttccctgagtggctctgatgtaagactcactactgagaagcagtgttctagactgatgcatcttacattttaatttgcataaaatcacctgttaaaatgcagattcaggttcagtgggtccagggtggggcctgagactgcatttccaaccagctccctggtggtgtggatgtgctgattggtagaacaccctaaataatgagctccagactgtgctgccccctgtccgcagtagcctcctcacctcattcctccctgtcactatcccaggcctttgctgaagagtcagggagcagtctccgctccctcctggcagagccgccacgccaatccagctgcctgggctgctggtcacagcttctcagagaaatctggcttccagatgttaagaacagttccttaacagctggaagaatataataaaataggccagaccccaccccctggtgaatttaagtatgtgtgtctcttgcaaaccactcatcagaggcacccgatggtcatctgcctgcccgcagactccaggcaggtttgctggcagtgtagccgggtggggtcatggagatgctggcaggaatgacccccctgtggggggcgcggagggagcagtgggcacccagccagggctctgtcagtgggactggtctgaaaccatacctcataataaaagtcatataatttgtggcagcgctgaaaacctgctccaagtagtggtttcttgatggagttttggaaccttatctgcggctggtaaccattccttgagaacttgttggagaaaggcgagtgagcatcttaagaaggctgctggggaagctgagtgcaccagggcggggggccagcatgcccgcaccctgcacagccaggtgcgacactcaaagattaatggatgatttgggtttttttttttttttaacctaaatggatgcaccttagggtctttttttgagttggggtctcgctctgtcacccaggctagaatgcattggcatgatcgcggctcactgcaaccttcgcctcccaggttaaagtgattctactcagcctcctgagtagctgggattacagtcatgcgccaccactcctggctcgtttttgtatttttagtagagacggggtttcaccatgttggccaggctggtcttgaactcctgacctcaagtgatccacctgtcttggcctcccaaagtgctaggattacaagcatgagccaccaccacgcccagccctcttagggtcttttaaaagtaacaaggtgacctaggaattcactgcatgacttgttttacctctccctgtcctgaatcttatcccatcatgatagttggtaaagcaccatgaacatctgccttacagacatgtcaagtggattttaacaagtgaggctatatacagagacaaaagtaagcatgtgtggagatagagattgggctaggggagaaataacaaggctagtttgactgataggaggggctagctatcttctcagaagtgcaggtgtttttaagcaatcctgactggtgaggtggatcatttgtctcacagaggaggataccaagggtcagagtggttgaataacctgctcagagtcatgcagccagttgtgctagagccaggatttaagcccagatctacccagctccaaagtctaagcccttttccacccacctcagtggggacattaagtagattgaaactccctcttagcttgtgtgttgctcgctgcatggatgaggctggaggatgaacgtgagagaaggtgacaaatttgaaacccactcttcagtggagtagctgggggtaccaacccaaaaacccacctccagagggaagaacttccagctgataccccatctcccctgagctcagaaagccctgagttgagaatccttgaaggccatgctcccgcagttggagctcgccaaagccgccccgggctctgtggtttccagagcagatgcggaggcggcacgtcctcgtgcccttgctccagctgcgcacacgacctcagcctcctctgccccgctgggcgcgagctgcagtcctggcaccttctgctggggtcctgatctgagccagttgtctagcgatttaatttggtgaatttaccactgcgtcccagagtttatattggcacttaacagcagtaatatgtttctctctcgccaagaactattttcccgaccaagatggaacaccacgcacaaaaaataggtttgtgaactaatctgctgccctgacaagtgtcattcacagaatcactgctatagagcgcactcggaattaaatgaggctggggttgtctggcctggatcacaggtgctttttcccactcagttaacaggagtctgggatgagacaccctttccctgcagccgcaggcactttcaaatcacactatcagtattcatgacagatttctctcttagaaaaatggtttgaggatggttagaggtctctctctctctctctcttttcccttctaacctccctttcttccctcctgggtggttctttttaggatgcccccaccctgtctgtccttataaaatgcagctctgtaaacatttgtctaatttcacaagctcagggaggtgcccccatcagttaaaaaaaaaaaaatctcctagtgcctgatgcctgtttgaaattctaaagtggaacttaattgctttcgcgtaaggatttgattcgggcaaactgcccatacctctgggagtagaagcaggatctgtcatttacactttagtctgaatgggtgcctgaacctgggagaaaacagctttgtctttccctggtctgccttggatgtcagaggcttcttaaagacagcgttattgaggggcatggtggctcatacctgtgatcccaccccttggggaggccaaaatgggaggatcacttgaggccaggagttcgagagcagcctggccaacgtggcaaaaccccatctccttaaaaaaaaaaaaaaaaagtttcccacttcatgtaagagagttcctcaaaattctctttcctgtggagagttctagattctcttttaccatatggtctccacttagcttgtcttgaattgggaagcatagggcagagtcaggcttgcgtcagcatcagaattaccagagacctgggtaaaaacgcagttcctgggcaacacccactgagaccatgttaggagctggcagagcccagggatctgcatttttgacaagcccttcccccatgagagattctgctgcaggaccatacccagaagcattggtctaggagcacacttggccctcagccccaccttgatatattgtctaggagcatccataaataaatggtcgccaggttatggtggccaattggaaaaactctttgtaactaaagcctgatgaaacacttgctggttcatggttggcgcctgacttttagaaggtttctcctcacatttcaaggtcaagggttggccagcgcatccctgagctgaaaaggaaagaagagcacctttccagttgagaaattggctcccctctggcaaatgccgccaacgtagcttaatattaatttagggaatgcagtcttgtgcagttccatggaactagattggaaatctgatagtgccatttctgttatctgattcctcacacacctgagatcactccccgccccccacccaactccccccagccccaaaggtggctgcagaggcgcaggtgtgagctggctcactaagtcgctttccccctcctgattaagcgtgtgggggaataaagaagacccgtgtcgactcacgccgatctctgccttgcctgtgcttgagccacttgtaattccccacagccccagccaggtctgcaaggcaggaagaaatatgaccaggcaagttgagaaaataaattaaactaagtgtcaacttttcttgtttctctcctcattattaagagatggaatggggctcgtttatcaagcagggggagaaattaattgacacggctttaatatcatgatgtctggcgtgtctggtcacattccttcattttctggaaaggcattttattatagtttacagcaaccagctgccaaactactggtgtaaacgaggaagcaggtgcatgaaggatgccacagtggaggggctgcgatgccaccctagaggggacggagacatggcagagaaggagggccagttcagaagggaccccaaagagaggctgcttattttggggggagggaggaagaaggatatcagggaggagggagggctgtgctaagagggcatgccagcagacccctcgcatccatcgcgggcttgtttactggcccaccaggagggcagtctcaagtatctgcctctgatggcctcctgacctggaagtctttgttcttaaccatccctgaggctgggtgctgtgtacagctcaggtcagcgtgcctgccccttttctttcttcttaataaggccagggaagtgagcacttctctgtccctccctccagggcagctgactcatttgagagccagtttgctgcaaagaaacttctagcatcaagtctggcatcccagtcctacttcaggtacatctgcggttgggggtctggaaaggttcggagaagtcactctgctgtgctcatcctggttagactggcttaggagatactctagctgtttttctgtgtgaaggtcttctttgctgtgtatctctgaaaatcctcagtgcctccttccctgctcttatatttaagaaatcacatacttcagggtgcaggggaagccaacatagagctggagtggatgaccatatctttccccactctctccttgccctctgtctgccggattgtaagaactgagggctcttgcctatttcatagatgttcttacagggaaacatgacagagacagggttcaggggtgcagttgttggacaaggtaggaattgatgagtatggaacagtctgccttcatatgaagaaggtgggctgcaggggagagaacacagggtcccactggggcctcagttcttcgtctgtgaagtgggaacaatcatttctattcatactccccagggtggggctgggggtgaagattgagttacagagtggctgctcagtgacggcagatgagctttctctttttaacattattattagaatgtggactgatcctcaataaccacctttgggaagcagatgcgagttgtaatggaaggaatcctagcccttcccaccttacaaagtccacattggcacccggatgtaaaagcacacacagcctgatcatcacccaccctttcccaatccctagtgtctgaaaacgcccaggaacctctaatggcgactccaattggctctcactgaagccaaagtattgtgcagtgatttcccaacatggcagccagtaatcagaaacatgctgctgcttttgaaaaggtagcttgttttttttcttggaacatactgatcttctgagttatatttttcttagagcaaagccaaggcatgtgatgccacctccccatgcctgccatgcatctgtgcacactactcatcgcttctgcacttccaggtggggcctcagaccttccaagtttagggttgcaggacagctgacttgccaaacctgccatagctcatggaggtgacctagaaacgttccgcgttggggctggggacagcccgaggtgtggggttgccaatggacgcacagccaactggggctcgacttgtgacgatgcaagcacaccaccatgcctccttgccaggccggtccctctcatgctctctgagccatatggccaccaaatccatccctgaacacttactgatccaaagaagaccctgacagtcttctccagaaaagtaggggggagtgtgaaagtaacttggggtaccactcctgggttcagttcctgcctctggtttagcggccatgtcacgatggatgagtcactgaactgtgcagagcacttgagcacaatgacagtagcagagcctgccctgcctctcgcagagttgccttggggaccaggtaggacgatggatgaaaaggattttcaaaccagaaagtgctccccacacccacacccaagggattcatttgtgctggaagcaacccatgaatattgctttccccaaatactaggttattagcaagagagggaagctgcatgagttataaatattcttaagtacacataccttaaatttctcatgggatacccagaataaatttgacaatctggggttttttcctccctcatttttttttctccattaaccaagtatgttaactcatgacttgcattgattttcactgaagatgcattagatactacatgattgcccattagtgttcattgacctatatgataagagaagaaaattatttttgaggctaggaggaggctgttcccatctttctctctctgacctaaaaaaaaattctcttgtaagttaactgtcgatgttcctcagtgactgcgtttggagcaggtcattttaattttgaggtatctcgttttcagatttcgatcttcttcttctgtgtatgtggtcttttgtagcttttattattcagatgaatatttagttttgttcatttggataaaagagggggaaaaggtttgactgttaaatgcttatctcttaaatagtgcttacttgttagtttctaataatagcttcattcaagagaatgccagaatttcatttttaaatgctccctgtcaactgctaccctattaatatccatttttaaaccactggtgtttagggttaaccttcccaccaccttctttgtccccgctttgctgactactggagccccttggaagtgtggggtgcagttaaggtgggggctttaggagaggcggggcaggtgccactttgctgatgccaggtgagaagggtttctttggtgaactagtctcttgttgcccaagttctggccctttgtttctcccacctcccctagttgtcagtccctgggtctcctctccatcctgggtggtggcttgagtgagtttaaatacccagggaggagttctctggttcttaggaccaagggagatgagcagtggatgttcacaggggtaacccagagggccccgatggagtgccagccctcacagactcgccatagactagaatcctcactctgtcagggcctggagcaggatccctgcttctgcctgcatctcttacaggtccagagaggcaaagggagtctctggggcacatagcttgttatctggccccttgctgagtgaggataattgtgtgtctcttttacctggctgctacacctcagtttgatgggccttcatgaggctccatttctgattctctgtggggccctcttctagggcaatgagaaggaaataatcatgactccctgtcctccatctctcccaaatctcttgtacatccagtagattgttcaaaagactatgatgccttaaaaacatatgtcaaataaaacaagccaggcacaacagtacaggacatagagtgtatgatgccacttatatgagaaaattcatagtcataacaagtaaaatataagccggtgtggtggctcatgcctgtaatcccaacactttgggaggctgaggcaggaggatcgcttgagcccaggagtttcgagaccagcctgggtaacatggtgaaaccccatctctacaaaaaaattacaaaaaattagccaggcatggtggcacacacctgtagtctcagctacctgacagcctgagataagaggattgcttaagcttgggagatcaagactgcaatgagccaagattgttctactttactctagcctgagtgacaagggactgaaaccctgtctcaaaaaaaaaaaaaaaaaggaaaatagaggttactagggctgggggagggggaaatggggagttatttaacgggtacagaaaaggtcaggaggtggatactggtgatggctgcacagcattttaagtgtacttaatgccactgaattgtgtgattaaaaatggctacaatggccgagcacattggctcaatcccagcactttgggaggctgaggcaggcggatcacctgaggtcaggagctcgagaccagcctggccaacatggtgaaaccctgtctctactaaaaatacaaaattagccgggtgcggtggcgtgtacctgtagtcccagctacttgggaggctgaggcaggagaatcgcatgagcctgggaagtggaggttgcagtgagccgagatcgcgccactgcactccaacctgggtgacagagcgagactctgtctccaaaaaaaaaaaaaaggctaagatggttaattttatgttacgtatattttaccaaaataaaatacttatttcagaaaagaagactgtgatgccaaaaggatttttcccacccatcactctatcccaaatttctgaccccattgtttttgtcctcctctgctcattttaattcattttgggggttattcagcactaagttactaattcattgtaaatgctaatgcatctgtgaagtaaaaatgattatatgttaaggaataacacttattgataattaagtgttctgttgcttctttgctttccccaaatggaataaataaatattttagacataatcaagtttgttttctctgctcgggccaaacagacagagatgttgaaatgatataggtctttaaaacactgcaaatgagtcttgacattgctgaattgttatgcatccagggtacataggcttgaaatccgggctatctcctttaatcaggaaaatcatttttgtgatacttgaattttgagtcctgtggggttaggaaaaggaccagcggggagaatatcagagtcagaatttgagatgatgccctgagtcttgccccgacccttcctggtgcaacagtctgcattttaattcctgtctcctacctcagttgcctttcttcccatctcagagtgggaaactggggcatcagagagtcctgaattaccattcagggtatggaggtgatttgtgcagtggaccaggaaggagttggtttgcagcaggaaagcagcttccatggccgggaactcagccatggcctgccatggtgacttgactttactctggcctgtattctaggatcaagtgtggatctttgcttagctgcaaggtggctttaaactaggctgtcctctggctcatggggcagtgcccttcagtggtggcactgacttcatgttctttccccatagccaggatgggtttttctcattcatccactctctcctgccttcagtccagagcagcatgattggccaagtcagcaggcctggcgggaggaggttgcgtgcagcccccctgtgtgggatatggaggcagctgaaacctagaaccttgctgtattagttttctgtggctgccgtaacaaattaccacaaacttcgtggcttaaaacaacagaaacttcttgtctcacagttctggaagccagcgctgcactcccccaagaggttctgggggacagtcgttccttgccttctggaaaaccagcttcttaagactccaggtgttcctggtttgtggcagtaccactccattctctgcctacctctgtcttcacatggccttcttctctttctctgtgtctcaaatatcccctgtttgtcttttaaggacacctgtcgttggatttagggcccaccctaaatccaggataatctcttctcaagattcttaattaaattacatttgcaaaagctctttttccaaataaggtcacattcataaattccagggattaggacatggatgtatgtttggagggccactattcaacctgctacacttgtcctaattagcagtgaggttccctaaaaactggcctatcctggcttgttttatttgcaaggtgcctgggcgtgggggctggggcagaggggtgaccttcaaagacagatgagacccagagtgccccacaggctggaagtgaggggtgagagggagacgctgtccctgcatgggatcctctgactcgtgcctgttcgtgaattgtgcaagcagagggccattgccttgttgatctccacgtccttcacagtgcctagcacaggtggcagctggtaaacgcagaaggaagagcggaatcagtcttgaggcaaagcagtgactcaagtggattagcaagatgctcagaccctggaggagcagaaatggctcattcagtcactcacttagcacttggtgtgtgttaggggccctgttccgtcctgaggacccttagaggacaagaccccagcatcaccctcttgcagggcgctctggcttgaaggcacgctggccaatttccgcggcctccgcagtgccacccctccctccctgtgggattgcgggagggtgctggctcttaatccattctactggggccagttaggatctgggccctaggagggtggggctgggggaaggggattaaccaaaaagattaagttcctggctgagtgctccaggggtccttgactgggtgggagttttaacctgatgtttttaaggctcctcccaacccaggattcctgagacataccccagtagggtgagctgaatgccctcaggaaactgaaagtgcttaaaggagcgcttgaggaacaaataccccaaagcccaaagagaagtggcttggggaagtgtcggtgtggctcttctccagctctgcaatgatcagtgggaccaagggccaaggagaaggagatgcccaaagagagggaataggatagcgttcccagcagctttctctcaaaggacctggtttagggggtagggggtataaacctggtgaaaggtttttttgttggacagcatttcaaaccacgtatcctgtcggatgtctgcttcaggcctctgaggtaactgagaacctagcttttactgggtgacactgggagaaactcggcatctttgagcccctccagcagacactcatgtccactttatggtacatctgatgctgccttatgtatctacaacaggctggactgtgtatgctgggagcactggcccagtatttggcgggtggtggtagcaaatgacatgataaagatcacgattgctgtgtttcgtggtcctagccctctgttttactggaaatggtttgagagcagatagtagccttttttattctcataccgaagaatctgctagtccctgcaggagctatgctaaaggagctccacatatcagctccctgtttcctggtgttccttggaagatggtgatgttagagttggatgcatgagagtcagaagggacctgagaaattccctctccgtcttgtgttgcagggacccaaaatagacacagagtttgaaaaggaagcatctgtattttgctcattgactggaaacacaattatcataatataattgtgatagaacagccattcagtttttgtcttcctgcttggtgtgtctggccattcagtttttgtcttcctgcttggtgtgtctggcttagtgttcagccaggttcatacctttggggagaagagtgtcttagctggggcggctataatgaagtaccatggtctaagaaaaacggtttatttctcacagttctggaagctggcagttaagagcagggtgccagcatggtcatttctgggagggccccccttcctgtgtacagacagctgccttcctgttgcatcctcgcatggtagagagaaaaaacaagctttctaatgtctttctgtaagggcactaattccatttatgagggccccatcctcacgaactcatcacctcccagaggcctgaactcttaataccatcacattgggagtttggatttcaacatgaatctgggtggggggtcggggggcagcaaggggcagccacaaacattcagatggcagcagacagccttgtgaatcctgatttgggctgtgacaggaggtgtgaaacccagggtccagttctaccaccttcatttgcagatgcaaaagttgaggctcagagagggcaaggggctcccccagattaaacataaagtagatgcacagtgagaagtggaagccaggtctcagtctccccatcagtgtgtctgcccccatggcctgtgctccctcgccatgttaacgctaccatgtggcagctgcatcccatccaaggagggtgcaaccctgcatggggccatgtggtaaagcagcacttactgagtggggtcacagatggggccacatgctggaaacgctgtcggaggcgggaggagaagaaagaaaggggcaggagggtaggagaggaactgaggatactgagcagcagtcgcctgccaaaattcttcagtgcagcttgtctagcaaagccggtctccagcagagtacatacagtggatagctgacgggctgacagcaggcatcaaacagtcttaaactgccccaaatccagagcgcttttgaagcagcagtataaaaaggatgcctgcgcggaacagaggcctgaaacttttaatagtttcttccaggcctcaggatgtcctgatgaggtattagaggaagtaattcaggaagaaaaggacaaataaccacctccgtctggaggccgacccgagggctggccagggctgctcgcggaaagggcaagcgtggccccgcagtgatccacgaggctctggttagcccacccgcctgctgccgtgcacagagccgcggggctctgacccttgtaaataacagacaagtaaatttcttgtttgcttcggggcaaatgtaaaccacacagtgcccgctgcatgtgggtgaaatcattaacttttcctcgctgtcggaagggtgctcagtacaaattagaaatcattgcctccaacctcaaggtcctcccaaggatccgcctacctacccccagaccaggaggctgtcaagacctcaggacgtcagagaaaaacctgggcctgccagaactgaactcaccccgcctctctttgttttttcttctctctcttttcctttagggtttggctttgtcacttttgagaatgaagatgttgtggagaaagtctgtgagattcatttccatgaaatcaataataaaatggtaagtgtgtaggggttgcgctgaaatggaatgccccctttctctacgtacacacccagtcttgcagactggtccagcccatcatcaggctggagtgggcaggggtggggagggggctagatgctcggggtccaggcctgtgaacagtagcagttgtttcatactgaggtggacaaactctgtaaagggccaagtcgtgaatattttcatctttgcaggccataaagctgactgcagctacccagttctgctgggtagcgtccataggcaatgcatacataaagcagtggggctgtgtttcaataaagctttgtttatggacaccaaaatttgaaccttatgtaattttcacagatcacaaaatattaattttttaaccacttaaaatgtaaaaaccaggccaagcatgatggctcacgcctataacctctgcactttagaaggccaaggcaggaaaatcacttgaggccaggagttcgagacgagcctgggaaacatagccagacctcatctcttaaaaaaaaaaaaaaaaaaaaaaaattagctgggtgcagtgcacctgtaccccacctactcgaggtgagaggatcacctgaccccaggaggttgaggctgcagtgagccatgatcacaccactgtactccagcctgggcaacaaagtgaaaccctgtctcaaaaaaaataaaaataaaataaaatgtaaaagccgttctcaattcttggactttacataaacaggcagaagggcgggatttgacctatgagtcgtaacttgctggcacctggcttaggatattcttttgctgtgcagcttttgagaggtatatcctagataggaagtttactgcaccaaactatttttctctttgggtcctgctggaaaattaacattccctcccttgccatcaattaatttctgccctcttgatcagctgcttccttccctctctttggctctttaaagttcctttttctgccacagcagcctcaagaggaagggaggttggattactggaagtttgggaagtcgtgtaggcctcccagatcagtggccaccagagggtgccatatcatgcatagcatttgcacactcacaaactcctttcttcggattgagtaggagggtgagaattcccttctttgttggttccagaaaaatagaagctcagcaggtgtttctggaaccagtcctttggagcaaaaacattttggttggccacgagagcctccagcctcaagagaagagggagggcaaatctgtgtttcaattgcagctgtaactttaatattttcttccttttgtcaaaacatttcttgcttctaaaacatgcgttcagacatgcattgtatattggtctgatatgtgttcaccaactttaaattcaataatagagcttttagtgtggataagatcaaagcaatctgcttagcatgtggcgctacaggcctgattcaatatttgacttgctaattttttcccagggcactaaaataatattgttcgtattgttccttgccatcatatgcatctgaaatgaaaatactctttttttgcgtactgtatgttggaggcatcaactcagacattaaaatggtaggagggagataagtgtgacagaataacacaggtcccctcataggctttctcagctccccagatgtccgtgcaagtttacagttggtacttttctcttggtaggttactacttgctattttttttttttaattgagacagagtcttgctttgttgccctggctggaatgcagtggcacgatctcggctcactgcaacctccgcctcccgggctcaagcaattctcctgcctcagcctcccaagtagctgggactacaggcatgtgccagcacacccagctaatttttgtatttttagtagagacggggtttcaccatgttggccaggctgatctcaaactcctgacgtcaagtgatccacctgcctcggcctcccaaagtgctgggattacaggcatgagccactgtgcccgaccagtactagctatttttaaaaagagagagagaggacttaaatgaaacttgcatccactgcccagatgccttgtttatcctagccagagcacgccattgacaggctccactaaggctgctgggcagtggggaatagaagagagtactggcagatgccattcctgtcttgccaagccttaagggttcatcaggaaaggccagatgtagaccggaaggacattgctccatttgtcaccttgaatgcatatgtgtagcccttccctgttgacaggctttgaaacaaacccgagacacagatggggaaaggctttatcctgggaaactgaggctcaggggataggtcccaggctatccagagagcgaaggagcataggtcttgagcttactggtgccaaaggaactatatagacagttgttggagcttgggggtgggagggtgaatccccagataacccgggcagcaatcaggaagtagagcttctgccccagaagaagaacccatggggctggcttgaagccagagagatttgcagccattttcctgtttcatatttatcgccttctctcccacccaggtggagggtgactatgtcaggtgcacgtaaccgggtttttagtgtaagggtttgtgtttgcctttgaatctggggctagtacttgttcttcaagagaatgagcaaagatggaagtagacaagaggaagaagtgggggcagattgattcggatgacaggctttggaggtgttggtccacgttcccagcacagcccaacagttatgagctccaaggtggggagtttagaggccctgggagaggactttggagaagaacactgggccttgctgagctccagtaagacagggctggtaatgatactgcctcattgggttgttagagactgggtgacataccaggagcaaagggcttacttagcacagtgtctgcacagggtgcaagcttgatctgtgttatctcttgccattatccttgccatcatccacgagttgtcattgagagagatttctccagccaattcccctcctctgaagaagggtggaatttaaagggtgttggtagagaagcctgcatcctgaattgttttggtttttgtgatactggtttctacttctgaggcccaaagaaaaggaaatgagtttaaactgggctatggacagaattcaaatgagatatctggaaaaactgaaaactcagagactgccaaacaagaacatggatgattgttagaatgtgcataggagtgtttcataaacaggactgtgctgtgaaaccacagacccatctcctcaaaccctcgcaatctttctgggtatttggcaggaagtggcagatagctgcaccccctggtacatactggagccatgatttttttatattcacagatgggaaaggtcttactgcagattagtcacagacatagtacttgaatctaggtcttctggttcaatctcatgtgcctggcacttaggagaccctgtataaataattgtggactaaataaaggattcactgaaggaccacatgtctgtgaggcacattataattcctaaagccattgcccatctaattgggtcggggagtctcttcctgggcattttttaaaatggagttccttctctaccatgcagaagggccaggagaaggcgtgagtcattctactcacaggggaccaggatagctgtctttgggaagtggggatcacaggaatccttccttcattctccatgtaggccctgccttaaggaggttatctccaggcaggaggatgcccagaaagaccccacatgacaccctttcacacataaagatcccactaatagctgacattgggtggtacaaactacatactctactaaacactttatgcatcatgcatcttatttcatttgattttcacttactctttaatcattatccccacttacagattggcaaggcaaggcagagagaggttaagcagtttgcccaaggtcacatggtcagcaaatggcagccccagaattcgagcccagaaagctatactccagagctcacatctgtacccatcagactgtgtgtccccttcaggccaaaaggggctttcagggttatgtagctgggctgcaggccctccatcactgaccaccctttcccagtcagctatgtcgtggcccatgtggttccatgttctcctaggagaagagcagaggagacaggccagattcccagctagggagaaggaccacgcttgggtttaacaggtcccagatctccatgcctcttcctccactgccacagacacagataagtgacgagcatgggtcaggagctgactgccacccaagctcagggccaaacccacaagctctccaagccagagcaaaatgcaaatgtggctctttatcaataaacacacacaaatgcatgcacagagctgcctcgtgacccaccagagaggggatcctccctggccactctgtgtgccccagtgcgggtgcagctaataatgcctcccgtggcgtccccctgattgaagcagcccctgagcagcagggacacttgcttgatgagtcaccacagcccagccttcaagcggcctcctgacgagccgggcagcagcaggaagggaggtgagaattgacaagagccacctccaggcatccgcagaggcctagtacagcctagagcttgaaatgatgttggggagccatcaccaccctcattgggtgagagcgtgggtacagcctgaaaggtgcctgggacgagggcatctcgggtagagcctttcctcacgcctgattcaccagaaaggaatcggtgcttataggcactgggactgtgctttacgtgcgtgctgtctccttttgtcctcacaacatcctgagcaggagtcctcatctcattttacagaggggttcactagagctcagcagcagtggatcttccttggtgggacagttctaagggatagagctgggatttgaacctgtgtcattctggttccgaaccctctgttcttctcattataccttgctgcccatttaggcaaacctagtatttgaaaaatatggatttatatgatgagtgaatatcaagaagagtttttatttgcttcatacaatactactgcaggattactttaaatcaactttgtccaacccatgacccacgggccatatgcggcccaggatggctttgaatgtagcccaatgcaaattcataaactttcttagaacattatgagattttttttttaatttttttttttaaagctcatcagctatctttagtgttagtgtattttatgtgcggctgaagacagttcttccggtgtggcccaaggaagccaaaagattggacacccctgctttctgttttttgttttttgtttgttttgttttgttttgtttttggagacagggtctcattctgtcacccaggctggagtgcagtggcacgatctcggcttaccacaacctctgcctcccaggtctgagtgattctcgtgcctcggcctcccgagtagctgggattataggcatgcgccaccacgcccagctaattttttgtgtgtttttagtagagagagtgtttcaccatgttggccaggtggtctagaactcctggtctcaagtgatccccttgcctctgcctccaaaagtgctgggattacaggcatcagccactacacctggctacacccctgctttaaatagtcctttttcttactcctttaaggtgataggatttacagaaatttgctaagtaactcatgggtacagctactttggttgtcccttgtcttggaatgagaggtctggatgctggtaatcaaagtgtggtccatgtaccagcagccttggcagcccctaggagctggttaggaatgcagagtcccaggacccaccctagacctacagagtcagaatctgcatgctgacaaatccccagtgattggcgtgcacattaaagtctgagaagcaccaggcaagggccactgctaatgacagataatgtgggacttgtgggtcataaattgcccagccatcatcatcagaaggaagggacttgggaatgaagggagcacggagccaggccaaatggggccaaaccaggcctggcacctggacctccaggccagtctggtgctcttggcaccactccatactccctctatggtcaaacagagaccagatttccgaagatctcccagaggaagctctcagtgccagagactgctcccgcccctcaccatgccctacccctctgggtgcaggccttggagcattgcttgcagaagacacgtgaggcatgcatctcttggggtaaagggctcgattctcctgagtgaggtgcacgtgtccttgtccccaagtcgggacctgctgggtcacttagaggcaccaagagagccttggaacctgagcctgaatcccaggtccaccgctggtgattctgtaaccacaggcgagtgccctacctgtctgcaccagtttgctcctgtgggaaatcagaaggttgaggatggctgccttttgcagcttatataaagctctgctttgatacctggaggtctcggcctgttctgttgtagggtatgtaattgggtagccttgaaggaatcagcccttgataacttcacgtttcccccactgggcctaagccaggggccagcaaattttctgtaacgggccagagagtctctgtcacatctactcagccctgccattgtagcacaaacacagtccaggcaatatataaatgaaggggcgtggctgtgttcaaataaagcttatttgcaaaaactcatggcagctgggtttggcctgctggccacagtttgttgactcctggactaaactaatctagctcagagcaggcccagtcagggtgctccttgtctacaggggtccaatgaaaggcatttagccaaatggtcagccagtttcactattgagcacacattattaggggcagagtagaaagggggtgccccaaacaggcacacgagtttggggatagcagcctgtggaaagtatcagtgccttcattctttgggggagcccccaggtggggagtgacacaatggtcagaacagggtgctgtcaaccagggcggccttcctggtagagggtgcctcaagtcctcagtgctgaacccccttccacttcccagctttgtggccttgggcaagttacttctgtgtttcggctctgtggttcccctttctataaaacaggttgtggtagtgcctacctcggagagtgctgtgacttaagacttgtaaggggtttggaacagagccaggccatggcacgctctctatcagagtgatagattttttcaccactgtcgtcattgtcatcattcttagaattattttactgagcaaataaagagttagcaggtaaggaggtcctcagcagattataagtcagtaaaatgcaagtggtgcgggacctgggcaggactgggtcccgagcctgcggggcagggatggagagtatgaggtgggcactctcagtgcctctggggatggtcctaggaaaggaggtggtgcacctcccaaagcaggaggaaccaagagatgtgattgtctaggtcctggaaaagctgagtcccactcttcacctgactcattctttaagaaggttccagaaaaatccacttctaagagcaaagcctactgagatcttaggcctgctacccttcagcccagggcatacctgggggattgactcggaacaggggattctggggaaggaagggcagaaggataagaagggaggagggtcctgagctgtcctcttggactcagggctgcggtgctgtgaccagcccatccatggaggccagccgcaggctagggtcggcttctgggccctgccacctggcaaggtgcccagtgattggctcacccccccactccttccagctgctcctcctcagccctgaagacaactcagtcgggaaccagcccaaaagtggtgggtgtatttgtgtgtggggaggggggcgggtaatgtgggtggaattaactaggcttctgtattcacaatcctatttgtagcatcattctcactcgtaagctaattttagccatccattctgcttctgttgccatttataaaatgagaatgtcaaatgcaatattaaacaagcaggatgaaggcaaaaaaggaaatgccagagaggcatttaataaatgaatctggtgtttacgtgggagagggagagatcctgccccccacgcatcacacacgcaagcgcgtgcacatgctgtttgtgtacaggctgtgttaatgagagcagagtgattagtgtgttgggggaggccgggtggttcggtggtaaatgtttgttgctctttaggcagaagtaatttggcctgcagggagtggcctcccagttgcctgagtggttcgcttgcccttcatctgtcctctggcgatgtcagtgtaggcagggccagggagggcagtggtctgtctcctcagtatctcagcacccagtgcctctgggcttttctgaacgtgctgccaccagcgtccccgtactccacccccagggcgcagggtcatgagaggggagcatggagaccactaggaggggctgcccccccttctcttctgcctcttccccgcgcagaaggcagggcatgaacagtctgcgcccgtatgcagctgcagagaccaagcccagagtagcgtggctcttgcctggactcttgccaatttctcttctagtttcactctagtttccccagggcctgggagttctgtccctggttcttcctttgccctcttctttcagctgcctctgcctagaaaagaaggctcaagccataccttttattttctccctcttttaaataaatgaagttaggccccacgcagggcctctggcccagcccaccgtgccctggggtaagcactcctccagccttgtggcggaacctgagcacctgctggaggctgaggtttctttccactttgaaatgcccttgcaggttcccagaaatgaaaaggaggacagctgctgctgccaccatcagctttttccccaaatagtgcggcctgggaagctctctttgcacatcctgctgatgaaagcagggagatgggacctacctggccgacaggtgcagggagggttagggagaaaggcaatgactgtgtgctaagaatctgctgtgctggggaggctgctgctctctctcttcctcttcactccccattctgggatttcagtgaacacagatgtgacctgacttcatcaccttcaaaggcactcacctaggctccatgtggagagggcaaggtgtgactcaaccaactttatccagtgcaagcactttgtaggattagctccgagagccctatggggtaggcacagctgtcactgttttagagatgagaaaattgaggtgcaaagaagttagtcagctggtctcagctcagagagccggcaagtggaacagagatttaaagccaggagccttagccctaggctagactgccgtataacagactaggaggcacccactctcagatctgggcagggtgggggctgcagttattggggtacatctcaggtgatattggggaccagctcctctctacccattgcccagattctgaggacctctgagggaagagccacatctcagccacattcatttctgtgtccacacccagccgctgcttggtaaatagtagatgcttaatgtttatttttggtttatgacctattttactttgccatcactgattgtaataaaacactgagcagaggaaacaatggatgaaattaattctggaagtggtaaggagatcagttgtggaagctagcatcgggaaaggctttgtgaactagacgcagataggccttgagggttgggtggagagtgtggggaagggctgtgtgaggtggggtgatgggggggggtggctggcagccagagacccagaggagggagcaggggttttgaagctgggggtctatgattggattctgactgtgctttgtgaccttgggcaagtcattccttagaacttctgtgtccttttctgctgtaactacgaggcgggtaaggccatcgcacagaggaaatgaggctccatgcaatgagggagttgacaaccatggacattctttgaggacttctgtgtgccaggcactgtgctttatatccattatgtgtatatgttatgtaatatatgaaaattacaaggatgttgtggctgtgcctagttatggatagcactcaataaacagtgcgtgccttcctccccagagtaaccctcctgagtcaagattataaatctaacaggtctctcaatgccttttgcaaacaggtctgggccatttataacatgcatgtgtcctggaaggtagacattcctgctgcctgcctttccctatggaagctggcagctccatttctgtttgcacagtaaccccttcctctgtagactgcatgggcaggtcccacatccatgaggacctttttgcagtagaacaaggaaagttatcatttacaagtaggtcccctggtgcttggccacacgctggtccctgtccacaaggacagtgcctgattatgatgtctgagaagggaggagggagggtctcttccgctcactttccagtatccacagtgaccagctgggaagcctgtctgtgttaggccgttctcgcgttgctataaagaaatacctgagactgggtaatttatttaaaaaagaagtttagttggcttacagttcagcgggttgtacaggcatggtgccaacatcgctaggcttctggggtggggcctcagggagcttttactcacggaggaaggcaaagtaggaacaggcacgtcgcttggtgaaagcaggtgcaagcaagcgagagagtgcagggaggtgccacacatttttaagcaactccgagtaagagctcactcatcaccaagcaggtggcccaaaccattcacaagggatccacccccatgaatcagaggcttcccaccaggccccacctccaacactggggagtacatttcaacatgagatttgggcggagacaaatatccaaactatatgactacctgagtttgcaaaggagcagaagggcttgtaccagtgagggaaaaggactgcagagtggttagggacccttcccctgccagattgaaggaccagggcttcccagcacagctgccaggatttacaggggtgcaattgctgcctcaccaaccccctagccccttactggcttcttaaggccttgccctcacctggccacatactcacgctagtcaggaatccatcttggcctctggccctgggcaagaagagcaacaggatggaattgaaaccctggagcagatgttagaactgagtagaggtgacctggctctctgaagctcacgcaggagtgatggtgacatgcccatctcaagtgggagctgcacatggagggcagccgaggttcctgcgtttccctccccgggccacttcacctcccctaggtgggttccaccccctctccttgttacatcatagcctctttctccaacacattcaacagctctctctcagcagtgccagcttcctgggtgtaaggcctgagccgtcgcttggccctgtcctcagaggccccccacgctggtctaatgctctgctctttgttgccgtcttgcaaatcctagtcattgttggtcaaaggaccccttgtcgtctttttgtcatgggccctgttcgttctgctgtgaggctgactcagggccaggtgccgtgcaggtacacagtaggagttgaactctgatcaagggcttgttttgtgtttatcttccttgctttgcaagttccttgagggtgggtctccccgaatcttgattataaacctgcaagagccttacaaaatgtcctgctttttgtggggtctccagaaaggcttgtgattggcagagggggcaggagagcagtgaccaggaagaaaaaaggctgtggccactggatggcaaaggagggctgtgcagggaggtatgtgtgacatgtggtctctggaggccaagctcacccctcctgcctcagtagcaagatgtgtgtagctgtcaggctctaggcaagacactttacacttgagtagcatctcccctcctcttcaccatctccctgggcagggctcagggcctaatgtccggaggtgaggatcttcagagaaacaatgttggcctcaaacccaccagaacctggctggggaagaggtcaagctgatcaggcgcaagaccaggtcaggcctcttatgtctgttaggaaacgccacagaaggacagatacccaccctagaagctgcaggacctcctctcctcctgagccctttcctccctctgctcccctcccctttctgttagccagacagtcagacggtcaaggttgatacctgagcactggggaattttatccatcgaaataggcctctccctctggaggactaaacagtctcagacacgacctgtttggagtgagaaatgaaactgcaaacactggcctcttcaggccaaacaggctttccttgtcctggatggtacatcaaggccacaggtccagggcttggatttccctctgggccccaaggccgcgtgctgactgggttcttttgtacagagaccagggaaaaacaaaagccctttacttcccaaagcttggcatactcctcagactgccagccaccatccccaaagatgccagggcagtgagcttacctttgcaagggcttcggatccactggggaggagtggccactcatagtagctgcagggaagctgttcttgcagaagctccagcacctcctctgaaagccagtgctaagcattccccgctagggagagggtgtaacgcagggccacagcacccactctcctggcttgggctggggctataggcagatcgggattaacatcccagccctgcacacaggtactgggtctggaccacaggttagatgtctgagtctgagcctcagtttcctgctccgtgggatggatatatagctataaaggtcattatcgggtccgctggcaaaacaagcgtatggaaggtaaagtattgcattaatgttaaacgtactgagactgataactgtgctatgattacgtaagaaaatgccctcatgtttatgaaacgcataccaacttactctcaaatggaaaaaaaaatcctggccaggtgcagtggctcacgtctgtaatcccagcacttcgggaggctgaggcgggaagatcacgaggtcaggagttcgagaccagcctggccaatgtggtgaaacccctgtctctactaaaaatacaaaaattagcagggcgtggtggcgtgcacctatagtcccagctactcgggagactgaggcaggagaatcacttgaacccgggaggcggaggttgcagtgagctgaggtcacgccactgcactccagcctgagcgacacagcaagactccgtctaaaaaaaaaaaaaattctacatatagagggctcaggagtgtgtgcaaatgataaggcaaaagtaacaaaatgttagcagtaggtgaattctggtaaaggatactctccttgcaacttttctgtaaatttgaaatgattcctgagtaaggagttagaaactgcaaacctccttgctgagttgctgtggatgctgatgggaggaggcacccaacccagtgggcagcaaggacaagagtgttagcgaccacaggggccacactcccatcaggccttcgttttgttctctaaaggaacatgctgctgccctaggtgtccaggggctaggtgtccaggggctaggtcattattctgaacccattaccatggggactatgaggaagccacaccctctcttctaaggccagtttgtcgaacaaagcagcatattgggagaagaaaatttcagaacaaatcccatcaattttgttggggtggggggtgttggcacatccctggtattgggagtgttttgtggcattgccagctgtgcaccttgaaaacagagacctggtccttctggtataagcagttggtcatcagtggcctctgaggcttcttacaagtgctcagtcagatggaacatctcactgcatttcttgccccttgaatagactgctctggtcagttgctatttgaaacagtagcagcagtagcagcagccactgtgagaagccgttggtgcaggagactcaaggactgagactgggaggtgggccttcctcaaggggaagtcttaggaggtggggccaaaatacctgcagcaagaggcctggtccccatgagcaccacatttgttttgttttagaggaccatggggagccaggcaggcctgtgtggggctacagtgggaagggagcccccgtgccctgccctctgccctgtggtgagagcagccctaggtgcccactgctccaaggacccagccagccaaaagccagagtgtgaggagtgcctcctgctgccctgtcagctcactgcccttcaccgaccacatgtggttgttggtctccaaagattatccctagagccccctcccacacggactctaggctggcccagtgtcaccagtagaatgtgtgggagggaacactgtgagtcccaaggctaggttagaagaagccttgcagcttctgcctgagtctgttggaatgcttgtgcttgggacacttcctcttgggacttagccaccatattgtgacaagaccaggcgccatggagaagccatggtggacgccccatcagcaggcccagccaaaccagtgtggctgcctgccatgtgagcgaggagccatcttgggcctccagcctcgttgaggcctcctctggcctcagccccagtcaccacctgaccacagcgccatgagaccaccagcaagagcccagctgagccggtcaccccacagaaccctgaggaaggatgattaaattgttgctcaaagccactaagtttgggggcagtttgttgctcagcagtagatacctggaacagagcatgtgaccagatagcctaagtacatgactagaaccgaaaagatagaccactttttaccctttttgggttctgactgtcacccgggttgttcatgccaagctctctggcttatgcagggcctgggggaggacagcaggggaaggtgacccgatgtgggctaactcaagacgctcgagaggctaacaagtgcagaagcagcgaggggcaggttgatgtgtgagtacttgcattcatcttaggagaacaagacagtcagagcctcttctttttcaatacaatgagagctctcagagaggtggaggctttccttatttatctttgggtccccaaagcctagcacttgcctggcgtgttgagttcctccgcatctgcgtcattgaattaagtggctgagtctcgggggtggaggggactggacaggcttcctggtcctgagaagtctttcaagaggccttcagggcaggcaggccaggttccctgctgttaactgttacctgctgccttcccctgtcattcagatgcccaggacaggccagggtcccctggagagtgtatgcgccatggcccctggccttggggaacactcaccgttgacccagcaggtggttggcactcagacagtcattgctgcccaaaccaccagcagcaaagacagagcagaattaaacagagctgtcagccctgttcagtgagaggaagagtaggtgggtttgtttaaaacactcccattacagtcagttaacctttatgttccctaaatgaaaattgtataaacctgagatttccgttgatcgggttgcctaggaacaggcagcaggttttcataagacaatgcagtagattgtcaccgatagggctattaggaagtgagctggttagcggtattattccccttgctggtgttggctttgggtaattatctgtctgcctgtgcgagacacgcccatcttcctaggcttggggcaggttcatgcaaatgagatttctcagcctgctcctctggagtcctgaagccagttttcacccctgggcttaggagagaaacctaaaagagccaatttggatgagtttgttgttttcaatcacctttcccccctacctgcaatgacaatattctaatagccctatcagtgacagtctattgcattatcttacaaaaacctgctccctgttgcttagcagaaagcttagaaaataactagcaaaatgcccaattaaaatttaaaaacagagtgattctaagacaactttagtatgtcttttcagtatttttccctatatgatatatgcacttgtttatttttcaaaaagtcagtgacatttgctgttttcccgcttgcagttaaagaaacccatcatcctggtttgcctgggactgaggggtttcccagtaccagtgcatgattattatcaacacactttttcatagctgcatagcattcaatcagtgtggataatccaaactcagctaattccctgttcttctatattttaggtatttccttttattaaaaaaaaaaattctaattccggtagggcaaattcctagaggtaagattactaggtgtatgtataaatttatggcttttgatgtagtgtctggttgccctccagaaaaatacgtgccaatttccacccctccacactataccgtcagaaacccttacatcaaacaatgctttcatcactgtcaatctgtgggcaaaaaatatgcttcatcttggggaatgtgttctttattagccgtctgtgaattgtctactcctgtcttttacccatgtctgttttgggatgctcatctcttttaatctatagaactctgtattaagcatattagtcatgaatgttgaaccattttgtccactttttaaggcatttgtggttattcttgaaagagcaagagtaatacctgttgtccggtgtctttgaagaaaggtgacttatatcttaggtaattatagcatccccctaaccttgagcactaaaatattttttgattgaagtatttgggatgtgagtatctccaaaatggataacccatagaggttccttttttattttcgttttatttattttttttattttttgagatagagtctcgctctgtcgcccaggctggagtacagtggtgcgatctcggctcactacaccctccacctcccgggttcaagcgattcttctgccttagcctcccaagtagctgggattacaggagcatgccaccacacctggctaatttttttgtatttttagtagagacagggttttgccacgatagccaggctggtctcgaactcctggactcaagcagtctgcctgccttagcctcccaaagtgttgggattacaggtgtgagccaccacgtccggcctagaggtctctgtttaaacaatgtatattgcacacagtttaactttttcttgctatctcaggcacacctgtgaacaatagcaattttctgtgttacagtgatacctcagcagctgttgaactatgtagagcttttgttcctataccatatggcccagactgctctttaaataagatacctgtttcttgtcttttctccgtcatttaaataagatacctgtttcttgtcttttctccgtcactatcaggcggccatgctgtttcttttggctgttaaaagcatccgtgccttaccctgcaacatcccatcttcatcagcagtgggattgatgactggctaacaatgcttgttaaatttctctgtaaacaaaaagcaaataagtgctaataagcacaggcctaaggcgctctggtaaaacagtgaaggagcttccgagggccacagttttacttattccctgaggtttatagttcgcatagttaaggttattaaataagtgacctctgggtatacaagcagattagcatgaagaaatttgagagtcagaagggaaacagaaaggggagattagcaaccacttgaaaatgtagctgcaaatgagaaactagtaatccagatgaacagaatcagtgtttaatcttattacttccctcaggagtgtggtggtggtgtaggttttgtggaaatgtggcattgctgacctagaaattctaaagatctggtttgtaggcctgaacctgttggggagggctttcagcatgttgcacaagaatttttttttttttttttttttaagacagggtctcgctgtgtcacccaggctggagtgcagtggcgtgatcatggctcactgcagccttgacctcccagactcaggtgatccccctacctcagcctcccaggtagctgggactacaggtgtgtgccaccacacctgcctagttttttgtatttttttagtacagacggggtttcaccatgttgccaggctgatctgaaacgcctgggctcaagctgattcacctgcctccacctcccacagtgctgggattacaaacatgatcccccacgcccagccaacacaaaacttctgatgctctgttttctcatctgtgaactggagctaaggctaagtggtctgtctgtttaataagagtttgaatcagatggcctggcatgaagagtcactggcctgagagaatgtcaggggcatttgtaaatgtgtaaagggctgaaaaatcctgagggattattattattgctattgttgttattattcacagacacatccaacagccattgtctgcctccttatctgtcatgctttctgcacgagcgtcagcctgagcttcaatctgtgtgtatatctgcagcttacgtccttgccacccctccagaacccagtttcatccttgtaggtttttccgaagcaggatttgcacaagtggcgtgttttcttaagtatttattttgcaggccatttactcggcatggctatttttacagtgggtaaggagcaaggctaaaaataacttagctcataaccagacaggttctgcatttgacatttacgtggaattcatttgcatctcatttgttcgcctttctgtttaacaggtagaatgtaagaaagctcagccgaaagaagtcatgttcccacctgggacaagaggccgggcccggggactgccttacaccatggacgcgttcatgcttggcatggggatgctgggtgagtctggacaggaccgcaggtcaccatggactgggagggctatggaggcctctactcccaactgggtcacctaccagtggggcaaactgcttcacctttctaagcctcagtttccttgtctgtagatgaggatgataattccccgttccaagacagttgtgatgattaagtgtgggtgtgtgtgtgtgcatgcatgtgtgtgtgtgtgtgtgtgtgtttgtatttataatattgccccatgcctggcttataggatatgttagactattttctctcttttccatctccttcctcaaaagaaggaaaagtccccctctatctgcctcagccctctcatctgagtgggagttcttaagatgtaaggactcctggctgacttgacttgtgtgggctaaggctacgttttctaaaacttgggagaggagggaagtggtaagggtgggcgataatcctgtctatttaaatgattaacatttttctcttgggatatcaaaatttgcatttaaatggatgttttaaatagcctgttttactctttatttgccaaaaaaaaaaaaaagatgaaagacaaagtgtgtttgttctgactaaaaatgatttctcctggcttttagagaaattgagttgcatattatgtccctttccttaaaagtatctctgtccgtcctgcgtagataattgaaaatcttaccgcttaaatggcatgaaagatggagaaagcagtggagatgcgtaatggtgtaggtcgcaacaataattagaaatttaaaggcgagagaatggtattttagtgcaagttattgtgtgtcaggaaaatactaattaagtgggataaatggtagttaatggtaaaattccattcaggcacatgagctgtctagtgttaatggattttcatttggtttggctaagagtcccacttctacattgtttgataagccctttctatattttcagatttgctgctgtttaaatcacttctggcttaattttaaatttataaaacatcttgtggtctgacaaagaattgtatctacttgtctgaggaaataacaagggcaggtaaaactattttgaggaactttatgaaatagaaaaagatgccaggagaatattaaaaatggccatgatgttaattctcctcatatgaattttttaggcttaacagagtttcaaagagaaatcctattgtaatttttttaaattggccagatgtttctaaaacttatccctggaagaagaaacaagtgagaataaatgagaaaatgtttttaaaaagaggaatgagaaaagaccaacagtgagaatgtaacacaaagctacagtaactaaaacagtatggtatatgggaatgcaccagttgatagaaaagggtagagtctaaactaaatatacctatatttaagagtgtgattttaaaaatcagtgataattatttcctggttcactacaagataattccttagctcctcctttaaaaaataatttttattaggtctttatgttttatatcaaaagaaactctaagctggtagttttaaatggtgaaatcaacctgaaagaaggagagttgagctgagtgcagtggtgctcgcctgtaatcgggaggcttaagcaggaggatcacttgaggccaggagtttatgagccagcctgggcaacatagcaagaccccctctctacaaaaaataataaacattaggctgggcatggtggctcatgcctgtaatcccagcaatttgggaggccgaggcagatggatcacctgaggtcaggagttcaagaccagtgcgggcaacatggtgaaaccctgtctctactaaaaatacagaaatcagctgggcactgcagcacgtgcccgtaatcccagctacttgggaagctgaagcaggagaatcgcttgaacccaggaggcagaggttgcagtgagccaagattgtgccactgcactccagcctgggtgacagagtgagactctgtctcaaaataataataataataataataataataaacattagcggggtgtggtggcgtgcacctatggcctcagctacccaggaggctggtgcgggaggaaagcttgagcccaggaactctgggctgtgcagatttggtgtccccactaaatttggcatcaatatggtgacctcctaggagtggaggaacatcaggttgcctaaggagggtgaacaggaccaagttggaaatgaagcagcacaaaactctgtgctgatcagagtgggatcgtgcctgtgagtacccactgcaccacagccggggcagcatagagcatagcaagacctgtttctgaaaaaatataaaataagaaagagttgggggccaggccggtggctcatgcccataatcctagcactttgggaagccgaggcaggaggattgcctgagcccaggaattcaagaccagcctgagcaaaatggtaagaccctgtctctctctttcttttttttcttgagatggagtctcgctctgtcgccaggctggagtgccgtggcgcgatctcagctcactgcaacctccgcctcctgggttcaagcaattctcctgcctcagcctcccgagtagctgggattacaggcgcgcgccaccacacccagctaatttttgtatttttagtagagacgggatttcaccatgttggccaggatggtctcgatctcttgaccttgtgatccacccgcctcagcctcccaaagtgctgggattacaggcgtgagccactgcgcccagcaacgctgtctcttaaaaaaataaataaataaaagcaaaataaaaataagaaagagttgagcctattaccacctactgggttttagagtcttgaatttaaaatgagcataaaggccctacagcataaaatggaagaccttcaggatccaacttcaggaaatttcccacctttctgagtctaacttggtaccctctgcatgctgggaagaaggaactggttttcatctgggagaagcaaaggtgtgaagcggagccagctcaggtcctgtcagttgacaaagagcaaagagtgctcagcctcccagactccgagcaaaggctcaggcccacatctccataatcacccaagcagggatccctgaacagaagggtacctaacatttcatcatgggaacacaggtagggaggcggggcaggaggcaaggggcaagagcacctgctgcgtgaccagccctgggtagccttgggacacagtgcttcacaagcagatgtgcttcctgccctccgcgagcttgtggtctatacagagagcctgatgcgtaacatgaattgcacagatgcctgatgatcatcatagagtctgggggtggttggagagcacgtcatgaggagtggaagccagtcttaggaatcagggaagtggcatttcagcagaaatgagaaggatgagtaaggcaggggccttccattcggaataaacaggcttggaacacgaggaccctactgtgggaccttgagagccaacgagcctggccacgtgtgtgtgggaaggtggggagaggcaggcccaggggctccagggttggctttgcctgcagctcgtgggcagacccgagtggccccttcctgagagcacctactgaggtggtaggagacagcactggtccctgcgcttatctggacagcatctgaacagcgcctgctcgctgggggatggatatgtgatgcctgccaggagcttactcatctgcccagctcttcccccgtctactcacagttcaagttatgacttccccaagccacagtaaagaaggggctgttaggtaaagatattgttgcagttcagagcctattgttcttgagttataacctccgcagccccaccctgctgctgaaggcctttgccttttgcctgctgtagctgtggttgtgcctaaccccagaccctatccagcccaaccccaggtcacagaggcactagtcttcttctaaccaagtagagaaccctttggatggaatggatggggtcagccctagccagagcagggctccagcaagggaggccgtgtggtccagaggcaagagcttgggacttcagaatcagcagacctggactcttcactctatcagctgtgtgatttggggcaagtggcttagcctctctattcttcatttatcctacccatggggtaataatcttacttcatggggttgttcagggataaatgcaactgtatcttgcctggtaaatgctgtatttagtctaatctgagatgccatggctagtaagatgtatgttcatgtactcttcagaaagaaaaaatatgctattaattaaaccgcataatgctttcttatcacattggctgcaagatagatcccactttcagagaagttaaagtgtggaaaagatgtgtgtcttcaaatcagcaaggtatcgtagcatgtactcaagctgggagttgttattaacaaggcactaggaagccctaccacttggacttccttaccacccaaggctgagaacctagctagactcacgaatgtgacctgtgctgtggcaactgcggcctctttctccttgtggactcccagcccaaggagtttggattattcttgagtagccaccttctgacaaagatctgtgtgctggattccaggcctcatcagccctgggccctcctgaatttcccagtgactgtggtgaggccatccatatgcactgagcagggtctcctaagatgtcccaaaatgtgtccttcagccaggaaccagctcagccagaggtccaggcagaagggatgaatcagatgcagtgtcaagttgtatctgaggagatacaggcctccccagccatcacagagcctcctcctgagccctctgtaaagcatccactgggaactccctgggctgccctctgttttgcccattggcccagcttggccctctgggtctatggactctctaagcgaggagactgccatttgctgtgctatgatggaagcccttgactctgtcatcaaagactgtttctctttcttcttgcttcttccctcgaaagtggtagtgtagcatcaggcagagtcaaatcttttggtagcatggcctgacatgaccccatcagttacatgggtcaccatctccaccgagcactatgcctgcatattagtcctggaagcactaccatcctcaccaacagcaatctggctgatgaacttgactcatgcagaaaaacattttcttaaagttaactaaccaatgaaattagacgaggtttccatgatttaaacttttattattgaaagagtggaaaaataaatagcacttctagggattttttagaagtgagactataaaccattaaaacattaaaattcattcattcaacaaatatttattaaatgagtacctactaagtgccaggcactgttctagatgctgaaaatgcagcagaaaactaagtctctgacttcagggagctgacattctagtgaggagtctgagacaaccagcacactggtctgcaaatgactcgaacactgtggaactaatttttaaatatcatttaagattttctccatactctgggtggtctcttcagagggaggctgataagcatatagttgcacagttattctatcttgatctctgttgatatggctgcagacatccttggggaaaacctacacctgttttggttttagcttttacagcgtttgacagaatcacagaataatcaacccaatgggaattccttaaaaggaatgtagaagagaagaggaggggttatccttaggccaggtctcccacctttgagccggacaaaaccagagtcacctaagactcttaggaaaggtcttttgcaggtcagtgcagtggctcatgcctctactcccaggaggccgaggcgggcagatcacctgaggtcaggagttagagactagcctggccaacatagtgaaaactccatctctactaaaaatacaaaaattaacaggacatggtggcgcatgcctgtagtcctagctactcgggaggctgaggcagaagaatcttgaacccgggaggctgaggttgcagtgagccaagatcacaccactgcactccagcctgggtgacagtgcaagattccatctcaaaaacaaacaaacaaaaaaacagaaatggtctcgtgcagcccctcagactttgcggcaccgcaccaagaggtgcccacagttatccagctcaatgtgatagaatctctttcatttttcttaatgaaggtgaacttaataaaagcaaacacatgatgattgttgatatattttatttctctgagccttctctgccacataatcccactgcctttaactttcttggcctcgttgggcacatgctgtttatttaacatgctgatacgagtgttagagaaatagcacattgctgagccctcaaagaaaagcttcaccctagcaggcccagaaacgaagagaggctgatgatcagctaaagcacgttagccaaaagcattcttaggtgcagtcgtactgagaagccccgcgtgaagtcctgactcagtgttccctgacattaagccccctgaaatgtgagcaaaaaaaaaaagtatcgttaagaacaggcactaggaagctgtaatctgctggcgttcactaacagatcaaaagattggagattggctggaacttaaaaccacatatctacactcaatttcgacggggatctggctttcccaaaaatatctgtttaggttattctcaaggaagtgttcctttgtttagccgcttcctggtggacagaggaaactcagaattcagctcttcattgtccctgtagagcagtgcagtccaatagaacttcctgcaagggagggaaggtcctgtctgcactagccaatatcactagccgcctgtgcacggtagctgctgagcccttgagttgtggcttttgcgaatgaggaactggagctttcattttagataatttgaattaaatttaaattggacggcgcaggtctggaggagcccctgcaactcagggtgattctgggggcaaagcatctttgtagactttagccttcgcgtccttgcctaggaaggactcttggcacttggtgtttagtctgtttgcagacctcatggagccgatgaggtgccccaggcagtgctctaaacatcacgcagcagatatgtcacactctggcagttccctggataaacagccctgtctcttgtctctttcaagtctggggcctggtgggagccgttttccatgactctgagtagctgagtaacagagcccgggagaagatgagtcatggacccgtctagaagggaaacatctctagggttgcagcaaagatctagaaccagaaccacagttttgacaactttgtcagcatccccaaaatggggactcaaaatgagctcagtggcaaatccaaattctattgttgatttctgtatttttgcttctgcaatggaaagccgatctgcaagagaggtggtcaccctggcagaagccttgatttttttttactttagtgacaagagataattactgtgggattgatcaggcgtccagagtattggagcagataaattgtgcagtggccagtgtgggaggggccaggctgctaatggaagtggtggctgggtcatcccaccgtaatgtggcttgacggagcgtctgcacgggtctgctgtaatgtgctattgatatgcagccagccaatttcccccgtgtggctggggctgtgaaccattcgagcagagctgggctgcacagcagtaaatgaagaggaaaattgaagtaatgttgtattataaatttatgatttcatctgcctgacctagaggatgttcggcgattgggggtggagataagatcccccgctctggcagatgccgaattctcatctttgtggtttgggagactatagtattgatgtgtccaggaagagtggggtgagacccaaagttggggtgaacttgaccatgcttttcttctttctcgttgaagccttgtaggaaagccaggaagaaagcaggtataattgcattgtatttgtcacctaagtgcagggagaaactggctgctctgccacttcccaccctccctgagggaaggtgacacataggcttatgcttttgctgtcagattaacactaaaatatttaagacccccagctctgaagttagaagcaaaggagccatttttcatctggaaagcccctaggcagccatgacttggctgtttgcatataatccatttatcaatattgttgaaatcatggtataagaaatctagtacaagatctgatttgctagcaggtgattaatttggaggagaactgagctgcctagccacgaaataaatacgaaggaaggcgccagtatgcatgtgtccatttaaggcatctgagccctggcctttgctgttcttccttccttctttctccgtcgggttgctgagctcaacatcccaccgggctcctgctccttagctagcagtcagtgcagagctgctgggtccttctgcctcgcttgggcaggcttctgtcaatgagtcaccaagcaccgggaaataagtgcacaggaaggagcaggtggcaagaccctgtggaggtagagacagttccattcagtgagtgagctgtgactgcaaatttgggaaggttctgggggaagcaagggaaaggagccacagctggtctcactcaagaatttgggcacgtcactgttgcaagggacccacaaggctttctacaggtgacaagactaagctccaagagaaaaaggaagactcctatcttaagtcgggttgctgtcacagattaccatagacgaggtggcttatgaacaacaaacatttatttctcacagttctggaggctgggaagtaaagatcaaggtgctggctgattctgtgtctggtgagggcccgcttcctcatagatggccccttctaaccgtgtcctcacgtgttggaaggggtgagggtctctctgtgacctctttgttaagggcacattcatgagggctccacctcatggcctcatcacaccccaaaggccccatctcctaaggccatcaccttgggggttaagatttcaacatagaaatttgggggaaacacatacatcaaatcataacaacccccaagggcatggttgggggccagaggcaggactggaacccaggtctcctgacttcagacccgtgagtttctgctctaggtctggtggcagatccactgatcctaggcagaggctacaacaccaacatccaccaggaagtgagggacggtggagcccacctccaaggcacaaaagctctgagtaggcagcaggatgacaagcaaactctgactcctgttgccgagtgcaggcaaagtggaatttagtaagggatccttttccattagccctcacttgcagggtcagaaagtggtcagtgtgatgtatgagaagccactgagcaggtgggtgataagaccccagagctgtgtgtagggatgtttttaaagggtttgtgtagaagggcagagacacccgtggaaagtgtcactgttgccctcaattgctggagagcctggaggctgtcataagtccactcatcaaagtaattgtttgccagtgttttgataacaagcaacagaaacaaccctggctgctgtaagcagcaaaggagattattagaaggagcttgggcagtgctggagaattgacaggatggctggagaacaggactcagaaaacaggcaggaactgggggagctgggtggtcagagccccagccctagccaaggggacaactcaggaatgacctggtcagggggccactgttgccaacactggatgccagattctgctactgacaccagaataaattcggagccagtccctcctcctctgccctaccagctccagaggcagatcctaaggagggcttccgtctgtcgagcccaggttcacaggcctgcctcccagcctccagccccaggaagagccctgaggccttctcagcttctgtgatggccgggggggtgggcctctctccaagacttacacacagggagaggctcaggggctgggcagccaaaaaatgaccacagacattcacctccaaagtcaaagcgaaagtcacgttctcggtggttgggtggccgtggtggcatcttaagagcaagaatgtactgaggttacatatacactgagtggagggaggcagagtgagcctgacccatacggccttcatttagcctgaatcaggcagggacttgaagaacgaagtggcctgagcagccacaatgactccctgagagctgaatgacacctcacatcactgggggttagtgacagatctgagatggtcacaccagcccctggacttgccagctgagtttcttgtgtgcccagtggccagcccagtggcagtttctacaagtgtctttcagtgaaccactcaccccctagcttgcctgctgagacaggggtctagaaacaatacgcttgtggtgaaacgcccatccagtcacacggcacggggctcctgagtcggagctacactttgtggtatgcatcttaacacatccagcctctcaccattctccaaagatcttggcacctccgtggagtgtcaaaactgcagtgtgggccatggctcatcaggcccagcgttttccagaggcccagggtgagccctgagtttggccgctaaactgtgactcctgagttcgcatgctctgtctggtgctggctctgttgtccactgccttgggaggatgcatcacgaggactttaatctcctactgtcaatagctttaaggtaaagtacatgcagggtaagctctccaaatgtcagagccaggcgcaggctttgtgtttggtgctgatgcatggcatttactctgaaggttcaggaaagtacatgggctttgcggggtctggctgcccaaatatgggttaattagcaacagctgacagcagcgcccccggccacaggagagaggtgacccagacccttaataaaaaaaccctcatgagagacaaattattctgtgaaggaaaataactcaggctttcctcattgccaccctccgtgagattttaccccagacctgaggcggctgtactaacaggactctgatctttctctttgtgttcaaggatatcccaacttcgtggcgacctatggccgtggctaccccggatttgctccaagctatggctatcagttcccaggtgagtggcttggtctcccagggctttggaagcacaagaggtgggctgcatttgcggggaggtgagaggacccctaaagagaatgcatttcttacatgcatccacttgaaaatgacctatacatgataaatttcaaatccactgaagttcaaggccaggatgcagctcagagtttttgattaactcaggtataactcactggtgccgggtatttgagaacggcagcttttaaagggaaagcagaacggaggcaggaggcctccctgtgctcacctcctttttctgaagcctcttccgggttttttctcactggggactgaactctaggcccagggctttctttcaccctctaccaccccttgcccgcctccccgctccctgtgtccacctgcccaatgtttgatgtctccccgcccttgcttcctttcctccacccctcctcctcctgctccgtcctgactgctgtggcttcggcgtccttctgggctgtgttgatgttgagctgctaggggttgggactgctgtccatcctgggtgagctgtttagattatcctttccctctgcgtgggtatcaagacttgaggcagagcccatggtgatgcccgccacatgccagggctgctccagctccaactccaggtagctggcaggcctgggacctcacctgggagaagcagcgaggggaaacatggtcttgtagggatggggtagggacaatgaaggaagcgatgttttacagggtatgcttttccccagcctttctcaaatctggagtacagataagaatatattggggtgtttgggggtctccatgtgcaaaggacagccgagattccagaggaggtgtagggacagagtcttgtcccctgtgggttttctgctgagggaggaggctccctggggagctgggctgcaggcggagtttcacccctgccttgtcgtcatgcctagacctggaggtctgggagtgtcagggtctgagatgaattaggaagcaaagggagtgaagacgcgtcgctggaagatggcgccctgacactgatgacaggagggcagagtgagggcttggcctggtctttgcctcagaccaagcattggggcgggaagggtgtagttggagagatgaggaggcatttgggggcacctagagccgtgctctatggcagacagatccttcaaccagcggtggaagccccaagctcttgtcctgtctccgataccacctggccaagtggccatgggcgggtcactcagcttctagggccttacttctctcttttggaaaagggggtctacgaggaatggtctttggggtctgtgcccctctccgattgtgtgggtcagagggtgcagggaaggcaggcacagaagcagaagtccaagatggaggagtttgagtgcaggtggctcccccaccagtgtcccctggggctgggatggttccccatctgggaggggcctcaacaagactcctcggcccgcactaaggaagccgtccccaaagatgccccccagcagcaggctgcttcaggatggccacaggctcccagacctgaagaaaagaagggcacatgcaagaaggaccaccacaagagaggccagcactcaaccagccactgtcattagactttcccatttccaggcagagacccccaccaggcacaggcacagaggtagaaactccttctgaaggggtcacagtacgcaaggggtaggacctgcatttggaccaggcggtctgggccttaactgccaccctccaccatctccctagtgtccatttttctggtacaataacactagccacaaagagctactaaaacttaggtttaaattaaagttggctgggtgcggtggctcacgcctgtaatcccaacactttgggaggccgaggtgggaggatcacttgaggtcaggagttcgagacccgcctggccaacatggtgaaaccccgtctctactaaaaatataaaaatgagccgggcgtggtgcccggcatctataatcccagctactcgggaggctgaggcaagagaatcacttgaacccaggaggcagaggttgcagtgagccgagatcacaccactatactccagcctggataacagagtgagactctgtctcaaaaataagaagaagaataagaagaagtaaaaagaaaatttcagttcctttagaaacactggccacatttcagtgactcagtaaccatgtgtggcaagtggctattgccagcacagaatgtagaacagtcaccgtggaaatttcttacgggctggtgctgttccagtgcctaaaggaagagggctgttactggggggtgcacggtccacacactcacacatgcgcaccactccttcctggagacacccatggggtcagtgtccctgtgcttcattctctgccagtcttgctcagcccagaagctggtggcttttcctctcacttcctcccctcgcttcccctccaggggatgacaggtgcaaaggctcacgcatctcggccctccaggtgcagcactgatctgtgcactcagcctgcacaacctgctcccctccgtaatcaggctgccattgcccctgagtgtgatgctagtcccaggaggacagagttgagggatcttaacatggaataattgggagaggacatcaatgtggaccctatgctaaggcccctgtctcatcagagggcctgccccggggcccccatgagctggctcaggagacatctagtagaactctgcctccatggcctgcatccctgggcctgccccaggcagacggacatgcagcagtgaccagattgaggctgggcagagtgagatagggtcccctgggtgcccagcccttcaccaaagccaagactttgggaactgggggggcgggggatggactgggctgcaggaaggaggatagagtggggttggagtgtttttgcccagggcccatccgtttgtcatggccacagtccctgcagcttaatacaatcaggtgggtttgaatgggacagaaatcaggcattacaatgtacagacagcagcttcctgacctttgggagttagctgccctgttctcaaccatcaaacttttatttttccatccttcccaccttcccactcactatggaagcctcttgattctcttaactaatggccagaaaggggccaccagtggccacaagagtaaggttgcctgctctcagggagggcaagagtggagtggccctgaactgggaagggtggccccatggctggggccgcccaccccactcatctgagaagccaggctagggtcagagtctattcccctcctgaccccctcccaaaggatatgctccttgtggagtgttgggtctgtgcttatcccagatgcctccccaagcagccaaatgtttccagacacaaagcctaggtaggtccatgtgtcattccagtcaagagcgcagggagtagctgagcccctctagaaccaaacttgatgactcctggagccacagcctcagggccagggctacagagaagcttctggatgccctgacttccatctgtcacctcatgccaataaggaaagtttcgggtggatctggccgaggcggctggggtacagaagggggacccagagatggggcagcccagccctctgccctctcctcatccccatcaggtagattctgcgaacccctgccatgccccggggatcctgtgacttcgtgacattacacagcagtcatgtcacctcccaactatcctgatgttttctttgtggtctttcttttcagtgtcctcactgtatgcccactttacccacttcccacctccggtccccctcatgctgtgcatggatcccgaacctctcccagcccctttctgagtccccctagcagggccatgcaagacagctagctgggagaaatgaaagcacgcccaggtcctagagagctccgagactcttcatcctggctgttctcactcataaaccaggtagcctgggtcccctttcaggaagatgcaatctgatcccctttatgaagggtcctcctttccacctggacttaccctttctatgaacatccatctcatctggttgggggtgcagatatcactcttagtagagcctcattctcaccatgtgacatggggctgcacggaccttcctgggccacacagctggtggcaagtggcacctggctgtgcccatcttcagaattctgtcagaataaatgttcctagagaaggctagacactggatagtttttagagtggggagtagttcttttctagaaaggctgggtggtgaccaaccactctgggaacagctccttcttcccacatccaggtgtccaccccagcctggaatttggatcaggatcccgtcttgaattattatgggttgtgatcagggatctcccctgcttcctctcttttccccactctggacttctcatttcagtttaatctgttaatttctgttcttatttcactttgcagactatttgccggtttcacaagacataatttttatcaactagctcttaagagaggcatagcaaagtgggggttgctaccatttctagagagagaggacacagtcccggcctgggctgcccccgctccagtcaatgctcactgaaagtctgtcttagctgcctgtttgaatgactgttctttttctcatttttaattcttggactcatgtcctcattgcttcactcaattaaaaaaaaattattctccagtcccctcccactttgcttcttgtatgcattgtgaccgaccccacttcctcagaatgtaacggggccagagggaaacttctcacaaacttcgtagagcctcctcaggggaagctaggaagaagacatcaaatgtttttaagtcatgaccaaacaggcttgttggggacatatcatggggtgagctttgaagtgctggtggtccagaggggttgcagatacgtgacttggagcacccgtgtcttacgatggacagtgataaaggtgaacacacagagacagactattctctaagaatgtgagaaacctgatctggaagaggagctatataaacactatctgactatctttgtcttttggggccagtggctgttggcataatcacaagcctgtctgtcttcgagaagggacagtggagtcatccaggtgctgccacatgacaggcacggtgggcaccgatccacagtgggccccgccttccccagctcgcctccctgcctgtgctggcctggccttgcctgctggcaccattggagtaggagggggtggaacacagggggcccatcctgatcaggccccatctcaaggttggcactcctgcccatcacccttagaaggatcttttcccatggcttgacttccttcatttccctaactgaaatacacccactctcttggaataatgacgtaccactcagttggaccctcaagagtcactgctttgtctgtgctggtagtttgtgagaagtgacccgcacgcttccatttgatgcatttgatgtgagtgaatccatacatttgaatgtcattgtccttgagaccctacatgtgcagtttggctcatctcattaaagatgcttgatgtaataattggttagtttccttttattttcctgcaggcttttccatgagtattatttttttcaaagaacaaatctgtatggcttttccccatctccatattttgttttgctatgaattgctttgctttggtgaacttgtcctagtatgcttgcctcacaaacgttttagccattgtgaattttcttcatctctgtaaatagttcatctgtgcttctccctgatgacgttttattttttttcccctgtaagcaaccgaggtagaaaaataaattgtttaccatggacatactgtgtgctgccgtctcttagcctgacagtgtcctgttctcgctccgggggaggtgaatgcactgaataaccagcaccgatgacagcctagtgcagtttctaaaagcatgcgaactccccctggctgccgcctgttcccagccctccctgcctcctggcatcccctgtacttgcttgaggtggtctgtccttgagcagagtggcagagcatctgcatgcgccagctgcacagtatcgccccgatgctccttcctccgccacggctcccctctcaagtgaaaatgccacacacatctggagcccctcacatctgtgcactaggtgtgtgcgccgtcttaccctcgcgcccacgggcctgtgtgtggttgtgcacgtggcctgctttcctgactccccagagcactgcaggcagaggaggcaccagtggacagtgggaatgttcttggatatgaagccggaggacctggtttccaggtcccacttggccacttagtagccatgtggccttgagcaagtcatgtatccctccaagccctgaagatgatgaaagtgcctagttagttgagttgttacaattaagggataacatgtgcatgaatgtgccttgtaagttggtaaatgctataaaattggaagttttagaaatagtgggcactgatgttcttactaagtcagctctccagagtggttttcccatttttatcccccatgagggatctgtcatcagtgaaaggaatgatacaggattcctacgtgaagctagagacttgctaggacttcctccccaccgtcaggccccatcctttctcttccctccttccctctcttccctcttcattttgctatcaccaggtactgaaataggtaccagacatctggacatgaataagactgactccttcagatgcttttgggctacccaagggagagagaagcagtgataagaccaattgaacatcatgagacaggcacttcactagagagagggaagctctggccaggcgtagtggctcacacctataatcccaacactttggggaggtcgaggccggtggattgcctgaggtcaggagttcaagaccagcctagctaacatggtgaaaccccatctctactaaaaatacaaaaaatagcccggagtggtggcgggtgcctgtagtcccagctacttgggaggctgaggcaggagaatcgcttgagcctgggaggcggaggttgcagtgagctgagatcacgcggttgcactccagcctgggtgacagagtgagactctgtctcaaaaaaaaaagagagagagagaagctctctatgctgtaagggtgcaagggtgggctgcttgttcagagtgccctctagagaaggtgacaccagaactgggtctcaaaaagccaaatagaattagccaggtaaagaaggaaaggaagtatatcccagacagagaaatgacatgcttagacattgaatcagatagttttaagaaagaagagaaacacaaaagtaataagacacaaaataataatggactaaacaaaataagaattcatttatctctcatgtaaaagaagcctggatgtggctccataatactcatggtctgggtttcttctctactctcattctactctcttcagcataagactccacctcatagtctaagaaggctgctcaaactccagccatcacatgttcatcccagaagactacatctcttccctttagtaatgcttcctataagtcatgcaggacattttgcttagatcccattggtcagaacttggtcacatgaccagtttcagctgcctggaaacctcagaggtgtcttttttccaggtagccatgtgctcagataaaaataaaggattttggtactaaaaaagcagagtggaacggctactagtagacacttagcaatttctgctacatacctgagagaggaaacattgcaggtcccagggactgtgagtagttcagtgcacagggagcttgcagaagcatcttgggtgggaggagatctacaaggctggagccatggtggcctcctgagtcaagtttaggaagttaaatttgatccccaaagcacgtgaagtacttggagatgatttcacatacagaagtgatgtggtcgaacttccatagtgagtcagaggggtttggagaagtgggaggccatgagggtgagtctggaggattgtcccttctctctgcaccccatctcctctccacctcatcctctcttggctccatccctctctccctgcgtggggctggctggtggttctttgagccctgcagttctatgcagttctatggccctaaccgccaaaaggcctctgggccaatattttggcaaccaacagtagcctcagccacagagcactcggggtggccaggaggccaagctaacgtgtcatggcttggtgcccaaacctccctcccaggatactgtgtgcaaacggcaggggcagcacagctccccaggcagggagacccttccccagcctgctgagcttgaactctggttataaaagtgccagtttgtgctcctacctcttcagcaacggaaaacaggtttgctctcgggtcctgatgctgactgatgagcactggattcctggagcactggcttcagaatgatgttgaggccaagtcctagctcagcagaaaggacggctgtgattagcgatgtggccgattgctgtaccaggaaggactcacggcctgtctgccatgtagcttgccttctatattcctgtccaatgatggttcttcggcgccaggtgattttccatcactctaaaagatacgtgggggagtggggagggttggtgtctgaggagagggatctgctagctcagggatatcctgttcctctggagggaagccgctgtagtccattgtctgtagggctgcttgcaaggtaagcttcagtcaagtcatcaggtctttgagcaaaggcagaggcttgtggtccgtcttagcctgaggggtagggcttggatgtggaaatcagagtgaaggggtccaagttctcaggaggtggaggagctggcgttagcaaggtgaccgagagagaagccttggccataggcaaggggctgcatcctgaacctgctgtcactcacctgccagatctgtctggtcattgacattttgcaaaacattcaaaaatgctgcagctgccatgctcaaggcctaggaccctggctgggagtggtaacctgggccaccggggggagcaacttcagagcccttccatccaccccctcctctagcccacccaagtggcagagacctctgcggtcagtccccactcaggagaggcgagaccccggggtgcgctcagggagctgcttcctgccttggcgtctcctgtgtcctgctctttctggcctagttcagtgagagcacagagttcccctccccaggctctgtaatcttgtctgcggaggcgattccaggcttgcctggacggcccctcattttcctgtaagttgaaactccctctttcctcctgcttcagtttttaagggactgtttcctcatctcctgccccagaaatgccctcactaggacccctgacagaccctcaggctctgcctggtgcagtgcttctggttggcttccagaatggagcccaaccagcgagcaatggctggtttcttgctagtagggacacagatcttgaaatatcaagacaggctagtcagtttcccaggtaggctgccataagcatggactcgtgcgtccagggaccccagctagatgctgcagcactgtaaacagaaatgctccctgtcaagaaaagccctcctgacacagcagcccccacacatctgtctcatcaccagccctctaatctgaacatcccttcagcccttgagcctcgtctctggggattaccccttcccagattagatccacagccagatttcaaatcacaagcgagctccctcatggccagcccactcctgcgccacctggccctgtgtatacttggggcctatcctctcatttgaatattaaaggcaagcttagacaggaaagcatgtctgctgctttaaaagaagacagagaagtaaaattcagtggcacaccccaaacccagaccgaccgcggcacgaggctcgtcggggctgtggatatgttgccacgttcctccctcggcgtggaaaatcaggagttgactctattcccagatgaaagcagagcacggtgcctaataggcacttaataaacgtttgcagaaatgaattggagcaatctgaattgacgagaattgtgggtttcacttccgatcagctttctgtgcctcttgaagctcctctgcataaataaacggaaatgtgactaagtgagcgctcagctccccatggcaaagcccagagccccgtgtcctcaggcaggaagccaggatactgagttcttgcccttagcttgccaggaaaataaggccatctctaggcctcggtttccccatctgtcaaatcaggctattgatccttcctcacaggttgttgagagggttagtcggaccgggaatgatctagtgctttagaaaaggttagtgtcatgaccaaggaaggcaacccggcccaaggagcagagggccccgccagctatggcaggatggcagcagctacagtgagggaggctgcaggtgaccccacacctcgtcctctgtggactgaggccccgtgcccaccagatctcattttcctccactccccacctgcttaggtccctgtaccaccagccttgcaaagtccccattaagtctgctagcaggaacttaatcacctttcttcaagcccttcagttttcatttccatcagcaaaaacacgtgaaaggctgcaacttaaaaaacaaagcaacaacgaaaaacagaaaattactcagcatgtgaaattctaggcaaagagcagtgccaggcctgaggttcgggtagctggtgccttctggcagccaaggacaaagcagaaggcaaagatgtgtccccccaccctctcctctccaggctgaaaggaatcctgcacagagacttttttgcagagcccaggtcagcttgaatcccctgcccctgagagaccccacccagctgggtcactgcctctgctctctgtcacttcagttggggcaaaggcacattctctgcagagagctggaaatggtcatcagcacccgacccgagacagggcctcctggggcacaagttgctgagcaagggtgcaaggaattcagagcctgaaggagcatcccacgtgcggccagatgtgttcctgagtgattggagcagctgcacagggtacagagggagccgttgactctgctggacagccttcaggaaggggtgaaaacttagtccattctggtgaccgtaatagaacaccatagagtgagttgcttataaaaaacataaattggcaaggcacggtggctcactcctgtgatcccaacacattgggaggccaaggcgggagggtttcttgaggccaggagtttgagaccagcctgggcaacatagtgagactctgtctcaacaaaatatttaaaaaatatttaaaaaattagccaggcatgggggcacacacctgaaatcccagctacttgggaggctgaggcggaaggatcacttgacccgagaagttcagggttatagtaagctgtgattgtgccactgcattccagcctgggtgacagaatgagaccctgtctcaaaaaaagaaaacataaagttatatttctcacagttctggaggctgggaagtctaagatcaaggtaccagcagattggacatctggtgaggaccacttcctggttcgtagactgccattttcttgctctgtcctttcatggtcaaagaggtggccagctctctggggtctcttttataagggcactaatgccaatcatgaggactccaccctcatgacctaatcaccttccaaaggccccacctcctaatatcatcaccttgagagtgaggatgtcaacatataaattttggcagggacataaacattcagaccatagcgggcaacatccgagccgagttttggagcacgcacagaagttcgccaggcagatgatgagggagggtattccacctagagggccagcaggaggcccaaacacatgatgtgtcttccctccctcgcattcctacctccatggattccccatctgggcagagactgtcctagtacttgggctgagacagctggacaataggttttggcattgggaagccagtgccactcttctcaaacccagggaatcccggacacatgctttgtgagccggggatgctgaccccacctgtgccataggaggctgttccccgactggggcctttatgcatacggctgtgcagccccagtgggctctggatgccagctggccagggctggctgcctttgaggtgggaaagggagaggcaagtgtagcctcctgttccttccactgaggtcctgctgccccaccctgagtctgagcagatgcttggctgcccccagggcacgcctggttttgcagggaaaggtgtgaggccagccccacagttcccttagtggggaacctgcttagggattctacagtctttctcctgaaacccaggaccagctttgaaggtgctgggattcaggtaaggccaggagcacctctccccatccccctgtgtctatcctgcctcctccacccatccatctctccatccttcctttaggtgtttagcgtatagtcaccaagcactatgtcacaggccctgccctagatgcgggggacacagtggtgaatgagaggtgggcccctgcctgcttgttgggaacagagcagcaaacaggattccactctggtggaaggacccaggaaggctcctctggtccagcccctcctagaggaggtggggggagctgggcaagaccctgtttcaagggcagcacatcagggcaggagggcactgggaaccatcagtccagctgaccagcacaagcactggggctccaggctccgcattcatgcctgtggtgaccacctcacagggcgatggccaccccagctgcttctccctggccctccgcaagcccttgcctcctgctgtcagattaacccgccagagttaagctcgcacttcagataagacataccccatcactcacaagcgaattatcaatgttatctattaaagccctttggatgtgaaatgccatgtaaattaataggattttagaataggaaggcaccaaagggatttctcagctccgctacagttattaccttgggcaataataataaaaatagaaataaatgttattattccacttaccaagcaacagataaccgtgctgagcgcccaacgccatcatctcactgaatcactgatcttcactgcagccctaggaggaggtgtcattaactgggttttacagaggaggaaaaggaggcagagagggaagttaagtaacttgtcttgggtccgacaactagttaagtgtgggagatgggattttaaccaccgttgtgtactattttctttaacctctctggacctagaattcttcatctattaaatgggaatagtaatgtctttcttgtggtgttatagcaaggactcactgagatgatgcagggacgctctgtggccatgaaaagtgctcagatggtggctgctgttgtgttatcattagtgtaatgactattttctcatcatcaaaaccaagctcttccattttacaggtgaggaaagtaaggaatagagaaggccgtcctcccatccaccttttcaacaagggctagagtgtagtggtataaactactggctgttgacatttttaggtatttctatactagctggtaaatggctgctgccctgagccaaagttcctccccaccatgctgggctctcccctgagactccctgactgctccacagtctagcagtaaaagggttggtggtgtctgcccttcaacatctgaaacaacgtcactcaggagacagaagtggtggagcatctaggggagggaacttaagatcacagatgttcatctaatcactgagctagtgatggggccaaagtaggaaacctggagtttttcagcaaaaaaagtcggagcgctcaagacttgagcgtttgctgtcctggttggcagaggtgagggccactggactggggtctaggatcctgctgtggcggattcattgaaaaagcccacgtgacatgaagctggggagaaagcaggcatggagaaggaacccagagagagtgtaagatttcaggggctcagcaagagaccctgttggaaggaagcaaaactgtgactcttctggcagttgggtgtctgaagttttgggtacagggagaagtgtaaaaagcatcggaacagggaactctggaaggatcaatggtcagaacattcgtagtttgtcctgacactcattggtggtagatgagagagtggctcaaaatcagaaattgccattgttatgagaagttagggaagaggagggtgtgattggaaagaaaaactgtcaagatagtttgttgatgcctcttttgaagctagaatcccttcactttgaaggtctcagtctgggtctcagaaagataggcagatagatgtttgttctgtggggaagtgggtgtccctggcctattgaggagccacaggctgctggcacagggtagcaagggctggcttcagaataaactccatgtggacattctctcccttgaagtcctgctggccagagagtgacgctgaaccaagtgtccttgtagggctgggggccagcgtcggagcccttgtaatgtgtcagccattcttgatgctagctgtctggccagcactgcagcaaaatgcacatcatccccaaggccctggatggtcaggccaatgatgcctgaggctggaactctccagggcctctgaagtcagggatctgtcccctgcctccacctcaatgggtagtaactagaaagaattacttgtgtcttggtcatgtgtccagggcccagctcagtagttttttttaactgaattgaatcaaagtggtgagaccttttgggggtaggtcaagatcatagctatggcaatacctccattttctttctctcttgccacttgatcttggagaaaaggattcattggaatggccactcctgcactcccatctctgaggactgagtcttctgagtgctctctctatcttcaagtggcatttggtgtagccacgcccaggtccttgagctcagctagaagaccctagagcagacacagccaatgcctggttccaacctagaggggtccaaagcacaggtcccccaccttcttcctggaagagtgagccacggcctcctttagcccaggcccagcttaccattagccagttgtctctccttgggcagttgatctgtgtgcagcctgtcctgggaccccagtcccataaatagagcccctttgctgtccacagctagcaactctaagctccatgagggcagagactgtatgttgttcactgctatgattccagtgcttagaaccgagcttggcctgtagcaagcactcagtatttactgggagggcacagggctgagaatgggtcttgagttatcagttctgctgcagctcactgcggaagttctgggtgactgcatgcaggtactgaatgctaggccccagccctctttggggagggatttagtgattcagcggtagaatgggcccagggagaaggctactgggccaaagtccccaaatagagctttctgcttcctgccccctgagagagtcgcaggacacaaactacctactgcagtgttctgagctccagctgcaagttggaattcccaggagagctttggcagtttctgttgccctggttgcacctcagacagattatatcagaatctcaggaggtagggcccaggttgtatttttcaagctccacaggggatttctggctgcagcccaggttgaaaaggtaccctactggaagaggggaggcaggaggaatttccgtggaattcagctgtgggcctggagcaccccctacgagtgggatgaaaatgccccctctcagagagactggaggaaggcgtgagctctccctccgcagcccaagacaccacgttctgttgtggagacaggttgaggttgagaccaaagcctattctcaagccgcagaatctgtttgccaaaaacaagatccagtgttgcgaagggccccgctgtgggcaggcagggagaggtctctccctactcctggtcctctgctgggtcagtggggtgggacaggtgctccgctgtgtttcctgagtgcttcccagttgcagggaacctgcggacagacacacaccttccgctcctggctgggccccctggttccgcacttgcctcttctgaggatttctctgttgcttcccaggggtgctgcctaacttctattttatgcttccacaaagccattcatccagtcagaggtgtcctgacagaaacactttctgaaacctcaacaaaggtttgacattgcgatgcaccttccttttagtcctatcagtctgaagagttacatacatatcttttttaaaattaagctaaacagcagttgtattaaaaattatctggggcacttttgtgccatccctgtgttttaggaactaacacccttagggctcttgactgcaggacctctctcctttaggcaacaggaccaacctgagccaccaacctctcacccttcccagcaggcaggcctggccttcacatttggcccctctccggagggacagatgacaggttccacgtgcctgtcattttcccagctgcagctgagggcgagacattgcccccccaggccatacactcactccccagcacccccttccccaaccagcagccgcaaccttctctgtctgggggtccccatgggagtgatgtgttggtacccttgggaatgtcaggctttctcccaaaaaatatgtgtttaaaacagattcctattttaaatgccaaggacgccagggtaagttgtttttttttttttttttttcaaatggaaatacatcttccttcaaatcaaaatgtgacagtctgatcatgtaagtgtgtccctttggttatcaattgttcctcctctttgcaccccctgttctgatgtgagtcccttggtcctcccactccaaacatgtgccatccaccttttttccactctctcccctttgcagcctccagccactgtctttctctgcacagaagtcagggctgtggatttccttgaaaagaaccagccctgtcgcatcaggctggtctgcccgggaggtgggagcatcctgggccagccaggatgacagatggcggtgtttccaaactctcgtaggacatgtttcctacattctgggtgacagtttcttcttttgcttgcttattttttagtgtttggattcggtgaagcaacattgggtttagccaagaatgtttgaaccatctatagaaattgctgctggggagatgcaagcatgctggggaagggggtggagagtgctttaagtaagcacaacataggaaaaattgtttcataatggaccattcggggccggtgatgcatattacaaaagagtcttttataaagattccccttaatcacacctattcaagccagaaggagcctcagaattctctcatctcctcctttgagagaggcacagaggggccactgactcatccaaggtcaccaaaataagtagcaactgggccagaaccataccccaggcagtccactcccagaccagtgtcttctcagaccaagaaggggagaggaggcaaagaaaagggttcatgacgtaatactccccagcccatgggacagagggcaataccctttcagtggtaactaaaaacaaagaccccaaagcttcctctaaatcaagggttctctgcctacactgtgcatcagaatcatccggaaggcctttaaaagacacagagacccggctcccacccgattctgtgggcagggttggggccagggttaaagctcctccaggctggactgagaccactgcaccaagtggagacatcgcattggctctcacaggggacaggccacaagagttagccccctgtattctcaggagcccctttgcttctgcaaagtggaggggctggcagactgaagatgtgtgccataaatttactttttacaaccttgggctgtacactggggtcatctgggaagtttttttgttttttgttttttggttttttttttttgagacagaatctggctctgtcacccaggctggagtccagtggcgcaatgttggctcactgcaacctccgcctcctgggttcaagtgatagtcatgcctcagtctcctgagcagctgggattaaaggtgcccaccaccacgcctggctagcttttttttttttatttttagtagagacagggtttcaccaggttggccaggctggtcttgaactcctgacctcaggtagtcctcccgcctcagtctcccaaaggcatgagacaccacacctggccctgggaagcttttaaaggtcccagtgccgaggctgctctgcagaccaagtaatcagaatcgcaggggtgggacccaaaaatcagcatttgttaaagctttccaggtgggtccagtgagcaaccagggttgagaatcagcacccatacagagcagggcactcccatttgccatagctgtgtcccatctgctggatgaatcatgcccctggacccctccagggacgttgaatgtgcccccactggggtggaggatcgtgggactagggaggctacttcttgtaggcagtgctgcctttcagctgcagtttacccagagcagtgactcccagcccataccctcatccactgcatcagagcatcctgaccatcatcaactgatgctcattgacagtcttctgtggggaagactctgggctaggtcctaagtgggacatgtgactgagtccctgccctagaagagtttgtcacccagcaagagaaataagatatgcacacaaaaataactgtgcttaggtaaggaagaagctggtaagtgccagagaagcaataaaaagtaagtgtggtatcatatcatcctcaaattccccaaaacccaaaagcaccattgacttctaatttgcactagatcatcacaactccaaaaagtccagcaaagtgtctcatccactgtcagcaggttggtgacatctttcacttagatgagtcactaaccccagagctgtgttagcaccaacctcagaggacttgggtttatcatcctcctccccgcagacaagctcaagcaaggtctgagatgaagggacgttagaggtcatcttgcccaacctccttgcaacagagaaaagttacacagggcccgaagaagtgaagtgtcgtgtccaattgcacagcaaagcagggacagccagggctgaaggctgggctttgaggccaagggggtgattcttctgttatcccactcgaagggcagaggaactccattctagcaagaatgggtcttcgagtctgacgcccattaaacaagatggttcccacaagccgtggcccctgttcatgcctggaattccaccattagtgcttctttcttttttagccagacatcctcgttttgaatataaggttcccaaacagaggagcataacacattcctagtacctaagttccaggtggtcaacctatagctctcaggccctctgagatttgatcagcaaaatgattttctcttttctgctggatttactaacatatgataggtattaagccactagggtcatgcctgaccccttggcccacttgtcattgttagagctaaacagaatgtgtattctaattttgagctatgttaactccactaaaatgatgctatgaagttgggatattatgaaggataccagaccactgtaatcaataagaaattcaggccaggcacggtggctcacacctgtaatcccagcattttgagaggccaaggtgggcagatcacctgaggtcaggagttcaagaccagcctggccaacatggtgaaatctcgactctactaaaaatacaaaaaaaaaaaaaaaaaaaaaaaaaatagccaggagtggtggcacacacctgtcatcccagctacttggaaggctgtgacatgagaattgcttgaaccctggaggcggaggttgcggcaagccacgattgcaccactgcactccagcctgaacatcagagtgagactctgtctcaaaaaaaaaaaaaagtaaaggaaaaagaaagaaattcaggccccctgtgtgcttactaccagctgaccatggctcctaccttggagacagtggaacacccctgcctggtgaagagtcctgtcttgaagacagggctgatgcctggacagagacctggtaggcctcatcacaatggcaggtgtcaccaacattttttttctttttttttttcttcgagacagagtctcgctctgtcgcccaggctggagtgcagtgatgcgatcttggctcactgcaacctctgcctcccaggttcaagcaattctcgtgcctccgcctcccaagtagctggaacagacatgcgccaccacacccagctaatttttgtatttttagtagagacagggtttcactatgttggccaggctggtcttgaactcccgacctcaggtgatcctcccgcctcagcctcccaaagtgctaggattacaggcatgagccactgcacctggccaaagagtgtttgttggtttgtttgtttgtttgtttgtttgagacagagtcttgctctctcacccaggctggagtgcagtggtgcagtctcggctcactgcaacctccaccttccaggttcaagtgattctcctgcctcagcctcccaagaagctgggattacaagcatgcaccaccatgcctggctaattcgtgtgtgtgtgtgtgtgtgtgtgtgtgtgtgtgtgtgtgtgtgtgtgtgtttgtagtgacagggttttcccatgttggccaggctggtcttgaactcctgacctcaagttatcggcccaccttggcctcccaaagtgttggggttacaggcatgagccaccgcgcctggcctagctctcactaattaagctaactcactgccaggcattcatctaagcactttgcatatattaatcctgcactaaaatggtcatctcctttacagttggggacatcaaggcaaagagagcataagcaccttgcccaaagtcacacagctagtaagcggctgagccaggcatcgaacccagacaggctccaggtctgcgtgctctgctgtttgctgtgctgccctgcctcaggaggaggagtctggtggccccttcacacattggccagggaagctatgttgaggagggacccccccaccacatttccagcagtggaggggtgatcatttcccactctgggcagtggggtgctgggcatctgtgggcacccatggaccaaggagctctgccgcagctttgcttggcccgaggccctatgaagaagccttgagccctgccagaccacctgcctggttccctgcagtcttcccccaagcactctctgctaaggcagtcccctccttgataacccagcccctgctttcccaaggaagtagcctgccccagatgaccccggcctcctcagggcctgggggaaaatgctgaagacagtgccacgaggccactctgccaggcgtctctcccctgcatttcccagccctcccaggtccagccccagagagttgtttccaccaggggcctcctggtcctcaggcccctcctgtgtcctgcgaagggcctgtcctggagacagcctgtgccctccgtcaccacagccttaggctcaggccaccaggatgtttctttggcctctggcagccccagctggggtgcccctagtccacccaacacatgcacaacacacatgtactcaacacacacatctacatatacccaacacatgtacacaatacgtacactcaatatacaacacacacacccaatacatacatacactcaacacacacatccacatacacccaacacaggtacacaatacgtacactcaacaaacacaacacacacaacacatacatacactcaacacacatccacatacgcccaacacatatacacaacacataacacacatgtactcaacacacacatccatacacccaacacatgtacacaacacattcaatacacacacacacacatccaatacatacactcaacacacacatccacatacacccaacacacatacacccaacaaacacacattacacacatacacctgacacacatacacttaacacatacccaacacacatacacttaacacatacacacccaacacacacaccccttgtatctgtgcttgcccatctcccgcaagcccagccaccaagaagaggcctggccctgggaactcagtatcaggggcctgtctgccaggtcatatggaaaatgtatttggcgggtgaggggtgactggtgaggctggatggcctaatggaacaggagggggatggcgaggagcagcagaagggggccaggaggacggctgtgcaggatgctggtgcaagctccatcccttccctaccaggaggctcccaaggggctaggccaggttttggcaaggccctggtgtttcagatgtagggcacagaggcagtggggtggcgactatggagctgctgcccgtgctgtgtgagggacagattgggcagccctgctccttcagcccctcttctcacaccctccctctccagggtggagatgaaattccagccctcagcagtgtctgatgctccacctccagcaggagcctttatttgagattaaggataatggatttcctttcttggataagttttttttttcttcctctttcagactttttgtccaaaatgcactcaattccagaaaatggaccttttcttaacaagtctttattgactacactcccctcccccacttcgttcctctttccccctcccccaagtctttccgtgcttccaaggaaacccgctgttttcagcgcatggtaaggagtgcaaaggaatgactcacctgcaccctctccctccagcatcccctgggccttgctcttaacagcagcagaagcctgggtgtcctgggggttgggacagagagaaataacttgacttcttccttgtgtttcttcagcaatttctgccaagaccctcatcttcagaaatctagatgctgcctggaagaaatggggagaggacttggttgggggtccctcccttggtctccctctcggttcattgctgccttctggggaagggagggcctccagtcaccatgcatggtctccatgggagcttggagacctgcagccagggacaaccatacatttatttcacctggatctttctttttcccccttcaacagccctattaccatatttaaatgcaagtatgtctcttttcattgacattttaagtagcttagcctgacctttttagagtagcatgttccccctttgaacttctttcccttcagtagtaccgtgtagctaggacaatagtcttagtgtttagtgggcttctagttcgctctgtttgggggagctttgtctctgctttcttccctcctctgctccctgcccttgacggtgcatgtcttcctctcgtcctgtagaaattccttgtttaaaaggctcagtagctaaagttgagcagccctgttgggggctgtttattgagtttgcggctggcttctggcacatcatttaaaaccacagtgattggaaatgggtcttggggtcaggcctccaagcatctgcctggatggcagaggatgtttgtctttatatgtatgggagtgtatctgtgtatgtcccagcacgaggctgtgcgtgcacgtgctggtggctgagagaagcccagggtagggaacatggcatacttcatctggattctgcagctacaagaggttaccttggcctcctgactattattcccgttgctgggacatccttgctgcccggtgcatttttagatagcataagccttgatcaagaagaaatccagggacccgtaggagaccctccagtgccagcttcatctagaccgtggggctcagaccgaagagccacatctaaattcccacaattgcctcaggaggttgaaacaccgagagatcaaataaagccacagggctcaccccacatagacccctgcagccccgcactcccttccctatctggctccatgtgtatgcaatcacctgggaccccccaatgcttcaccctcgggcctggggctgtgatgctgctgacttcatgttttgacaaaagtctggagttaaaaaggccatgctaacctgcagagcctttggagaacagctggaattaagccagctcccggccaaggtgcctgctctgtcaagaggccgtcccaagtgcctcctgcctgtggcacggggctgaccactccgccatgatctctgccaggagcagtgggccagcccagccatgctcagttctactcaagacaaccccaggggagccactgtgtcgatgcacggccaacagggagctcaaccctgcttctcaagaaaaaaattcctcctacaattcttgaattattgttgtgggccttctagaaccagcttctggggtgacaaatgggtgagaatcaaacgcacctaaagatgttgtgccttccggaagcctgacagccactactctgtgtccctctcaaaagctgccctgtgaaaatcccttcccactcctgtctttgtgtggagggcggggggttgtgtggcccgtgacctaggtctgtgcctggccctttcaaggattcctccatgactcaggctcctctctctcctgaccaggcttcccagcagcggcttatggaccagtggcagcagcggcggtggcggcagcaagaggatcaggtaggaaggtgtatgggacaggcgactcccaggcatgcccccagtgtgcagggggaggtcaaggccctgtcggatctgtgtggctgcatctgtccaacaccactctcaccacagccccggggagggggtggacggggagggggtggaccgggaggcgcgggcaaggcctggccacccagggcacttgtagtggggtcagtcacagtcatgggactgcaaactaaaggcagattattattctctccttgaaaaaaaaaacaaacctgagtttctttttgactttgaccatcccgtcacctgacagctagcttcgggtacctgtggtcatttccctccttggcttttgctaattcaacaggctcccttccttgggtccctgagccagccagagaagtgctaggctgtcccctgggaccctgctgcactggtaggtgggcttgctggtctggctaaacccccagagcccctgaaagcagccatgggaccagccctgggcctcagtgaatgaagctgctgtttctggagccgctgtgcctcccagactcttcttagccagactcctcagctccagctgccaagggaattgggctttctgtcccatgaggttgctccagtccttctgtctccaaagccaaccttttggaggtctggaacccctcaagtgacatgggaacactttcccagcattatcatggggtcaggccagagctgggatatgtccagggtgcccggggtcccttttgtccctctccccagaatgctttctgccttcccaggcaagcagggcttctgctgtgccctgggctccctccccacccctgctccctgaactgagtggtcatggtttgcagctctgtccccccacgccccacggacagggctctggagcacccagggaagcgcctagtttgatgtcacagggctctgaggagggtggggctgggcagggtggggggctggtgagggtaccaggaaatagagcattaaaagcccagagggcaaatgccaagaacccacaccctgggtgatgagaagttggcacagtgaggcccattagaaaacttcagtaaaaatccgttccatgcaaactggcactgcctcgagctacaaaggatccactcccccgaatcatcccattggggttttgtttggagggggctagggagttctcaggggttgccgagggtcagtttgccagagagctagcaagtgggcagactggcaggcaggtccagagagtggggcccccttcctgagcttctgctcaccacagccagtgtccaaaggccccacctgccctctggccagtgtccctcagtccccccagccccgggccccgggggcggggtgcacagctgcctcgtgtctccctgtgccatttggttttttaacttgagtgctttttggtatcattataaacaagccttggccctacctgtgcctggggttggggaaaagataaaagaaaactcttgagatttttgagtgttgttggttgttgttttctccgttcagtttctttctttttataacttggattatgaaactaaactttaacccaaaattaaccctgcctctctccccaccccaccccgttctccttgacttcatggcaagtttaaagggcagcatggggttctttatgagtctgagagccgtctcccacggtctgtgcccccttctgccaccctaccctctcatggactcccagagccaggtgggagtcccacccatccctctaactcctaacccccaaggtcatctccagtcacacatttttttttttttttcgggatcaatggtgtttgatttgtagccatttccatcaggagcaaagtctctcccagcccattctaggtcagccatgctcatcgctgcactgttagtgaactgtattcaggagtgtgctcccagaccacctgcccacaccagcctgggttagcgcaaggagtaaatcctcaactccgaggtgcccgccccgccccacagggtgcagggtcagcctggaagctacagggcaaccctgcagtgctgccgggcagggtgtgtcaggggcttgggatgtgccccagggcaatgactagactgtatccaccatagtgagagcgctgcctaggcaggaagacacttgcctgtgtgtagccaggctaccctagttcctcagccccactttggacctggaacagggttacaggtttgggaaaggaagcgttctgcctttctttcttttaacgcattctgccagtaaggggactgtcacctcactccttctagaaaatgatcgggaagccaagcctgatgggatggccaattatttacctgtgggtggcctctccgtggcaaaagctctttgctctgaatttcgaagaccacaaagactcacttgggtgtgtgcatcagtctaggccacagagggctcactgggtgttgatggcctagtttcaccttccccagctcctgaagcccttactcaccccagctcctccccaggatgctcctgcagcctcaactactgcaggtcagcatgaactcaactgcattcccttatagggagacacagggagacattcagggagagtctgttgagtacctaccttgaacctggtaccatgctaaacctggcaggcaactccaaacagtagaaaacgtggcctctgctccccaggggctctcaggcttcatttagggatcagacatcatcctatggacggccctttttttgtctttgatttttgtctagctccaacgtttgggtttttttttttttttttccttccattatgacttataggggaagcttcctgaagtgagaagcacttgctgagggccgtggggtgggaggcagcttcgtttttgctcagggtggcaacttggatccatcagggctatggtgtcagggtaggaggtctgggggggccttgaggtctgtgcccacctcagccaactcctctgggccagcctgcccacctgttcctaattcccctaggacctgaggtgagcagggctcaggggaccccaccaggtgaggtccctgccgactcctagataacttcactatcagtggtcacttttcttttcccttcacctggtagtttgaaatgtcatcttttcttgtgctcagtcgagagtttgtttgtttattttgatcgtattcattcagttccagtggccccatcatgtcccacccaaacctaaattcagtttgacagaagcctcccccgacaggtgagggaagtggtttggatattcagggtattttagtttggggtgacattatgggtgggtccgtgtatcaatcttagagcttctgagcccctggtaccaccccgtcccacctctccccacccacccggccccagccaggaccccttactgtactttatacttgccagctttattccaatctagtaacatgagctcctgatggtggtggtgagtgtgagcagtcatatttctgttgtcttttctcttgcttggttggggctgcggtgagagtgtctctgaggcatactttcccgcctctcttacgctaggatctgcacacctcctctcaaacactcttctgagcacgctcagcgggaaggtttgtccacacctattaatcctctctcagtgtccagcttcctgttagtaccagctggtttgcatgtttttgcttgttcagatgaaacagttcaagaaacaaactcatatccaactctcaagaaatgtctttttttgtacactttcgtttttgattttttttattagttacaactccaaaacacctgttgtccagtaaaacatttcacacctcccctgcctgttcttagattgtatgtatctgtgggactgaactaaatgcatgcaccgtagtagatgtactggtagccgtagctgtagttgtagtacatgcattgttgagttgatattacagggtctttgacggctcggcacagcacggccgtctgaaggatagtgcggggaccaggaagagaaggggctccatattttcaatgtttccaaggggcttggatccatgttctcaccatcagccaccaccacctcccctcacactccccgttcccccagtccagaactgggtcaccaccctcagctctagccttcctcactgaggtctctgttgatatcgtccaattatagtgcaaaaatggagccaggattggaaggagtcttaaaggtcttccttgttcttgtctttctcatactattcttgaacagagcagatctttttttatttcttaaggcctaccagcaagactccttcaagcccttctactccttgagtcctttggcaggtcacagccagcccttcagggatacgggtctatgtggcagtcctgtctatatggattacttcttggggtggaggggaaatgagacatggtaaggaagggattgagatcttgagatccttggtctgcagacagggaatgcacttggccctagtgaatcattgctatttgttcttagggttggtgaaggttaagtagggtgagagtggtgacattcttagcatggaggtgactggcacagtttcgtggagacagaaagggaggtcggcttggaacatccaagaggaaccacccctagtttcctccagttccccaggaaggctccctagaggggaaaggagcagtcctgcagcctgtgcccttagaacaggagcacgtgctgccagtcatctttggacatgccatcttccctacatttgtggtgacaagccataagggagtgccagaggtctctcagagcttctggaggtgtccctactctttacgtgttgatgctgagtgagtagtgcctgcctcctggaacctgctctttaagtcaggatgtggtggctctgcccagtgctgcaagaacattgatggaacacaggtgggatctgaaccttcagggtgcaagttatctactgtgggagacagaagcccaggaaaacgtcggagtccataaagtcccctgagagaatgcgtagagatagagcaaaatggtagcgctgtggaaagaatgtaccatgctgtggaaattggtggcagaatcggaatgaacaaggattgaatgtgagtaaggccagtctgccaccaaacaggatgagggtgccaaggcccaggaagataaatctggaaggagctgttcttctagcttggcctgcatgggggtgcgggtgagggaggtacacagggagatggctggaactgtcaggcttcagggctgctgaagctgcaaattggcccgaggctggggagtaagagaagagggtagggacagaaggcagagagagcagaaaatcccctcccactggcctaaatcccaggtctggttctgctaggaaaatggctttgctgccctgtggctggaaattctaagagctccagttccagttggtaaaatgagcaaaagtaaaatgcaagtcaggggatggaataaatagtttaacttgaaccagaagagaaaatgctttagggaggagaatagatctcaagaagtagatatgcccatcccaatcccccttcaagatgttttctgtgtccccactgctagcctctgccttatatatgttaggggctgggggacatgaaagatagtgtcccacatacactcttccacttgctggagggatcctggagctatttgggtcagttgtaccataagctttagggttcccaggtattgctttcaacatgtatttattaaggatttgttttgtaccaagcaccaaggaatataaaggcagatggcatttctagccttcagtggcctgagactctggtcctgtcctctgaaagtccgtgtttcccacaatgcactgtttctggcctcagaatgaccactgtcagcttcatttaaaaaaggaaaatggatcaatgtgtgccttcatttctgaagatggctttcctgtgcttcatgagcaagatctgatggggggcggagcgggggatgcagtgcctccatctctgcttcctcacccagcctcctgtgctagcagcaagcatcctctgggggctgtggacccaagatggtccatttgtgggtaaggtcatggggacacccttgtgctaagacaaagccacatctgtggccatagaatacagccagtagtggcccagggggagaacaaatctctgacccactagggccagccaccacaaccagacttaccaaaggatcttacctgaacacacatctctcagtctactgccatgtgttctggggatggatacctcgtttcccagtttgtcattaaaatgttcatttctgggagagccaggactttcaccataaagagtccagcattggatttcagtaaccccagtgaatttataataatgctgacagctgcccgctgctgacctcagcttcattcattttccaagggctttcagaccaaacctgttgaggataaaatacatcagctctaatcaataattttgtaatagaaatactgtgcacttgataaatcaactctagtgcaattagtgactagccttgaagcccagacctaagtataagttaatcctaaagtgaatggagtgggggaatgttaatggtctttcaaatcagtggaattattttcagtggttgacacatctctgcctgccccctgagctggttggtcgttgctcttgtgtgggctcaggagctcaggcccagctgtctggagcaggggtggaaagtgtggtggtgtccttcatagctccataagggcgcgcagagcacaacagagaggggtctagagacccgctccttgcaccctgggctgggtgggggcactgcagggtctaggaggcccctaaagctgatcaacctgcaggttggtgagaaccatccaaggagcatgtgcccgggtgtatcattcatggttgcttgtgttttgcagaggttttttttttatttggttggttggttggttggttggtttgttgttgttgttttgagacagactctcacatgttgcccaggctggaatgaagtgcagtcttgaactcctgagctcaagtgaacctctttcctcagcctcccaagtagttggaaatgtaggttcatactaccatgcccggctttggtttttttgtgtgttttttgttttttctttttttgtttgtttgtttttggtagagacagggtctcactatattgctcaagctggtctcaaactcctggcctgaaatgatcctcctaccttgacctcccaaaacactggaattacaggtgtgagccactgtgcctggcctctgcagagttttgactttcagatatacaccgtgatgtatattaccatagccaccctgggagacggtcaggaaggcagaagtttgtggcctggtttacaagcatgtttttgttttgtttttgtgagaaagctgggctacagaatggccatgtgacttatttaaaatcacacacctggttaccggagagcaaggctttggttaaaggtgaagaaccctggacttgaacccaggtctctggcctccttaagtagccctctggagaagccgtgttttttatgagggacacacctgccccccaggacaccgggcacaagcaggaataaagaccatgtaggaaaaataataaaataaaataaaagcccatgtagggacagcccaagtagcctcagcttctagctctatataggccaagcgctcagtctctggcctaaaacctcatagtctgatctttcagatgtagatttcagaactggacctacgggacatctgccatggagttgaatgtggcagatatttattaagtatataacaatagtaattattgttatatgtggtaggtactgtcctaagcctgattcaagggtgcttttgactgtatcagaaacctcccaactctgattaaacactataggttaatgttacagggaattaaatattatgggggatttattggctgacatcctggaagctccatagaagagtgggcttcgtgcctggcttgttcagggatcctttttctgcaattctcttagcttcgccctccttctcatttcaatactgtctttatattggttttcctcatggtggcaaaatgattgcagcagtttctggcatcataccgtcctgtccagaagaggggagtcagatggtctggaatgctaggaagagtccagagctttgtgctgcttggctaaggctggggttacaaaaccagtcactgagggtgggatccaccccctctaaaccgaatggctctttacacggtggtgtaaggatgggttcccaaaggaaaacctgcatgctgataagaggggaaaaggaagaatgatgccagagagacaaccagtggatgcccaccacagccctggaagttcctggaagttcatggataaatactaagcagtctccacgccattgaagatctcccaacctagtgtggaaactaatgggtaattacaataggatgccataagcccggtaacataagcctatccaatgaacagaagtagcacagaggaggaagtgatcagctttgtctgggaagtcagggaatgtttcacaggggagtgaatatttccacttttaaaggacaaataggagctccccagggggccggggaacatcatgggcaaagccaccagacctcgggacaatggagtgaggtggaggccctgctttattctggctggagaataaaatgcaacaggggagtaactgtaggtaaagccagagagctgggcagaatcagagcaggggacccttggtactacgctaaggagactggatttacatgggcagggcctgtgagatcatgggaggcctgaaactaggaactgacatcagatttgtatgttagacaagctttgacaacattgtccaggatggattcaagacgcaggactgaggtgggaggacaagttacagataattcgtgtacattgtaaacactccatagatgttagtatatagctgctcaagaagcagtaggccttttgctcttatccataagacgattaactctggactcaacatcatgctaggggctggggtgggctgcagaataagtccatggcatggtccttgcctttagccgacttccagtcctctggggaggacaaaagtacacaaccgatgtgagagctagcctttaataaggatagattcctacaaggtcagagagtacccagaaggcaggaagcttagtggaggaggcaagacatgacacagggcctggagaatttggagtgggaagctgtctgctaggcagggaatatgggcttgaagagatagagacagtcaaggttctgggagatcttgaaagccatgttgatatagtcacaggagagggaggttcgtattcttcatgcaagtggcgctcagtaaggacagaaccatctaaagaagataagcctggctgtagctccacaaagaacagcctgacccctaatcctggggtctggggctggggctgggctcgtgacctggagcaaggggtgtggagtgagaggcattgagaaagcagacacaggagggcattccatggcaaatctctgccttagttcccttaactttcctttgcttctgccaacaagttgttatttattccctgcttggggctattgtttcccattcctttgcccttgaggtggccactgtcccctttctttctgccactccatttccctctgtccttgtctttgccctctctgtcaaaatttggctcaaagtgccagaaagccatacctgattcaccctacctggggcaccccctcctttgcccatgtcctcagtcctcttcctcatgggtgagctctcctgaatgaaaggtgagattatgggtccttggaagatattttgcatgtgtctgcgggtggcacctgctttccccaacaatacaaaccatcaggcctcccggcggcaaagtcagcctagtcctcattcttcatatggataagtaattactatgcaattagaaaacacagaaaatgaaggggccctttgttcctggttgcttattaatattaatttttttaaaaaggtctcccttcccagcttgggatcctacagaacaggaagcagacaaataatgcctttgaacagctgtgatgggctgttgaaattagatctgtcaggggatgagaacaccacgatggcagccactccgtggtataggctaagagggttccaggggaaggtatcttgtaagtggtcaatagaatgctagagacacatcctagtcaatttgaatacaataatgataatagatgttaataataatagctcacatgtattatgagtgagccaagtaccatgtcaagcccacctgccttatcccattaaattctcataaccctatgaagtgagcactgtcattctcattcccattttaaagatttaaaaactgtagtttggaaaggatagtagcttatctgaagtggcagagacaggatttgagcctaagcctgtcgtcattctgtcctctaagccactgtcagcggacgctccatcgtaccagccctgggatggctgagccaggctctgcaaccttaaaacagacactcaagaaaaaaccacagctgctcttaactaaattctccattatccttgggggaggagataaccccaaatcatttacgagtggcctcaggaggcggtataagtattttttgcacctgctcctgctgttgcagacactgcctggctttggctgacaggtttctggtccctgaatgcactcagaccaatgtcagacaaaggaggccgggaggaggcgtggtcgtgtaagaggaagccagcctgaagagaattattggaagggaacctttagctgaaacaaggctgagggaagttagccaatgcccagaagaaactaggcgatggagcacgggcgggcttctctgggaagacagacgtcctctgtagggatgagtcaacattttttcctgtgggctgcgaggaccgcttctggaaggtcgctgggaagccccgcccggccttagggctgggaggggattggctgcccagttgctggggctttgctctgagccagtggcggggtggaggggcggggccaaggcgggagcagcgggcttcttggccaatcatcctgcagggaggctgggcacccggtaccatggcaaccgcgagcagggcctcatttgttttgtagatgagtaattactacacaattagagaaagctaaaaataaaggggccctttgttcctggttacttattaatattaataaaatggtctgcccaggtctgtggtaaacatttgatgcctgcgtgcctgtggcagaggcttgtgtagccgggaaaggcaccccagccccgctcgcccctctttcgggaagttatttctgactatatcctggagagggtgggcttctgaccttggggagaagaggagaggctcagtgtgacagacataggatccaggatgtcctggagtccgggtccgtcactgactcaggtggaaaggtggcggcagcgtcaccatccttcagagaaaagacagacacacagcagcaaagcagacactatggaccggtgtcagaggaaacccctagtccagttttgctgtgtccttctgtgttttctggcttttgattgatcagctccaggtgtgtaaaatagtcgttaagtcttcaatggaggtagcccccaagactccagtgactcccctcccatctggcttaaagggcacattccgttcaggcttggaaatgatctgctggaggtttacactgtgttcagggttgtccccgtggctccccatgccctggccttcgaagttaaagcagctgagaggcttgctttctattccttctccctcctagggggagaggttgccttgttgattactccagtgaggatgattaacagcttaaaaaaaaaaatagaggcagcataagagcatagaaggcagagtagggaatcagaagacttggttccaggcctgcttccacctctactaaacgaggaattcagactaaagggtccttgggagccatttcagctctacagctctgttttgctgctgtttccaaagctggaaatcccttttccttggagataggaacagggacagtgacagtgccttaagatctgagagaacaggccgggcacggtgactcacgcctgtaatcccagcactttgggaggccgaggcggctgatcacttgaggccaggagtttgagaccagcctggccaacatggtgaaaccccatctctactaaaaatacaaaaatcagccaggtgtggcggtgtgtgcctgtagtctcagctactggggagactgaggcaggagaattacttgaacccgggaggcccaggttgcagtgagctgagagtgcgccactgcactccagcctgggtgacatagcaagactccctctcaaaaaaggggaaaaaaaaagaaaaaagatctgagagaagtgagtggagagaaagccaagaggttccaggtgataggaaacttcgtgggaatttgaaaacagccatgaattgtttaatgcatgaaggcaatgggagggacagaagcggttccagaactgtgtatcattttacacatctgtcctcagacttccatccttgggtgtggttgattaaatctcttagggtttgattctgtgtggatggtattcatgaataatagtggacctgttaatagctgctgtcaatgagcaaatcaacccagagattgtggccagttcagtggctcttgaactttgctgctgttcctaataggaactttgatcctgttaggatcacctggggagtttttaaactgtgcagtggccaggctgcatcacagacccatcaaaccagaatctagcagggtgagcctcaggcaggcccagtgtgtaacacggggctcaagtatcatcatgttcttgctggatgtaaagctccataacatctttgtggctgtcactggtaccccagcctcctctaactgggaggtggggaggtggggctgggatctctagcctgctgctgtggagcccacggctctccagcctccattagtcttcccagcagggtcaggaaggccaccctccagggtggaccaaggggtttttgtcctcatagagggaccctcctgtctctctcgaggacaggccagtcctggctgagattaagggcatgtaccagtagaactagcagcctgcagcaactgtaaacagagaagcagccgccctccttgactgaccaatgggagccttttggtaaggtcggagtttgtttgttattaaagacctaattagaaacatgagagggagctgaatggctctgtgcttggctaattagtgacatgtatgcgcctgctttgaacttcaaggacacagaactattagtgcttacatcaaaaatggattaaactcctgtgcttttataattattaaaaaggagctactcaagtggaaagtcttttgtgtgggtcctcaaggggctgcccctgggataacttccccaccccaccctgccccctgcctgctagagccccagcagtgagttttctattagatatgattgggcagtaaataccgttcagccctagggtgtgccagctcccaaaaggacttggctctcagcagaatggagtggtcttttaggactgagatcagctctctgggtggccccctgggtccaggcactttcctggggtgggggaggggagttctagcgagggcccagggttaaccagggcttactttccctctggcagtgccctctctgcttccacgctgaccccaccagtactgcaagtctgcttattctttgggctgtggcgtagtggagggtggcctagtcctcaggagagaggcagtcctgtatctcttggggcagtcagatcctgacctcagggaacccccaccgtgatggaagagatgtttccactgccagggagctcccaatttggaaaggcaacagggtccaagcccttaggagcttctactccaaggctggagaatctattctgtgtccttgaatttgcagtttctctggggcaaagaaagatccaagtaaacagaggaaaccttgtcaaagtgtgattccagaagggacaactgagcagcatgatttaaaaagcatgtgccttcaagttagagccagatttggtcctgtctgagacactgtgtggcattggacacatttcctagctgttcaaacccttggtcttcttatctgtaacaggggttacacagctgctcttacaagatgttcggagcatgaaaaaagatcgtgtgaaacacctaccaacatgcctggcaacacagtaggggctcataagtatgagttccctttccagcctcacacctgcagaagctacagcttctagaactttgtgcttcttgcctcattggttttcacctccaggccctgttttgtccctaccagtatcaggcctaacaggggcagagtgatatctaattcttacatagcttttcatcatgattgagaagactacattaggctgcctcgtaagtctgtggtcccagccttggatttcacagtgttttcttttagcagcagtctgtcatgcagaaactgggcctgcagtgagtgcaatcacttataagacacaagcaaggatctgagcctcctggcaggtagcaggcagggaggtagctttcaggttgggaattggtgcctgagcacaccacagagcagcaacatgagagggtggctggcgacatgtggggaaaagccaaactgacttcttttttgaaaaaaagagacgagtgtgcttcaaagacagaggcagtcaatggatcaaagcaaagcaagggacattttcaggactgaactaggagaaacttggagccaccaaactgtaagagacagtagggagttgtctccgggcagcaagctccctgtctatttcctgtggagtctcagacctgggagggctggatgaggaagcaaaggctctggtatcacccaacaggggccacctctctgccttttctctgctgagtggtgatggtggcatctcgcctccccagggctgcgtgcccagctgctgggtggttcaatgcagcatggcatgggtgctgcaggttccggggagcctccttgtctgttattccttgcaaattctaacctgtgtgggcctggagtctgaagccaattaatttaaggaagaggcagcaggatgttagtgttaaaacaccgcctgcttcagccaaaccataaacatttgtctcccgggttggttttccctcctcttctgaagcgctttagagactcagggtaaggtgttgttgaagcatccgttcacggtggagagggatcaggaacaccatcctgcgtttgagactcgaagcctggtctggtgaagcctggcagatagttcacacaagcaggacaagccccgtgccaatgccaggcaggagtgatatccagtcaccgcacagggccccagtgactgcctcatggcctttcccttcccggggccctccgcacttgcctcctggaaacctgcaaacaagcccagtccctcagggcccttgggggttgagagaaatgagaactgacctcggctccagaaagttctttccttggcctcatgacaaaagcctggtttctctggccacaaggccacagcccattcaaggctgctccatccccagaatttacaccatgagcagacagcagtcaactgctaaccaccatcctccctcacccaccttcccaacccgccagtccagaacccacccagcctggccttggggcttgagatacacttacagactcagatcagggctgataataaaaacacaccaggagggccaggcacagtggctcaggcctgtaatcccagcactttgggaggctgaggcgggtggatcacctgaggtcaggagttcgagaccaacctggccaacatggtgaaaccctgtctctactaaaaatacaaaaattagccagatttgatgccgcacacctgtaatcccaggtactcagaaggctgaggcaggaaaaccacttgaacccaggaggcagaggttgcagtgagtcgagattacaccactgcactgttgagattatatctcaacagcaaatgcatggtcctagccacaaagcctttctcaggtcggttctgggtgtttggaactttttccttacaccaatccgaatggtagtgtgcttccccagctttaccactgacatgttatatgagagttttagaactggctaatagtgatattatctcctgagggttttgggggagtgtgacttgaccagaagccaagatctttctacaaaataattcacaagtgttaagtgctaatgtccatcagttccctacttgagacaggccaacattaaccagtagacattatcagcaccaacctcagtggtctgaatcaggttaagttttgagaacaagcagaaactacaacttatcataagactggcgccattgtcactgacatttggaatgtctgtgtgatgctggctgccctgtcagcccagtgcatgcacagacaactcaccatgtgtcccgtgcagtgtgtaagaggagccaggggactccagatacatcaagactagcatgatgttgacaccaggctgcgtttgtacctctcagtaatatatctgtttgtatatgcagacagtgaaaaagaaatcccatcacattgctctcttaatcctcccccagttttaaagtattttcccccttcccttctgaaatagcctgaatttcagcagagctttaaaaactacattgtgtataaaattgattgtccctgcatctgggtccctgaactgatttgattttaacttagcatgtcatacaattttcccaggttggacatcattgccgatcttctctaccagtctctcctacctccaggctaagctctagaaggaaagcttgagccaaggattgctgggacatagctggccgggcagactcctgaagtataatcctaccttgctctgctcaagacatgccaattcataaccgagtattctccttccattatcagaaatagattttgtcttttcatgctgacctttcccatttgaccatctgcaattatttacagtgggcactgctttcagaggacacatgaaggaaactgcagaatggggtccccaattctgttccccaggaaggcctttggctgcccagttgctgaaattcagagccctccagtaaagagtggctggctgttcagagggactgatgcaggccctcactgttgacagccaactggcattgtggacccagtgtccactgaggaatggcagaaagttgctcttactctttggagaatatgccctctgactaggaacatagagttccctgagagccctgagagttccccaactgcctggaggagtttcttgctaataggggagacagagtcctacgactatggagttttaaatcaaggcagatataagcatgatatagacaagatgaaggtagaggtgtgtgttggagagtgtgataactttatttagtttctttaaatttctctgaaacaaaaactcctaaaattcagtgtgatggattaacacagcctctgccctcatagattatcacacaggctatgacctctcctgctctcagtcctccgtcctttcgggactaggggttgggaatggaggccgtgacaccagtcagcccaaatcccttctgaattggacttggcaaaggtgggccctccattgcatttgcctccccgagccacacgcacaggctgggcagggaagagtctctctcccggaaatgtaccaggggccactgcggtcttctgcctgaaatgaaacctggcagcagcagataattcacaaagcagatgactgaaattgtcttgagggctggccctggcctttgcggaaatgtgagacccaccacaccaggagctgggtctagggctggaacttggtgggcccctggcttgttccaagtatgtgaactgagctcatctggaaaagattttgtaaacatttgctttctctgaatcggtaataattcaattttcaggccttagagccagaggtgcccccctcattgacctggctctagctttttgcctcaggtccagtgacatcacttagggacaacacagaaattattggactagacttccataccttttctagacccacagtgaggctgttctgactaccaccacttccctaccctccatgcctaattccactctcagcccagccccttgtcactgcagttgggcagagccacatgctggccagacagcaggcatctctcccgtcttgctttagaaccctaagggaaaggtgcccagtagctttgggtccaacccttacaggtgagagtctaagcctgcagcatctgtctctgttaagatctccaggataagattcttgggctttcctaggtcagccatcagagtattttattgatgggcaggaagtttctccttttatccaatgtgaaataccaccaactttcattcaagtgcatctcctcttgccgtcctcggtgagatcggtgtccttgcttttctggtccccattcccaggagtcctttcttcaggcccaagatgattaaatgcaccaaatggataaattgggttttttgtcaatcacctcctgattcatatggcaagtgaattgcattttcctatgtcagattttcctaaatctgcatgtggtacctgccttattggcctctgcatacataactatttcagaaatagggtgtatttgttttaaacttgacaagttacagagctctgtctctttttcattcttgaagcagtcccatgagtcagattgaataaggaaagcatcactcacttgctacagatgaggacttgggcttgtgagtggcttcttagcccaaggcacctgactgtaagagcagagctggggtcacagtcaggtcttctgcctctgagtccagtactccctttccttacatcattgctgcctctctgtgggtgccaccttgactgggaaagcccagaggatattggagagtgaggatgaggggcaaagaggaacctgccatggatgctgctgatgaaatgaacctgatcaccgcaatgagcccccaaactgccatcctagagcagggcttgtcccaagccacttaatgctcatagctcctgctgcaaaaatgccaagacgtttgcaagacgttgtcctcttctgggacaggagtcataatatccaatttataaacctcagcactgtttatttattcaacaaagtgtgctccctgtccccgccccctcacacgcacaccctagctgagcagtagacaaggtgcccttgcccactaagagccatgtcccatcctctcttcccaagctgatcctggtatatgggaccaattctggccccccaaaataagtctccgtgcctggggaaaggcaccgttcgcttagaaggatcactgagaattgactggagaatgacttccacagaaagcaccctcaggtgagagatttggcttcatgccttcccccaccccccaaccccactccccacctctcctcttagagggagacgggttctcaaatgaccccctttcctgcgtagccagccagtgttcagtttgtggagttacgctgagtttgcaaaagaagaaaattgctttgtccctaatgccttcccactgtcagacagcaggaacagctactgacaagtttatgtgccgagtggcagtccccattctctcctaagcagccagagccgttgctttttatgagtcttctcaaagatgcatgggtttccagatggctcgttcggggactttaacatgctttctggagcctggttcttctgctcacagagacagacagagagaagtgtcgactgtggaaaatagaggctcctctcttccatgcgcccagccctcaggggtgcgggttccactgcccagaagcctagctagaggcgggaccagccagaactgggtgcttattgcctgctggctgcgccctctagtggggacccagcagccctgtctttcacccctggctgggggacatctgcaaggtgactttgagctgaggctccggcaccgtgatgagcaagtgcgtaataaaacgggacttgggatttgaaagctgcattctaatacagtgtcttctccacggtgattttagtgtcatttgatggaggaggactgagcaaggaggggtaatatagacctaagatgagctgcttattgtgaaattcccttcaggccgactcagaaaccacaggcctccccacacacaggaatgggagcggttgccaaggatgggcataataccaacagcccttttgtcttctatctaagcctgcagaagggggtatttctgaacagcacccttctgtgggcatgctacatcctgtctccgaggctgcttctgctggctagattagtctctaggtggctctcctgctggaagaaacggaaacctaaacctgcctctccccacccattagttaggtgggcctgcccaacaccttcctgggttcacatccggccagacaagaaagaagccaaaaaactttccgtctaccactgcgcctcctcatgcccaccccatcctattagcctaaaatggaacgggctaattagtttatttgtatagggaggggtttcagctgcctggacaaaaccaggagtccactgtccaagcttcttctgttttcctgagctcagaagaaaaaaagtgtgttagactaagataataccgccttttgaatatctcggcttcatatttgcctccatgagtgagagggccaagtgttatctgcaagttgaatcttctatattcaaaaatctccatcccttttttctgccagcgcattcccagatcagccgttcacttgctctaagcctctataatttatttttttcttttctctttaacctgctctttccattggccagtttattcatttctcagctacagcttcagaggggctcaccttcgggcttcccgccccaagggcatctggaggcttcagttctgttttctctgctgagtcaggagccaggcccagcttgatttggtctcccgtgtatctttgtgtctctgtctcagtctcctgctagtgtgccttgggtgcctcatcaatctcttcccatccctgtgacaagtgggtgaaaatcaatccacttctggctcttccaggcccaccagaactgagggcctcaaatcacaggcccctgggaaagggaggggccaaagccaggagtgaccccacctgcatcgatgttctttgcctctgccattgaaggcaactggtcatagggcagagggggagaagccaagggaggcagaagggagaagtgattgttgcaaggagcagccctctggagccaaagatgtgaaagtgtgactctcagaatgtctggttctttaagacgggttagccgtagcccaaaggtagccagcccagactcaccttgaggcttaaaaatcagtaagaacttcctttaacaattaaaaaaatattgttttccattttggaaaagaaaataaagtttaaactactaaggagaaataaaggtgagacaaaattaacctggttaactggttgacaggctgcggccctcattagggtcagaatgatgggattgggggggccgaggcagtgtcaccttccgctgccccccgatctgcaaccccaccactctctggatttgtgcgtgtcaagtccactctctctgtagcaaaggtacatcctgagcctgctgttctcactctggagttgacattgcaggataaccaagagaaagcaggtgttttggtcagctatggtttagctatgaattggttcagtcggtatgttctgcattcatacttctttgtcttttttttttttaaacaaaaggaaaaaaagtttaaatcccccctttccttctcctgcaggaggtgagtgtgtgggtgtcctgtagaaccattggcttccaccccagctctggccccagcctccaggtttaccattcccccccatccctccctccatccccttctctccaccccaaaaggaaactctctgccgccatcattactgttatgtcaagatgcccaaactctccataacatatcccatcctccgaccacgttcagtattgatgactttcattcagtgttatgaatgggaagggcgggaagggagggagtagccagtggggaggggcgggtggtgggggtgggatggagaatggagatcttttttgtcttttttaaaaaaaaaaacaaaacaaatttgtcatttaatggatccaaaaaccaaaaagaaaaagtgaaacacacacacaaaaaaagatcaaaaatcccctctgcaaagattttttttttcctggacacaaattgctttgtttcctgtcacgttttaatatcaatattaacacaatgtgtagtctaaaactagttcctttgtagtttgcatgggatgtgaatgctgtctcaacgtgcccagatctagaagactgcatgagcatcaattcagatgtgaaaaaaaaactctctctctctctctctctcttccatatatatctctatttctattgtgataatttggtgggcagtgaagcacctccggttggttgccgtagtgtgttgaatgattgtttttttattctctatatttttggagctccaagcttcttagtagtagcctgggctgagtattcttgagtccctgctgatgttttcgcatggccttggttgagtgttagaagttgggcctcagctgtttttctcaagtgtttggcttgtaatgaccggtgcatgcctggcttctggcctcatacccagctctattctctgcacaccagtcctgaatagctacagtgctcaaccgaattttggcgcgcccgcttccccggcaggctccaacccggcgcggcccggaggcttcccgggggccaacagcccaggacctgtcgccgatctctacggccctgccagccaggactccggagtggggaattacataagtgcggccagcccacagccgggctcgggcttcggccacggcatagctgtaagtacctgccttcccctgccctcctgcctcctccttcctgaccagctccttgtggcctgtgggtgtgccaggaaagcccaacatcgggggcagaggagaggacagagggtccccatcaacatcacaccagctcctgagggctgaagcctccgtcgtcttagaggtgtcctgggtgcctctcgtgtggctgtgtgatggagcagaaggagcatgggcaggtccggttcagatcaccactccatcaccttcacacagtgcatccttgagccacttcgataacccgtctgaatctcatttccctggctgcaaaaccagaatctctatgctttcctcaaaagattgtgggaggattattcgaaacagtgtcccacgctggcacgtaatagggcctcagtagtggccaccttccttgatccccgctttctggacactgtcatgtgggctgggacctgagagctgggaaatgtcccagctccccaccagagtagcagccttagtcaatagagcccctgatctaaggtccagtggcagcgctggagcccgggaggtggtgtggggatccaagccctctcccaggcagtttcctttgctaatgtttcttacagtttccaggttccaagtaagttcccatttgcgttccttagctgcagcctccaccccttgaaggccagatgcatttgatatttgtaatgctctgtggttctataatctgactaatccaggcaatggaaatttgcttaacagatttgcatgctgttttcagattgtgttgttcttctccctcccggtgtgtgtgagcatgaatgtgcctgagcccacttgctcgctgtcccttccattttggaaacagaaaattggccaacctttgccctagccagcctcagcattttggaggcagtttggttttgagctaagatgggtgcgtctgcagtcccaggccacgttcctgtcagactccgcttctgagtgacagctggcaagccctgacttgggggccacgctgcggagaacaaaacatgtgcagacagtctagggcaccaaggtggcctcattcatgccccctggcattgggagctcctccctcatacacacactcacacgcacgcatgcatgcacacacgcacacagacatgcacgcacacgcacgcacacacgcacacacaggcgcacacacgcctgccagccctacttgtgcaggatgggtccttgttcagctccgctcccaagccagtatcacttaagtcagtagtctgatgaatctaatcccttcggatcaactgtggtaccaaatccagaataatattattcacctgagagctgctcaatttaggggaccgtctatcaccacttataacacaacttatttccatattcagcatccagaaacacagacccaatttgttcttgaaaaccggggtcttttgacctgtgggctgtgatgtttttctgaaataaccagaaagcatcccagtttgtctgcactgggatttcttctccccagctagagccgttgggactgcggacagagacttatctttgcactctggggttcagggcaacatgcccatcactgggggcacaaacccccgtttcccaccatccacccacgcctctgaatctggcttttggtttcccccggggtaagcagataggcttggtaggggcggagggagtggggactagggatttggagctgaggaggatgtcatcctggcccctcatggcacggtgtctcagaattacatattcatgctggcaaccacagaactagtcctagagataatttcctttcccagaatatgacaatctgttcccatgtatagcacactgatgaccttaacaattgtgcaattttagggacctttgattgcaacggcctttacaaatggataccattgagcaggtgctttcgttgccatctcactctgaggtattaccgtctctgccatgtgtctctgccctgccggtgtgtccgtacatgtatgtccacaggtcatacatgcacgtgcgtgcccctgtctcatcacatccacatctctctctcctctttctggaccccttttcaggagggtgggggcaaaagcaaatccagtcgtttaatctctcatctcttcctccagcttttaatcatgacccccacctttttgactctctctctttttttcttgatttggttctttggattctttttctgtatcttccccacccttcatctttctctgtcttgaaatacaatcaagagtgtgggaaactggaaggagatctcgtgctgtgcccgtcccagggggatagaggcagggaagcattgggcttctgctaggcctggaagcagggatgggggccagggccacccactcctggaggtcctttgagctggccctgtgggttgctgggccccttcagctccccaggccttgctggggctcagccaatggggttcatgcagtcaaacagccagactccatcttttagtgaaaagaaaacgtttttgccagtaactactgagtaattatccagattactgcacgaaaagcaaattaaattaacgacatcacctgtgtaacatggatttggatccctgccagtttcctaaccttttaaactgagctcaagttaattaaacattttttcaatcactttgatggggatatgggggaggacggaagagaggagagggaggttggggcagtgaggaagccccttgccacacactcctttggaaatgagtatctgtccttcttgggaagaacaccagcaagggagaggggttgtccttgtgaaagcgctagatgtgtactgtgttagcacgttaagtttgtgaggttggaacatggatctgtctctggaaaagagagggtgacagctgaggccagggaatggattccactcggaaaatcccacagaggcaccaaagcctttcaatcttggagttgggatgtaggagaagcaaggctggagatgaactggccactttgggcttgcacttcattggatgcctctctcgtagagagggattgctcctggctcctgagtcggaccaggtggagaactgggttgagttgagctccataaatctcttggatttctctaatgttgctgctaagggatcacctcaactaacgcaactgcctctcttaaccaaataaaccatgtgtgtgaattctcccacccctcgcctccacttccccttgagcactgacccagccattgctggccagagccagaggccactaacagtttgaaggaaagctacttgctactaattaagctgggtttggggacccagaggaagtaaggtttctctgagaacagggacaactggtatcaccaagaactctggagactgaagatggctccagccctttgtggagtcagatgaagagggggttaaacaactaccaggcacagcagacccttgaaaggccagacactggggctgcctgtgctccctccctccctcccctggaagagaaggagtggtgcagggcttcctgcccacagctccatataaccccaaggccactaaagcctttccataggggtggggtggggtggaatgggatgggggaggctgctaccagcccatcctccctcatctaagtctaggactcaatttccagagaaggatgaagtaaccaagagtgtggtagcaactcacccccttccaaaatggattaggtgagctcatagagtcagatggctgcacccgcagcacttaggaaggactggtcaaacacacccattgtccccaaccctctgacattcagcgccatccacaaaagaggagcccaggccccctactcccagtcaattcagggagactcagtaaacacatctgtgaatcctgggcctgtttttgtttcctgtaaccaaagccggttatttgttgtatatttttagtgtcatgacctttagtttttggtatatgatatgatcttttagtgtaagtttgcatttaaaagttatcgatgggtatctaataaaggcaagtttgtggggttttttttgtttgtttgtttgtttttttaacatttagctttgaaaacagaagtttaaacagaaaaaaggtatctcaggtcaatgggcagtttgcccacctggctgcaatccctgtaagcacatttcccaccactacctcaacaaccctatggtactatatcaaatcagcaaaagaattgaagccttgtcctctccccagtgtcaggtatggtttagatgtcagatttcccaacctgtgatctcagtaagcttctagccaggtgattctcgtgcgtattcaatagtccagtgaagtccatctttgaaactctagttaaaacagtggaggaaatcgcatacttgtctgacacttctttctcctcccctctcccctccattttatgttttcttctggacatcctggccttccctgccctgcagagcatacctggatgtccaggcaagactgggcgaagtttctgagtggccctttgtttaggtgatgtcctcagacctggacccccaccagcctcactccccatcccaaccagagatggctcacttcggatcgagggttgactacatctcatcatctcacgaatctgctgtaatataagacaacagcttttaaatgtgtatataacccatgatttcggttttgttttgttttgtttttcttgatggtttccctctccctccctctcttcccattctccttttaaatctctttgaatcacatttggtagtgattttgacttagtccagtagtcacatagctttaatatctagttcaaagctaaccatagtataattgttatattaaggagttattttttcttaaaacatttttttttgcttgttttggttctgttctcacttttaaaggatgctgagatggtaatatgactctccatattttggtaccaattctgagactgtatgaattttcaggtggaactttagcacacactgaagcaaagttgtgaagtgcagggcgggaggtgggcgtgagctttctattttgcgttgtagaagaagtgagatgtagtaagctaattaacagactttctagcagttctttttgtgatgtctctttgttaatctgagtctatctattttcggcaataaggtaaggacgacagtgttttgagtgtcctccttttctataagtgctttttttctgttgaaagaggtgatattataaggttttttgaaattgtgaattctaaaaaagaaatgttgtaaatacaattccattaactacatagaaactattaagaaagagagaatcaaaaatatttttgtgagggagtcggtcccaggcagtttgatgctctgtggaaggaggcgggaagggaacgttggccaagtcagttactgagatgaagatcgcccagctgccaggaccaccccaggacaagttagagcactgtttagctcctttgtctgtgtgatagacctaagaactgtattagtgttgtaccagcctattaacctcttgtctgtgcacagcttcaaatgttaccgtctagttagatttttatttaaaatatgaaaaactgcttttcccaagatgttttttaaaaacaaagctacaattttaatatttaacatatttaaagtttcaaagcacacctgtttggcttgggtgggggtggggtgggggggacattctttttcagtcttaatttttaaatatttgatcattttctattgtccaatcatttcagcacctccaaaggtccctaggacactttgcctctcttctccccctgccccccaccctgctcccacatctgggggcccatgggccaggagtggataagcctgcattaatacaacctttctccattcactttctatttacaaattaggaaagcaaccttttggtttatatatattttttttaatacctcagtgctgcaagtatcaccagagaggctatggaagaatttttttttaatttattgtagatgtaaacagaattttaaaaataaaaagtataaacatcactgcactgtgactggtgggaaaaactgacagtttcctctttgcacatgtttaacatttggctgttataatatatggtcctcggttggggaaagatacttatgatgaaggatattttttaatttaacttttttttaaatattggtaataggtcggcaacagcaactatagaagtacaactcaatagatggcattaaaacatattgtagtgtggatatatattttttcttttttaaaatgtgatattgacgttttattaatattttttaaattgttacgtttataaatttggtacttaaggcacagccagtatgagacact

SEQ ID NO: 383 - DNA, 377571 bp, Homo sapiens
  source 1..377571: mol_type = genomic DNA
tactacatgtatacacgcacactgcatttgttttactttttcatttaacatcaaaattaattttttttttttgagacaaggtcttgctctgttgcccgggctggagcacagcagtgtgatcatagctcactgcagcctctacctctctggctccagcgttcctcctggtgcagcctcccaagtagttgggaccacaggtgtgcgctaccacaccaccatgcccaactacttaaataccttttttttttttttttttggtaaagatggcgtctcaaactcctggcctccagcaatcctcctgcctcagcctctcaaagtgttgggattacaggagtgagccatcatgccaagtaagttatttcttcacactaaacattcttcagctcttagttgcagagtatttctagcatgtgaaacttcatacaatcaaccacaaaacacagacaaatcagtatgtatcaaaaagaagtaactgaaaaacacaaaatattgtctttgacagaatgactattttttcagacccttaatagtgaccaggccttcgcaagcctagaagggactcctgggggtgttttcatgaaaggcctgtggaaccgacttggtatagcctcatagcaataacaaacagtttaggtatcattttgtccaggggaaatacaaattacaaaatcaaagctagagcctttttagtgttgtatgcctggcaacacacctcattctacactatagcactgctaagcctcctgccctccttacagtccagaccacatgaaaacaaagtggtaactaaatccatgcaagaagctgggtgaaagcctcctttctgtgggtgctaatctgaagttccctccctcatctgagacgacctgcccattttggcagaacatgtgttaagccaaaatctcacacagatgaactcccaagtcactcacctcgctccaaccactttacatttagtttgagaatgtcacaggaacaaatgtcatctcctatgatttgagaaacaagaataatacaacaccaccattaagtccacctacactgccttaatggtgctgttggtgccttgctcccgtattttggccgctgcaaaatgggcttaaatatgtttgtaaatacataacttaatattgaattcatcttccctattccgcgcattttgagaactgtgcttagttttcactttggacgaatagcaacccttctgatggccgtcatgacaatgtctccaataaaaactgacagtctagctggctgcaaggcaggtcctcttctatcttactgggcactgctaaactgcgaagtcggggcgacacggcagcaactttaaaatcaaaccgcatccccaagggctcggcgtgttttttggcctctgcagcttcacgtacttcgtacgacaggagcgcacttgttctctgtccgagaacttcgtcccgagagaacctcaggaactcgccgggccacaccccctgtccagggaaggaacacgcccccggtgacagccggtacggccccgggtttgggcaacctcgattacgggcggcctccagccccgccagcagcgccccgcgcccgcccgcccgcgcccctgccgccccccggttccggccgcggaccccactctctgccgttccggctgcggctccgctgccggtagcgccgtcccccgggaccacccttcggctggcgccctcccatgctctcggccacccggagggcttgccagctcctcctcctccacagcctctttcccgtcccgaggatgggcaactcggcctcgaacatcgtcagcccccaggaggccttgccgggccggaaggaacagacccctgtagcgggtaagcactggccacacggaaggcgcgggcggcgacgctgcgcatgcgcgcctttgcccggcggcagcgcgcccgctgcccggaaggaagccgtgggctggcctcgggcgggtcgcggggtgggggtctgcgcaggcgcgaaggggcgccggcagtggccggggagacgctggggtccactgacgtccctttgtctttgtttggctcgtcatcttctggagccaaactgggcattctgaaggaatctagtgcatcggtctcacttacccggagtgcataccgtcgcggccccaagttttgggcaggaaatgtgccgctggggtctggccttgctcgcgggcgcccgcggcgctgtgcctgcgccctcctttcttgtctcctctgcgccggccgccgggacccagggcacctgcagcggggctggtgcgagtgttgtcccgggaaatgccggaatgagacgagacgatgaaaaccttaagtgtggaactgcgtctcaggccagtgttctggctgagtcacccctagtcacccctcgtgccctaggtcggccccgctgtccccaggggcaggggctgccgtatgctgggtcagcttaaagcgatgctccacaaacttggacaactttctagtcgttctcacatcagtactttgggaaaatacaataagggtgaaatactagaaaaatgttcacgtgcttcgatgccatgtaatggtaaactgctataaaagttttcaaaatcttggcaatttctgctgcagacagcacgcgtttcccagaacgagggccacacgttaatattaccttagtgcagcgcttctcagagtgcccccacctgccgcagcagcagcagcatcaccacctgggtgggcgttcccccattactgaatcggagactctgggggtggagcccaacaatctctaaaacaagtcctccaggtgattgtaatgtacgctgtagcttgtaaaccactgccttagagctgttggaggattaagtgatgtttaatctacacatggctcaatgccagagaaattcagcatttaaaaaatttccttagaagtttctttttcttttccttcaagaattgttgaggataggaggaggtcatattgagagtttgtcatctcgtagaataatcagtatgagattagaaaaggtagaggttttttggattagaggcagtttaaaaatcgtgtgactggcttattattaatcgaattagcagtttctgtttcctggtttccccatcatttcacctgctactcagccgtaaaagtttatttttgattcaaatgcagagattgagttttgaaacaaatctagattagtaaacatctatacttatatatagatttataaaatataaccagattatctaaaacttataaatgcatcttaaaattttttctttcttttacaggcaggaatttatacgtgcatgtttaaaggcgatacttttcaaatgccagacttcctcagcttgtgctatacttcccgttcacacactgccgtgtctttgctatgccctcccatacaccaaaaaaaaaaaaaaaaaaaaaaaccccaaataatccaaaaactcttgttcagatttccaaactggttcaaggtcaagatggaccaaaatttactttggctttatcttaaccaaagtcttcccaatcagtttcctaatatgtaaatgacatttttggtaaaagatgagcaaacatttcagaaatgagccaacaatttttttcttatccccatcataacttttaactgcaaaacctcaggacctggttcttttccaggctctgctgtctccatatagctgtgagtgtttttggtacaccaacacatctctgtatctgggccagtaaactttttttttttttttttggtgtagggccaagcctacaatgcatatgtccttattgttcatctattgtaactttttccacaaaaagtgtgtgaaatttagattgtggacgttccagtctccacttctgagccttgagaggttgctgaaagccctgactggctccagaaatgggcagtgttacctcttcagtgggtttcagtagctgtaaacttgaaacttaaggatttagtattgttctgaatgtggaattcacctccactgcaacttggatcctgtttaacaactcctcccttctctatattacctccatccatgtctgttcttatttgtaccctgaccctcaaaagttgcgtgacaaaagcatcaccttttgactgcagaaggcctgtttctttagtgcgtttagataagcctagtatcaggtgtgtaccattaccaaatacttgaggtgttaaggattaccatcttagcgttcatcctaccatttttatattcttaaggacaattccacccttttacacactgtgaccaagatttccaccttgcaagaaggaaagagtcaaaccttcaaagtttttcagtgtttaatttatcccaggctacctaaaatggatgaaaacatgaacaggcctacttgggtgagtggtgaaaactgaacctgccctggactgcctcatttgcagcctgctgtgttcaggttagggggcatctgggcagtgctggctggctggtagggcacacggcaatgtgtcttgccctgtatgtggagatggtctcattgtgcttcagtgcctgaccaccaagcaatactctgagaacttgggaatgagggacaaggggaattcatacttgttgaagtgtattggtattgtattgttcaaaataggctgcaggtagaaggctcataattaaaacctcagagtgccttccattttgttaagatgtgggttccttacagtcagaactgatcttatttccggtgaattattgtaattattgtaaaagtccaatatggtttggttttgtgtcctcacgtaaatctcatttcgaattgtaattcccacctgttggaggaggggcctggtgagaggtgattgaaacatgcggggggtggactttccccttgctgttctcgtgagagtgaatgaattctcacgagatctgattatttaaaagtgtgtagcttgcccctttgcgctctctcgttctctcctgctcctttgtgtggagatgtgccagcttcctcttctgccatgattgtaagtttcctgaggcctccctggccatgctttctgtacaggctgtgaaactgtgagctaattaaacctctcttctttataagttaccttgtctcaggtagttctttatagcagtgtgaaaacagactaacacaaaggccgtctttcatgtggaacttgtttttgcgtattggaaacattgctaatctgtgtttgggaatgaatcttacctttttatagagtatcagtgggatcaggtgtttgggatttggagctgtcctttaaaataactttgacaagtttgattctatcttggctttcttgcgtttacattcttagtgttcattgtatttttttgttacagtgctttttttgggcactaacatgttaaaaacagatgtagagcaccatcagaaggtattctcttttaagaactttaaatagaaaaaaacagtagaacaatgtattaatccaaaaggtggctctttgaaaaaaaattgaactacactaatgacatttgtaaacaatgaggtagtctcaagaaaaagatgaaagtacaaatatacaaaataagtcctgagaagaggagatcataaaaacagataatttgaagaatgttaggagactactgaactcttttaaaataaactttaaaactttgatgaaaatgataatttttaggaaaatataagtaatccagattgaccccagaagaggtagaaaatttaagcaggttgatttttatagaagaaataaagctatgaaagagttacctcctctcaaagcattgtctagtttcaccaagattatctaccaaatatttaaagagcagataattccagagcaggaataaatggctatttccttgacatagcatatctatttgaacccaaaagcccattttaggcttaatgaagaaacgttgagatttccactgatgttcagaccaagacgaggagtgagaacagcctagtaccttttacagtgtgcactgttagcaaaattttggtgttatcttagttttaatcccacctttaaaaataaattctaccttttttgtattaaggaaacttccacctttttattaagtgtgatctagtcgttgatttatactttgtaagaaggtaagattcaaacctttaaacttcttaatgtttaatttctcccaggccacctaaattggattataacatgaattggcctactttgaatgatagattattattttacattgtaggtacagccagtgtgatcagacaaagcaattcgagaactacaaaagaggaaaaaagatcagaagttcttaaatacataagggaatgcagcatttgataaaggtggtatctcaagtcagtggggaaaaggtgaaatattcaataaatggtattgggacaactgggtagccatatggaaaaaaaggttggatctctacaccgtaagccaggataaatttcagtgtttgatggaataaattccagatatatgatgataatagctcacacttgttaagtgtcttgtatgccaggcactgtagtaatttactaatgcatttaatccttacggtaacccaaagaagtagtaactgttatcaccacttatagatgtggaaactgaggcccatagatgttaggcagtttaaacaacatacattgctaataagtagtggagctgggatatgaacgtagtcagtttggctatagagtttctggccttaactcctatactctttttccatttaggttattgttaaaaatgaaacagtatgagaacagaatgtttttataatctgggtgtgaggaaagccatgacttaaccatgacttgaaaatcggaaaacgtaagactgataaattagattatatcacagtaaaaagactgataaattagatcatatcacagtaaaattcttctgcatggcaaaaatcatcataagcaaagccaaaagacaaacgatggtaaatagttgcaattcatatcataggtgaaggaccaatctttttaattatataagaagcttctagaaataaaaacaccaacatccattggcaaggtagacgttaggttatgaacagaccgtttacagaaaagtacaattggcttttaagcatataaaaagatgctcaacttcacttataatgagaatgcaaataccatttttcatgtttcagactggcagaaatccagaactttgacgatacactgtgttggtaaattcttaaggaaaaatacactcttgtacatggctggcaagagtataaattggctcaactcctatggaaggcaatttggttgtatctatcaaaaattcaaatgcatataccttttgacccaggaattcaatttatgggaatttatcgtctggacataactgctatgcatgccaaatgatgactgcaccaggttattcactacagctttgtttgcaatagcacaagactggaaacaacccaggtgcctatcagtagtggctagttacataaattacagttcattgtcacaatggatatgcagctgtaaaaaagaatgtggaacatctgtgtgaatgggtatggagggattgccaagatgtagcattaagtgaaaaaagcaaggtctcaacagtgtatatatacagtatgctaacttttctgtgaacagaagggaaaataatatgtatagagaaactttgaaaggatagctaagaaattaatggctgaggagggggctgtgtaatgaggatggatggaagacatagacttttgatgcttttttgtaacttgcttcttgtaatgtgactgcatttgtgaattacataactccactttgaagatgatctgtctcgctgtttttagtctaattgaccacctttctgtcatcttttgtcatacttacttgaagtttttttttttttcaattttgctctttcttgtcaagtacatcttttttctgcaacttgcttttgtaatcaaaatctacattttggcgtgattgaaaaatcaaaatttagagagtgaaatcggaataagttaatccaagtcattttacatttcataaatattcatttttattgaagcatcaattgtgatggcatcatttatacaaagaacagatctttgaggacaaattccttccactattatgtagaaggcattatgtgtatttcttgtattgtgagtgatgtacgttgatttttaaaagaaaatgatagaaaacagttttccttttagaaaagttttccccaatgtgtgattaatttctaaattgtaggatacagaattgttatttcccctctttgcatcctgcccagagctctttgattttacaacctgttccagaacgtttagtgtttccctgaagtccctgggatgagggtattctgtacctcccacaatgtgatccttacctgctttcccagtctttttctccactgtgtccctgtagaaccccatcttctgcctaatgtgtttcacttttctgcctctgtattgctcacacgaccatacccatagcgtggattgcacacttggatctttttacttagtcattcattaaatgtctattaaaggcctgcttaggaaagacctgtattgtccatatatccttatcttcaaggaagcatccttgaaatttgccctgctctaattccccttctcccggaaacccatcctttttctctccaacctaagtgatctccttcttctctactggacaaatagctatgtactactttatgaatcctttctatggcatcttgcgttgctaattagatgtcttattgcacggaactcgcacaatctgtctcatctccccacgtagtgagctcacagcacttcaccaagagtgctgcccaccaagaactcacagcacttcaccaagagtgcagtcaatagtgttttatgaacgttgggaagaatatggttaatgcctgagaacaaagaccagaaatgtcatcttttcgtgtgaccatcatgatacagagaagttaacagagctgccccattgtccatggggcatgttccgagtttttccagtagtggtgatagattttggctgatttctctgaacttttccctgagttatttttgtgactttggccaggatgaagggtggggaacccctcatctttaaatctctgagcagagacttgctaggcatctgcagcagtggtggggaagaggtcattaagctcagtgcagtccacgtggggccttggcctgcgatcttcaggctcaggagttattgtgagcccctgcgttgggtgggggaagggaggaaaggaggacagctgaggcaaggagtgggagcctggctgggggaggagacatcagcctggggcatgggtcttatgagggtgagtggccgccaggccctcagcaaggaccagagtggaagcctctttgctaagcttggtctggctcctgcatgggtcccagcagcgtgccatcaatcatccgttcctccttggcagatggccaggctccttcccatgcagcagcagcagcagctggctggccctgccctcctgtttcagctgacatcggcaaccctctggggatgtatggaagactgaattctacaagagatgctttcaggatgtcagtgcatgatgaatgaaagttgtggatcttctacatgctgctcttatcttcctcacatcataaactccaagtttgagagcatcacaatattcatcgatatgtagcactacacaatgaactgagggcaggaattgacttactctttgtacccggaacacagtaagctgatgataaatacttgttgaaagactgtagcatataacctgttgagttgtttgagaggccagggttcctctgagcagtatcatgccaacagacacacgcatgttatgtattatggcacataatcggtaagtccataactgttggagtaatggggacgagcatagtgcactgaagggtacaggaagcatcggggtttgggggctccggcctacatttgtggttatgttactggtttttcctatcgcatcagaaaactttattaactagatggaatttctgcagccagatgaaaatgtatgtgataggagtggatcgtgtgataggagtggatcgtgttagctgcgtgagattgctagtgaggcactgagttgtcatcaggtagcaattccaccatttccactggaattccttagcacattttaagctaaaagaggtaagaagtcagaagggtaagagtctggccatggctttgctttcttctctcacgcttccaaccaccctcgtctgaaagctacatttcaccttgtgaaagttctgcccttctgtttccaaatacgagatgctgtaagcctgaactcagatctaaaaccaaacttagcattttgtttccaaaagattgactacatattttaatttcccaacctctctcagtggcactgctctcctctcaaatcccagaagccgcagtcagggtcatctttgagccttacctctacatttgagttgtccttcctcccatgagtcccgatgacttcttttcttcattggtctctgatctgtcttcactctcccctgcctgagctgttcagagcattatcaacatctacctaaaatttgaatttcattctctcactgtttagggaacagcagcgacttggacctgtccaatgacactcttcaatgctggacacttgctgtaatttgctgctggcctcagtgtttcagatctccacttccaccccgaggctggctcctgctctgagctccttccttgcaggttgctatggtctgaatgcctatgtgcccctactgaattcatgttgaaatcctcacccccccaggtgatgggggattaggaggtgggggctttgggaggtgattagtcatgagggtggaacacgcatgagtgggattagtgcccttgtaaaagagaccccagataactagctagtcttttcggccatgtgaggacatggtgagaaggcgctgtccgtgaaccagaatttgggctctcaccagacactgaacctgctagcgctttgatcttggacttccagtctccagtattgtgagaaagaagctcctattattgataagctgccaggttatggtaaattgttatagcagtctggcggactgagacacaggatgttttttccttgcagccctgtctaaaacatcttggggctttcaaggctaaacttggcttcttccacttctctgccgccccttggggctgtttcagcttagattgctcttagagttggagctggaactagggctttggggctctgttttgtgctttcattccagtgtctctccttggggagatgaaggtagaatccctttcctgtatttggtgcttggtggtagtcatttcccccgctgtgttttcggaactcctagcctggttatagaagctgctggcatgatcagagttctcagattccagctgctttctcctggatatcctatcaaaatgccctctccgttcagtgagatactcgatgactttgactcatgatgccaaatgattgatttttccttcaccagagacctgcgtgtcctctgggtcagctggtacctcttctgtaagctcgggctcttatgaaaggggacataggcttttgcccattttttttttttttaaaggcatggtttcttgtatttctgtaggaattttgtatcctttcatggaagtgcatctgtagtgtttctcagcagggtatattcctaatccactaacttgttgaacaagtatattaaattggcatcatgatacagcgaaggctagtaataatgaaacaggaagaaatgtggtgacagtatatttagatgattataaatacattaaaatacaaaatttaggaacatcggatgtcttcccagagcatgtttataaaatgaattctttcaaagatgttaccataggaaagtaatactagtgttgaattttcctttaaaaagttttcgtattttacctttgatttaaaaaaattagtttaccattaggtattttatactttgcataggtcaaaagtcatgtgtaaaattaaaaagcatggttcagatgaggccacaaattattctttggcctgctgaaaagatctgatattttaacagattgtacccagaagggaagagtcatgaaaatgaaatactttgagggaattcatagctttccacgtggggaaaatgagacctgaagtaaaaaattttgaatgcactgttgttagcagttgaaaaccgcgtaagagtttgcagaatggaatggtaggctgtcacagagcccccgagaaggcattgcattgctgaaaactccattgccttacctcttcctgagaggcagtttacaaagagccacctcatctaccagtgagccctctgcagggacttctgctggtccctggggtgtctggcttaccattcagcattcctcacaccccgagatgtgtgcatcagcatgaaggagtgcttctcagagccccagggtgtccaggtggtcctgataacagagggcactcaggcagtctgtccctgctagccccatgcaggttgctgggaaagcacctgacaccaggagtagaaacttcacctggtggcccatcctcagaatgtaagaggggtttcaggagcccactctagataacttaaaaaatgttttttttcttcaggcttatgctcatactaacaagctctgtcgaattatttcaatgtgcggaataaaaggcaagaattattttctggtgcagtttagaccttggatgagtagggttatgcagctgtttgctgcagtagttttggggagacacacacctgacttaagctatgtgaatttggatatgaagttccaagtgtaagatatgaaccaaaggatttctcttaacgtaacgatggaactcaagcctgaactatttttgttcattaacaacctggcagttattttttcagaataaggagatttatgaaagagctgaagtctgggcttcattttgcgtgtacatttgcttccgctgttgccggatggttggtaaaggaaattgatagagtttttaaagtgaggactgtattgtttactttatgtgttgttttaaagtaggaaggaacacagtcgccctgctatcagcctctggtttcttgtcccagtggcgctaagagtcaactcttctgcctgacagtgcctgctcctaccgtgcctgtgctgagatagctcctcctggcttcagggcctttatggctgaaacttcaattatatatataaaatatataaaataattattaatataacttaatataataatatataataacttttttgagacagagtcttgctctgtcggccaggctggagtgcagtggcatgatctcggctcactgcaccctccgtctcccggattcaagcgattctccatacctcagcctcttgagtagctgggattacaggcgcccagcagggtttccccatgttggccaggctggtcttgaactcctgacctcaggagatccacctgccttggcctcccagagtgctgggattacaggcgtgagcccctctgcccggccaactttgtatttttgctcaaagtttgatctgtacattttgaatcatttttatcctttttccaatttcccaactaaccaatgttcagacccgagaaagcattctccaaaacctttctctgtattcataaaatcatacacacacacgcacaattgttggttttttataaaaatggaccagattgtattttctgtatcttgcttttcttgcttaatagtacatcataatatctccagttcagctgatatatctgtttttctttttttgagacggagtttcactgttgttacccatgctggagtgcaatggcgcgatctctgctcactgcaacctctgcctcccagcttcaagtgattgttctgcctcagccttccgagtagatgggattacaggcatccgtcaccagacctagctatttttttgtatttttagtagagactggtttctaccatgttggccgggctggtctcgaactcctgacctcaggtgatccgcctacctcaccctcccaaagtgctgggattacaggtgtgagctgctgcacctggctcagctggtatatctttagtatgttcttttatcttaaatgacttttttttttttttcgagcagttttaggtttacagaaaaattgagtggaaagtacagagttcccatacacactcctccctgagtttcccctgttaacgtcttgctttagttacaattgatgagccaatatagatacattattattaactaaagtctgtagtttacattagagttcatttttgctatcatccagtctgtgggttttgacagatgcatgatgatatgtacctaccattgcagtatcagaacagaatgccttcactgccttaaaagtcctctgtgctttacctatttgtccatctcccccttcccaagaaccccttgcaaccactgaactttttttattgtctccatagtctttgctttttccagaatgtcatatatttggaattatatagtatatagccttttcggttggcttctttcacttaacaatatgatttgaggagccttcatgtcttttcctggttggatagccaaatttctttttattatcaataatattccattgtatggatgtaccacagttgatccattcacctactgaataaatatgtgcatcacttacatggggatctataattgttttggcagttatgaataaagcctctattaaaatttttattcaagtttttgtgtggtcataagttttcaactcatttgggtaaatgcccaaaagtgtgatttctgggttgtatggtatatgtagttccataacaaactgccaaattgtcttctgtaccattttgcattgccaccagcaataaatgagggttcctcttgctccacatccttcccggcagttgttgttatcagtgctttggattttagctattccacagacatttagtgggatctcattgttttaatttgcaattcccaaatgatatatgctgatgaagatctttcctgagcttatttgccatattatgttttctttggtgatgtgtctgttcaaatcttttgcccatatttcagttgggttgttttcttactgagttttttttttttttttttttttttttttggagacagtcttacactattgcccaggctggagtgcagtggtgcgatcttggctcaccacaacctctgcctcccaggcccgagtgatactcatgcgtcagcttcctgggtagctgggactacaggcatgtgccaccatgcctgactgatttttggatttttagtagacatggggtttcgctgtgtttgccaggctgatgtcgaacttttgacctcaagcagactgcccgccttggtctctcaaagtgctgagattacaggtgtgagccaccatgagtggcctattgttgagttttaagagctctttgtatattttggatatcctttatcagatgtgtcttttccaattttttcccagcctgtggcttgtcttcttatcttcttgacagtatctttgggaaaggagaagtttttaatttaaatgacatccagcttgtggaccatttctttcatggattgtgcctttcgtgtatctaaaaagttattgccaaaccgaaggtcacctagattttctcctgtgttatcttctaggatttgtatagctttgcatttagctatgtgatccattccaagttgatttttgtgaaggttgtaaggtctgtgtctagatttatttttgcctgtgggtgtccagttggtcaagcccattagttgaaatgactgtcttttctccatcgtattgcctttgctcatttgtcaaagatgagttgaccatatttatgtgggtctatttctgggctccttattatgatccatttgtcagaatagacaaatgtcttttcttttgctgattgttgaagttgagtagcatcggttctctgactttgttcttctcctttaatattgagttagctattctttttttccccctttccatataaagtttagaatcagtttgttaatattcacaaataacttgctgggattttgattgcaatgatagggttgcactgaatctccagatcaagttgggaagaactgacatcttgaaaatattgaatctacctatttgtgcacatggactatctctccatttatttagatatatttctttcatcagatttttagtcttgttcttagggatcttgcacatattttattaataccaaaatatttcgtgtttttttgatgttgatgtaaatggtcttgtttgtgatttcaaattccagttgttcgttgctggtataggaaggcaataattgactttcgtatattaatcttgtaacctgcacccttgctgtaatttcttattagttccaggatgttttctggattttctacatagacagtcatgtcatctgtgaatgaacagttttatttcttccttcccaatctgtacaccttttatttctttttcttgtcttaccacattagctaggacttctagtatgatgctgaataggagtagtaatagtggacatctttgcattgttccagaacttagtgggaaagcatctagtttctacttttaggtatgatattagctctggatttttaaaaatagatgtttgtcctcgtccattcgtgttgtgataacagaataccacagaactgggtaatttataaagaaacgtattttctcacagctccggaggctggcaagtccatgatcaccgtcaacatgtcagcaagttcagttgtctgctgaaggctgttctctgcttcaaagatggttcctctggattggagaaacagtgtgtcctcacatggcagaagaacagaaaagtgagctagctgaatgctctgtgaagcctcctttataagggctttattctcatccatgagggatgagccctcatgacctaatcacctcttaagggtacctcctcttagtaccatcacactgggaattcaatttcaacacctgaattttggaggggacacattcaaaccaaagtgatgttctttatcaggttaaagaagttctctactcttagtctgctgagagttaatatgttctttttaatggctgcatgaagttccatggtatatatgcacatagtttattaaaatgaaacatgacaaaaccacaccctctttaacgttgaaatattgatatgtttgttaatcacagcacgtggtatgtatatggtaagtgcttacgggtacctccctgttaaatcttgccaaggatataaaattggtgccaggttatgtaatgcttttgaagccaacttgagtcttggatcagactggaaaatggaaagaatgtagattctgtgatgatgaatactttggggaaaataagaggattaggtagctgatgcccacctttctatcaagggagcaaaaatgtcctatgggtctttgatctttgccagtgcatttggattggtttctaagtacagcgtggcagccgggttatggtattgttagttctggaaacttagtcaatttgcatctggagtcacctagtcacatttgatgaaatgggttacaaagttttagcacctttctgtaaaccaggggttggcaaataatagcccacaggccaagtgtgacctgctattttttcaattaagttttaaattttgagataatgttagatttacatgcagtagttagaagtaatacaaactgttgtactctgtggatctgttgtactctttgcctggtttcctcagtggtacatcttgcaaaactatagtacgtcattacaacgaggatattgacaatgacagagtcaatatacagaacagttctgccaccagagattccttgtgctgcatttttatagccacattgaccttcttcctcaccccctgcccatgtgcaacctctggcgaccactcctgttctccattgctgttatttcatcatttcaaggattttacataaacgatgtcatatagtatgtaacctcttgggattggcttttttcagtcagcacaattccctgagattcaccccagttggttaatgtaccagtgctttgttctttttcattacagagtattattacttggtgtggatgtaccacagtttaaccattcacacattgaaggatatctagattgtttccagtctttggctgttacgagtgaagctgctatgaacattcatgtccaggtttttgtgtgaacataagttttcatttatctggagtaagtgcccaggagtgcaattgctgggcacttacatgtgataattgcatgtttagtttcataagaaactgccaaactgtttcccagagttcttcagtttgatattcccaccagcaacatatgaaggatctgatttctctgcatcctctctagcatttggtggtagtgtcactgttttattttagccattctgatagctatgtagtgatatctcatcatggttttactttttatttcgttggtggataaggatgttgaagatcttttaatgtgcttgtttgtcatttgtatatcctctttcgttaaatgtctttggtagacgttaaacatttctaattgaattattgctttactcttcagcggagtcttttatatattctcattactagttttctgttagatatgtggtttgtaaatattttcttctaggctgtagcttgccttttaattttcttttttttttttttttcttaagacttgtacagagtaaaagtttttaattctgatgagttccagcttcctaatttttcctttcatggatcatgttttcatgtcaagtctaagaactctttgccttgcgttgatcctggagattttttcctatgctttttgttttccttaaagttctgtagttttacattttatatttaagtctgtgatccattttgagataatttttgtttcaggttgaggttgatgtttagtttgaggttcatttgtgtcaaacagaactctgtgtactggtgttcagttccaagggaaggctggcactccatggaggttagcaaaaaccatcattatgccaaccatcaggaatacgatccagacacttgtgcccgctgtatctcagtacgagagtctccaaggaaaacacaacacagtcaggtagtcgagggagcaatagttacacagagaagagacagagcaagatcagtttcagtagtgcgtatgggtcccctgtgtccaggggtccctcgtggctgcccgtacggggtggtctgcctacgagcaccccttttgtactgcaactaagggaccctgtttcctgggtggggaacagatagagcaatgaggttggcaggttggccaggtgccatgtgacacacacccttaagcagaacaaaggcgcacacatgagcttgcagcagtgagagatacgtattccacacaaggcataagcctgccacaggtgatgagggctcttcatctgttggtgagatgtgtttcaggcccagggcccattcttaggccactgagtgggggctgaaaggctgtgcacacaagactccctttcgcaacatttttttttttttttgtctatggatgaatattcagttactacagaataatttgttgaaatcctttctccattgatttgcttctgcatttttgtccaaaattagttggccatatttgtgtgggtctgtttctgggtccttactccctcccgttgatctatgggtctccctctgtgacattgtcatgctgtcttggttatgatggttatatcgcaggccttaatattagagtcatccctcccaccttattcttccctttcaagattgttttagctgttctaaggtctgtcccactccatataaacatccaaataaacatcagaataaactctctgtcaacagaaaaaccttgctaggattttgataggaattgcatttagggacaattgatgtctttattatgctgagtctttcaatccatgagcacagcatgtctttccatttatttaagttgccttcaacttctttcatcagcgttttgtaattctcagtgtatagatcttgtgcatgtttgctatgttcatacctaacctaagcttttcattttctttggagtgattgtaaatgatatggtatctttaattttggtttccacctgttcattgatagtatttaaaaatgcagttgattttgggatgttgatcttacatctttcaaccttgctgaactcactttagtagaagttttctcatagactttttcagatattctacatagataaccctatcacctggaagtagagttttaatctgtgtgccttttgtttttcttgccttatttcagtggctagaacttccagtattatgttaaataaaagtagtgatctgtggatatttccctagccttaaaaaaaaagtattgagagcagacatgcttactttgtatctatcttaggggaaaagcattcagcctttcactaaactatcacatatgatgtcagctgtaggcttttttgcagatgctgtttattgagttacggtagttcctctttattcctaacttcctcagtgtttttatcaggaaaagggtcttctaccacctgtttaaataaagttttattggaacacaggcatgcttattgctttagctgttttctgtgtctgcgttctcagtgtaacaccagaatcgagtagttgtgatagtgaccatatgaccctcaaaacctaaaatatttattatctggaattttacagaaaaggtttgctgaatcttactatagtttcaccaactttttcttttgaattgtccttttttctttctttttttccaagttcttcctatctcttgatattctaccatggttgcaaactcttactccacacactcttactctaattggctaagacctagagcttgagccattggctgcggccagcctcagaagaaagcagggaggatggatagatgtagatctagttgccttctaaaggcactttctactctttgtctgtatttctatcaacggtagcatttggggtagttctaacatgttcttttgataacttctattaattctgtagcttgacagttaccctgaacaaattactttcatttcacttcttcttgacctcaaccttctttcctgccttgattctctgactgttcctatagtttgtattgctgtgtttccttatgatggaaagatacatgacttcactgatctctaagggatctaggggagtgttgctttctatacgtgacagttcttcactttttagttacatagttccattttgttttgtctaagggaggtgcttttttttttttttttttttttttttttttttttttttttattaaatggagtctcgctctgtcccccaggctggagtgcagtggtgcgatctgggctcactgcaagctctgcctccagggttcataccattttcctgccttatcctcccgagtacctgggactacatgcacccgccaccatgcccagctaattttttgtatttttagtagagatggggtttcaccgtgttagccaggatggtcttgatctcctgacctcgtgatctgcctgcctcggcctcccaaagtgctgggattacaggtgtgagctgccgcacccagcctgtctaagggagttttaaaatgtttagctttgaaaagtttgttgctttcactgaaaagagtgggatgaagtatgacctgagtctctaagttaggaaataagtgaataagtttttttgatcactgaaaggtaaaccactgtggtattgtgtttattgattattaattgatagagatattatgtcctgcatctctacattcacatttgattattttccagcttgcttgatctctccccagaacatggctttattgataatacaccccttcttcttcttttcttttcttttcttttttttgacacagtcttgctctgttgctgaggctggagtgcagtagtacgacgcctcctcacagcaacctctgcctcctgggttcaagtgattcttctgcctcagcctcccaagtagctgaggttacaggcacctaccaccatgcctggctaatttttagagattacccagagacgggggttcaccgtgttggccaggctggtcttgaactcctgacctcaagtgatctgcctgtctcggcctcccgaagtgctgggattacaggtgtgagccaccacgcccggcaccctgtacttcttttttctctttgccatgcttctgtttacccattactgccaacccatttgaccctccttgcttaggaattgctagcatttattttctttactactcatttggtatgcattcatattatttgaagacttcatatattgtctttttatttaagtttataatagtgattattgtatttctgttttctgtataatggcattgcaaatttaatgagagcttatttacttatgtggatccctcccacacctaggcatgtctgttacatgatgaccattagttaaatgaactaaagaatgattgagcttatattctgtagtatcgtatttggaagttgtgtgttcaataaaactcttttagtataattcaggccaataggtattaatattaatgaatgtcagtaaatggaagctatgtttttaccttctagcacaaacatctttagaaattttattacgactgtgtatgtgtgtccagtggctgactttccaagcagttattagaggagatctgagtttttagcttctgcattatgattcatgttgaatatttatggaagagaagtgtttctacaaatatgtaaaaatattggtgagtgaaagaaatggctcccagtatgacagaagaaaatatcctaaagagatccacagttatctgcagtttccccaaggttgtgtttacataaaaaagacattgttttatgttctagcatcaagagatgattttacgatataacaagttccacaaagaactctcgtaaggtggttctcagtcccggcataactgctacggagatcacagagcaatattattctctggatttattgggtttgctgcattctgttagcatcattcatatttttctcccatgggtaccactttcctctcttttcctaataccaagatatggagactcatttatgccgtggagtgtgatgctgggaaatgaatgcttgcttattacctctctccacaggacctttcatgaccatacgtcgatgtctgccgcctcagtataaataggcacattcagaaatgtgttctctagtgaagggcatgttggcttggtggaaagcacagggacttcacgtctggactgcgagtcagagctgtgcgtcatgtgcttactggctgtgtgaccttggataaatttgcctcagttttctcatttgtaaaacagacagtcgctatttctgggaatagatgagataataaggaaagaacctagaatggtacctggctcctgccagttgcacagaatgtttgttttgcagtgtgatgcgtccagtagggacacttaggggacagtgtactgtcatactgttgccctgttttgtaagagtgactgatggctacgtgacatcaccacactccctgcaagagctgcggtgtatggcacgtggctaagctgtaggtgcacatggccttcaactccacctgagctccagccttctttttgggagaactggcctctgggtccacctatgaagcaggaaggttgattattacttaaacccatagtcttataacctcttgggaaaagattctctcaaaatgactcttgatggtcaacatgggtgtgcatttacgcagcttccattcccatcgcttcttgcaggcagtgttgttcctgattgccccagtctagtttatcgcaagggaatttctttgcggggcagtgagctcccttttggcagaagaaagagtcaagcagaggctgggaggttcccttacccacagtggtggctggctctgtagtgcctcccggctctgggttctactttcctagtctcctgcctttccgcaagtgtctccacccagctccgatagagtgggtagcatcaggagaagggagggcagggatgagtgttgtagcatctcaacatttaagagcagaggatggggggctggggaagagcatacactggggccgggtgtgaggagggagaacattagaaaaaaaaagctaatgcctgctgggcttaatacgtaggtaatgggttgataggtaaatgtgtgccatggtggtttgctgcacctatgtaataaacctgcacatcctgcacatgtacctcagaacttaaaaaaaaaaaaaaaagagcagaggacaaggagcctccaagtttatgtggaaaaagtagttagaaaagcaaaaagagtactcaggaaaccaagagaaatgagaacatcaggaagaaatggatggtcggccacagccattgcatttgacaaccaaaagcttttgccaacaatgatgggcaaagagagggagggcgagagccaggcaccatggccaggtgggaaagtgtggagacctgcagatcctggcttctctttcaacagcttggctggaaataaggcaacaggttcaaaaggggtagggtttttaaagatgggagagactcaaaaatgtgtgtattctaaagggggaagatatgggaagatgttgaagaaaatctaaattttgtactactgtttgtcattttatacatggattctttttcactaccttctcctttttttttttttttttttttttaaatgagacagagtctcactatgttgcccaggctggtcttcaactcatgagctcaagtgaccctccctcctgagtctctctgagtgttggaattacagccatgagtccccaggactggaccccttttgttttttattcctagttacttttctgctctttttcctctcagcctccctcactcttccctccctcgctcgctttctgaggcttctgacaactcatctattaataagtttcttacagtcctgtccttctggaagccctcagtgccacatggaatctggacctggcaatttcttgctatccatttaggaggagactgttggtgtccattggtcccatttactcatccccggccatgtgttagctgtctgtaattctgtacgttgttgctacagtatttatatatgtcaagatgtatctcacagcatcttattcaccctaatattagtgaaaatattcactaatattttcagttttgtgcttaattccttgaaggttttgggatttaagcccaaccaatttctgtgaagagcagtagcataggaaattaaacacaaaaaataaaagtttaatttagaactgccctaaagccaaattgggaaaatttagtcactgttttccggtaagtacacagcaacaggtgttttggatggggagaggtgagcactataaagatgtctctgcagttctgaaatttccttttctgctttttctttccctcttcttcctcctctttaccctcctcctccttccctactcagccagtttgctatcgagtgtaatacccatggtagagaccaggatggaagctgaaacgtgagagaggtgtgtatgaatggttggtttgggtgtatgttcacattcatgcgtggagctcagtgtgatggaggtgggtcctgtaggctcactggggacccttggcgcagccccgttcacatggttgctgtggtgctggactggccactgggactctgccctcaggcaccagtgacccctggggtgggtcatctgaccctttctggacagcgtctgcttcctgcagcttgtgtgcctgttttccagagatgggagctgtaaactgtgaaagtgtagggctggcagctgccacggtgctgcaccctgcagaagatctgctttcagcaggagaggctgaggcccacgggaggaggcagaaatggtagctggtcccaagctccttagctataaccatttttctgcccttcccatggcttcagtcttcagcgtttccttggattctttgaccaaaaacaaccagtctatctccctgtttctctttgcctctctttccttaaggcagtccaagttggaatattttcacctgcagctgaattaacatggatgccttccttatccttaacaaggtttgtcttgaatggaaaataaatggggatcacatttggagccagtggtccctcgctagcttttcatgtgagccacacttagaagccgtgctagggccgcaggcgtgctggacattcgtgttgttccagtattcaccgctgtgtgctggcaggatcctacctggaggttctggggactgcttccccatcccgcagagtttagcgttgcccgcaggctcataggtgtcaagaaccaggtgagagatagcacctggctcagcatatgatgtggtacttttttctttttttttaggcagggtctcactttgtgggccaggctggagtgcagtggcaggatcttggcttactgcagcctcgacatcctgggcttaggtgatcctcccatctcagcctcccacatagctgggactaacaggcatgtgccaccatgcctggctaagtattttttgtagagacagggtttcgccatgttgcccaggcttgtctcgaactcgtgggctcaagcaatctgccttcctaggcctcccaaagtgctggacttacaggtgtgagccaccacacccgaccatgtttgttctagaaaaataaagctcattaattacaggaacatcgcagcttactgcctttctcactagcagccatgacgtgagctcctggtagaaatgaatagctcccttattaaaactgactggtcttaagtgtcacatcatgaagctttggatctctttccttccccgcagtgtccctccccgcacaacataaggaaaacctttcttagtccttcatatttggtgcttgggtgctaagcattacagcgctcttggctatccagtcatgcccataagccacaaagtgtttccctgtcaactgggcttcttctcttatcagagccaaggtgagaagccactgtggcccctgagagtgggctcaggaattctcggttttggcttgctattaatttgctgtgcagctttgagctatttacctaacttctctgttcataaatttgctacttatgaaaagtgcttgaaagcgaagttcctagaggctcttttttcctcctgacctgcggtaattttaagtgctttcttgtgttacgcttagcactttctctcttcccgtcaaaattaatctcctttcctcagaagctgatgaattagaactctaagccacgcttctttcttgcatggtctcacttgcttttctcccccatctttttctctgttctttttccccttgaggcaaaggcagagaaagaagatggaggcctagcagactggttgctaatacagttacgacattctctttctcagtctaggggaagttactctggcaattatgaatccatatccctgcctaggaactaactttatcccccttattagtatttcatttctatgggatggcttcttgcagattttttttaaatcttttttttttttttcctgaaatttcttacagagaccaaccctgttttcactatctgaatatttgaaagtatagttgaaactcaggcagtttggaaggagaaccgtgctgtggtttcctccaggagccgaggttctttccacaggactgcacatgggccttgtgctttgtggactgtcagttctgtgtcagcctgcagctgtctctttttaattttgttgtgttttttagagaaggtctcactctggagtggaggctagagtgcagtagcacagtcccagcttactgcagccttgaacttctgggctcacgcaatcctcccaactcagcctccttagtggctgggactgcaggcatgcgttaccatgcctggctaatttttttttttttttttttaatttctagtagagatgaggtctcgctatgttgccgaggctagtcttgagttcctgggctcaagcgatcctcctgcctcggcctcccaaagtgctgggattataggtgtgagccaccgtgcctggccttggcagcctcatcttgagtgtgaaatttgtttacagcttttcttgctaaagactagtgtttcttaattaccatgtgcaaggtcttccataccgcagaaggctgttgggcaaggcatagtccagataaactgtcttgacagagaagtagcaaacgggaaacaggctgaggttggatgctagggagatgcctgggcaggatgtcacaacatggattaaaatggaggcagggcagggcagggccacaggccaagccaacacagcaggcctgtctgggctgcacacgtggtccagttggagggccatccacagcaacagcaggaaggggttgatcaggaggcatcatataagaactaggcggatggggcagtggctgattccacgtggaggggcctgctctgaggctgctggtgttcctttggtggtcagaacctggcatcccatagctgacttctataacccacgtgccatttgggcctcctgctccttggcttagtccctagttcgttaccatgggaacgtgaagctatccttaatatttctctaaattctggagtgtgtgtgtgactcggggagtttgtgttctcatgattacttccgcctcaaggttcgggcatctccagatgctacctctttttcacactgaattgactccttttcatttattttttgagttggagtcttactctgtcacccaggctggagtgcagtggcgtgatctcagttcactgcaacctccgcctcccgggttgaagcagttctcctgtcttggtctcccgagtaggtggacttataggcgcccacaacgacgcctgacaaatctttgtatttttagtagagacggggtttcaccatattggccagactggtctcaaactcctgacctcaggtgatctgcctgcctcggcctcccaaagtcccgggagatgggattacaggtgtgagccactacgcctggccaatgtaaaggaaattgagggggtacccagattcgaagcggggacctcttgatctgcagtcaaatgttctaccccgaattctaccccctctgctgactcttgtctcattttctatcaaaacctcatccatggctttggtggctcatgcctgtgtcccagcgctgtgagggccaaggcaagaggactgcttgaagctcagagtttgagactagactggacaacaaagtgagacccccaacagtacaaaaatatattatgcaatttccttggtgtggtggtgtgcacccgtagtcccagctacttaggaggctgaggcaggaagattgcttgagcacaggaggtcaagactgagtgagctgtgatggtgccactatactccagtctgggtggtagtgtgaaaccctgctgctaaaaaatgaaaaagccaaacaaacgaaacaaaacaaaccctacaaaacctgacccataacacaggtgagaatgtcctagactttcctgaagactggggaaggagtgatgggggaggggccacactgcacacatcacggaagggggacctctaaccctggttattcctgctgccaaggcagcctcatttcacagcttctccctgcttgagggcgaagctgtccaccttccttcccagccctccttcctttcgccctcctaagaaaacatacgtcatcttttctcccacaaaacagatggagcacttctttttggcgtgggttctggctaacatccgtgcactaagggtctcatctgttacttccaaatcctaccaagttgttttctcaagcaaagatgggactttttgaacactgacctcgcattaaattgtgtaaccttggaggttggactacatgtcgaaccaaacaggcaagaggaagtggtgaccgggcttgaggggtccctctctgtgatctccattccggtgtgctgtgaccccctttgcccatcacacggttgtgtggttgtgttttattccacccgctcctcgtgtgaagggggcactgtgttcactctatcaccttatccctggagcacccaccaaagtgccgtgaacagagtaggaattcaatcaatatttaccgaacgactagatgtgctcagcacggtgctaatggatgattagaaaagttaataatctcagctcttaaggagtttatagtctagtcaggaagccaaaaataacacagatgagaataattaagcctccaatctgatggcactgactgggggtgcatttatcaagaatttggaagcacgtaaccatacttacattctttgttgcatacatagcatttaaattgtgactctcatccaacttatcactcagatacatttttttctgtgttaaaaatataaagccatatttccagagatttttaaagggcccaaaagattatgaatttgatcttaacatcagcagatgacaatctagttttaacaagttactttgaattagtcaaatctaaaactcactttagatttgttttctggctaatattctaattgagagacatttccatggaggtattaggttaaaatactgtttttagatatgtgacacatttccctgtattttagaaatctcttgggtatcttaagagaaatttaatccatctgattttgatccaaatataatttactcacaatgatggagaaatatttgatatccacggaaatctattgatgcacttaaagtttttctccagggaaataagaaatcacattttttcaagggtgaatcataaacctacagtgtctaatttttctgcttatttaacaaaacctgagttaagtatcaaattgggcagttccagatcatttgtttttaagttttttagtcttttaaactatgcagaggaaattttattcaaagaggtttttttttccttattctgacagttttatctgctatcctgtttttttccctaaacagtgatttttgaagatttaaggtaataacacaattttgatgtctgtggattaatggcgtctgtattcacgatgtttcagacctgtcagagcttggaaatagcatttaaatgtattgcttaattttaattttaaaatactttctctgagaattagatcccagtcctaagtgagtactttgaatttcaaagaggggatttaggccaaggtacagctaaattttgtcctcttgaaagacctgaaatccatttacaaataaaattgaggtcttcgtatcaatattatgttttggaagtgaaatgtgcaaggacttgtgcagtgtcacatcttaagaggctgttgggtgccatcgggagtcgaggcagggcctggcatttcagcgaccctgctgctccacatgctggttatggagtactctccgacttgtccacgcttccaagttctgatttctggcctcctgaggatggtggttttcctagcgcttctctttcacagtaggttttgcatttctgacctgggccttagcctctttctttaaggtttgccttctggccagatccctgggcaggggcccagctcctgctttgcggccctctgctgcctgcagctaacgacagtgacccctgcccggctccactgactcataggatctgatgcttggatcgttgtaatagtcttctggtctcttcttcttttagttcatcaaacagatcttaaccatgtaaaccttcgtaaatattatttcatgtggggattggctcaattttagcgggtgggtatacaaactggagacagactacctgggtttagtcccaaccctgaaatttattactctatgatcttgggcaagttacatgaccttggtcaagctagttaaggtctctgtgccttagtttcctagggtgaaaaatggggttgatgataccctgatgagaggtaggtattattttatgaagattaaatgacacagaaggagaagcgtttagaacactgtgtggctatagtaagtgctaaataaaattagttattacatagattgccctatccttttagaattttctgttttagaattttagaatgtttttaatcttcagtacttgctatcgtcttttttaatagaaataagtctcgagtttagaggtagttataggctttgcgaattaacattcttttattttttaaaaaatttattttttcagatgaagctggttcccctttatatttaatacaaaatttcctttaaaaatctaggttaaaaagaagtgagtttaaaacatatcaactaaatcataaataaatcgtactatggttttaaatatggcaaaaatcgtgaacacagtgctcaaatgcctgaagtttgaggaaaatctgtgaggggtgggtgcttcgggcctctggtaggtcttagctagcctggggctcttcctgccctcctgtgggcctctgttttagccagacagcccactgatgactgccacatcctgagcattcctgcctttgggtttgttcttgagaatacccaccctattccacgtttctgatttccactcatcctcatggccccatttgagatgaacatcatctgtaaggcctccccagtgcctggctccaggcctctcttcttcctccaaactttgtcgtgctcaagaaagtgcctattgtgtgtatttggcagtcatttcttgccacgtgatatctaataacttccatggatctgtcctgtttctgcaactggaagaagatgagcggaacctcttttaggtggggacagtgtcttagtcatctcaatagccccttgaaggcatgatacggtaccttggatggtttctatgttaatattttctgttatgtgtccatattgaggtatcatttatgtaccacaaaattcacctcttctaaagtagtggaatttgctttttaacaagtttgtacagttgtgaaaccatcaatgctgtccagttttagaacactgtcatcacccccaaaagttgtctcctgcctctttgcagtcagtctgctcacctgcctccagctaacaattgatctgctttctgtctccatagttatctttttaaagataaatttcatagaaaaggaatcatccaacatgtagtcttctctgtatgggcttttccacctagcatagtgttcctgtggttcttccatgttgttgcacttactagtaattgtttcattttattccttagtggcagcagatagaccttgctgctgggtgttcagattgtttccagttttgaggtattatgaataattcttccatgaatgtacaggtctttttgtgagcccatgtcttcatttctcatggatagattttggagtagaaataactggttcctatgatcagtgtaactttttaagaaactgctaaactgtttatcatgttatattcccagcagcaatgtatgaggattcatttctgtacatacttgccaacacttgatattgtctgtctttatcctaatagcctttctagtgggtgatgaggcatgaattgaagatgactcttgggttttcaggttgagcagttggatgctggtgctaccatttaatggaggttgagaaaggaatgaaggtttttgagaaaaagtcaagaattctggtttggccaagttgagtttgaggtgccagttagcctttgaagaagcaccgttaagtaggaagttggatgtatgagggcacctatgttaattccagctttgtgaattcattaaataatgaaacctgggatggttgcttgaaatttttctaccctatatatgaatctgatggtctggacaagtcacatagtttcggatgtcagtttcctcatccataaagtaatacctattttcctccaaagcttaggtgaggagtgaatgagttaaagagtgcaaagtgtttcttattgtggcggttgttattaatacgtgatttcacttttcatttatttcatttttatgtccattgtggcttctaacctcatatttcacacatagcaggtactcagtaaatacttaataaatcaatgaatgcaagtaatgactatgtatatactagtggagaaggaaggaggggagggaaaggagaggagaggcgaagagaggtgggccaggcagaggagagaagagagggagggagagggagagagagagggagagggagagggagagggagagagaggagaatgagaatgagaatgagaatggatataatttgggttggccttaggaaggagggctctcagaattccacactggagctttgtgtaaaggaagtttatcttctatgacaccagggaggcaacatggaagacatgattttgggagatgtttcaataataagaattgtcacgtgtaaagcatggttgtgtttgcaaagtgtcttatcttcctactagaccttaaacatcttgagggttggagcctttctgatgtgcctctatatttcccagagccttactaatttcagcatactataaatacaacaaatacctataaaatgagtatgttggtggatgactcatgaacaggttgtttccttcctgtgtccctgggagagcatgtctgtgcttctaccacagctcatgcatggcttgtgtttataatgatttgtttgcatgtctctctgtctgtcctgagctccatgatggcaggggctccatatcccttggctcatgcctggcaagtagtggttgttcagagagtgctggagagaattgttcgagtgaatggatgtgtctaacactgaaggaaagcagggaaaggagaccagatctgtgctctttggagtttcagattgtagctctaaggatctaaatttccagagggagagaaagtagggaaatggtccataactcatttgtcttccattttctgtcccgtgggctaggtaggtctgttcttgatatggttgggagagtggttgcctgtctcagtgttcaatgtcagatgacaatattagctcacattgtaaatattctgagagtgccataccctcaaggtttcttgttaggttatttcattagggagtgttttctaagattggcttaaagtaaaggattttaaactttttctaagagagacattttaaatttattttaattttcatgggttctccaaatgcagtagactttttggcaaaatctcaggtaaacctcatacatataaatcacagaaatggaagaattaggtaggtgcaaaagtaattgcggtttttgccattacttttaatggcaaatacttcagttaatgcaggggtgatctaggacctcacctgcttatcatttctttgtcctttgtcaaagccctgaagcatctgggggactttagggctccttggaaggaagtttgaaaaaccccaggtatagaggtagtctgttcattttgacttcctgtttcttctgccactctcaagagacttctgttaagtctgtagaaagacttccccatgctaccatctgtaaccaccaactacgggaaccctagttcactgttggtgggaatgtattttggtatagccattatggaaaacagcatgaaggttcctacagaagttaaaaatggaacttccatatgacccagtaattcctcttctgggaatatagctaaaggagatgaaatcattaccttgtaaagatgtctgcactccaatgtatgctgcagcattattgacaatagctaagatgtggaaactaagatgtctatcaagggaggaactggccaggcgtggtggctcacacctgtaatcccagcacttcgggaggctgaagcgggtggatcacttggggtcaggagttcgagaccagcccagccaacatggcgaaaccccatctctactaaacatacaaaaattagctgagtgtggtggctgcatgcttgcagtcccagctactctggaggctggggcgagagaatcgtttgaacctgggaggatgaggttgcagtgagctgagatcacaccactgtgctccagcctgggcaccagagtgagacttcatctcagaaaaaaaaagtctatcaagggaggaataaggaccatgtgatatatgtatacaatggaatactagccttaagaaagaagatcttgccatttgccacagcacggacggatctaaaggacgttatgctaagtgaaatgtgcagacacagagagagaaatattacataatctcacttatatgaaatatttttaaaaagatctcaaatattaatacacacgtagagaataaagcagtggtttccatgggttgcgggtggggagaggaattggggagatgtagatcaaaggataaataaaaacagatatattggacaaatgagagatctaatgtacatcatgactaaagttaataaaattgtattagggatttttgttaaataagtaaattttagctgcttttgtcccacacacacacacacacacacacagtaactctgaggtgatggatatgttagtctgcttcactgcagtaaccattttgccatctatatgcatcccgtatcatcacgttgtcaaactcaaaaatacacagtaaaatttatttttttaaaaagaacaaagccttaaaagaacaaaagaacaaacctaacaattgcctccttttgtatttccctttttgtgttcattttcacctcctctttgagcttgaatcaaaaggttttgaggccaccagtaaatcaggtaaacagtaaaaactggagggaaaatgcctcatatttgtgaatttgccattgcacattcccatggtcagtgtctgatgtggatatagaaagcagcatcttgtccaaggacatggctaggaggggaaaccacagcgggtagacgagaggtaggtgtttgtcttaggtcattttgtgttgctataaaggaatacttgaggctggataatttatacagaaaagaggtctttttccttcacagttctgcaggctgtataagaaatatggcattagcatctgctggcctccggtgaggacctttgtgctgcatcaaaacttggtgcagaaggtcaaaggagaagcgagcacctgcgaagaaggaccaaacccaaggggcgtcctggctttataacaacccagtctcagggaacgaatctattcctttagaaacagtcccgtttcatgagagtgagagctcacttgatcccttgagaatggcaccaatccgttcatgtgggatatgcccccaggagccgaacaccttccacgaggcaccacctcccaacaccatcacagtgggtatcaaatttcaacatgagacttggtggggacaagcaaaccacatccaaaccacagcagcatgaaaggggatgagtcagatcttgggttactattgaaaagggctgtgtgtgcctgctgggattcatggtgcacatggagagcaaaatgagtcctgggaagcagagacttaatgcagagggggctggctgttaaaattttgaattccctagggcctggcagtgtgagttggaagacaaaaatgactgggtgcctctgggagggcctagcagtccaggagagcagaagctctcagagccagaaccaacagagctggcagaagggagcgatgtttggatggaatcaggaatgctggagttggctgggatggaaccaagaagtcaaaacagtaaggcactagaattagctgggcagattcctgaagcagattcaggtggataagagtttagttaatgtatagtattgcctctgtttaagaggctataaaggatttttgtgagtttatcttgggttgtaacagccgtaaatactggagagatggactgcaacttttaaaaagttgatgtaattcacatgccataaaacttgtcattttattatgtacaatccagtggtttttcgtacattcactttgttgtgcagacatcaccattaaaccgtgaaaatgtttggttcactccaaaaggaaaccccatagtcattggcagtcacttccaattcttccctctgcccaggtcccagcaaccaataagctatgttctgtgtctgtggatttgcttcttctgaacctttcatatatatagaatcatacaatatgcggacttctgtgtctggctttttcatttagcatacttttttcaaaggcccatccatgccattgcatgcgtcagtgcttccttcctttgtattgctgagtaatattccaatgtgtagcccaacaacattgtatccgttcatcagctgctgaacatggggattgtttgcattttggattattatgaacaatgattctgtgggcatttatgtgtgcatttttgtcaaatccttttctgtgtagagatgatcgtgtgggttctgaacatggttctattaatatggtattttacattgattgagttttatatgttggactggtcttcttttcctaggataaatcccacttggtcatggcttataatcctttttatattttgctgtgttcagtctgctagtattttgttcagaattttttcatctatattcgtaacgatattggtctgtagtgctttaaatttttacttatgttcattattcacatttaaaaagtgacaaaaattgtatttatggtgtataacatatttgcaaatatgtatacattatagaatagctaaatcaagctaattatgtgcattgcctcacatattattttttgtgatgtcacatattgcagaatcttatttttaaaggccaaatagtattccgtttaccatatatattttcctcgtttatctgttgatggacacttaggctgatttcctgtcttggctattatgaataatgcggcagtgaacatgggagtacacattgtcttcagtatactgatttcattttctttggatatatgctcagaagtgagattgctggatcatatggtagttttttttttttttttgagttgaaattttgctcttatcacccaggctggagtgcaatggtgcgatcttggctcattgcaacctctgcctcccgggttcaagtgattctcgtgcctcagcatcccaagtagctgggattaaagatgcgtgccaccacaccccgctaatttttgtagttttagtagaggtgggattttgccatgttggccaggctggtctcgaactcttgtcctcaggcaatctgcttggcttggcctcccagagtgttgggattacaggtttgagccactgtgtccggccggtagttctatttttaatttttgaggaacctccatactgttttccataatggctgtattaattcatattcctttcaatggtgtagatggttcccttttctccacgttcttgtcaatacttgtttttgttgatctttttcataatagccattctaacaggtgtgagttaaagggtctgtagtactcttgcagtgtctttgctgatattctgtgtttgttttcctgttctttatttcatttatttccactctagtctttattatttcttcattatttaggagtgttatttaatttccatatatttgtgatttttcctttctttttttggtctgtattgagttctacttttattccattgtggttggaaaacacactttgacttaatcattttaaatttattgaggttcattttatagcctaacatattgcctgctggaggatgttccatatatccttaagtatgtacattctggccaggcacggtggctcacgcctgtaatcccagcagtttgggaggccgaggtgggcagatcacgaggtcaagagatcgagaccatcctggccaacatgtgtgaaaccccatctttactaaaaatataaaagttagctgggcatggtggcgcacgcctttagtcccagctacttgggaggctgaggcaggagaatcgcttgaatccaggaagtggaggttgcagtgaggtgagattgtgcctggtgacggagtgagattctgtctcaaaaaaaaaaaaaattctgctcttgttgggtagattgtttggtagatgtctgttggtactagttgatttatagtgttggtcaagttttctgtttccttgctgatcttttgtctagttgttctcacagttgtggaatgaaaggtattgaagtttccaactatcattgttgaattacccatttttcccttcaattattttagattttgctttgtgtattttggggctctgttcttatgtatgtttatattggttgtctcttcttgatgaattaaccctgttagcattataaaacgtccttctttatctttagtagcaagcgttttcttaaagtctgttttgcttgttagtataaccattctagctctcttggggtttctttttgcatggtatatatattttacatagttttactttgaacctttttatgtctttgagtataaagtgtgtcttttgtagacagcatatagttgaattttgttttaaaattttaatccgttctgccaatctatgtcttttaattggagtgtttaattcatttaagtttaatgcaattactgatgagataggatttacttatgctattgggctatattctacgtatctttgtcttttttgttcttctgttactaccttattttatgttaaatattttttcaagtaacattttaatttccttgccatttattttcctctatgtttttgagttatttgcttagtggttgccctggggattacagttaacatcttaatttataacaatctaattcagattaataccaatgtaataatatacaaaaactttgctcctatatagctctgttctattccttctttactcttattgtcacatgttacctcttcatagattgtgtgcttttcaacataggtttataacaacagttctatgcttttgtcatttacatcagatagaaaaaagagtacatttatcccattttaaatattttagaaatgcttaaggatatttaaaaaattaaactatgttacatttattttaaaatacatttatactatttgtaaaatattcacttctgcagttacctttatacttactcctatatttcttcattgatttgatttactgtctagtgtcttttcatttcagcttggtggaaaagttcctttatttcttgtagagcaggtctgctagtaatgaactctgtttttatttggaatgtcttaatgtctccttcattttcaaagaatagttttgctgacatagaattcttggttgacagttattttcctttcagctctttgactatgttatcccactgctttctggtctccatggttttcaatgagaaatcggctgttaatcttactgaggattccttgcacgtgatgagtcgcttctccaatgctgctttcaagattctctttagtctttggctattaacaggttattggttttgaattacaaattcactgttagtctgcccacgtttcatcatccctatttgaagggacagcatgggacacttttgtcagtgctttaattcaacacttgtgatatctctgtagcattttattgatctatcaactttatggttcagtaatatgtggttttgtctttcactgttatattacttaatagaatttcagattgatatttatgtgatccgttcccataacttatttacttaatagatttgttggacagctgtatatggaaggctgtatgcaagactttgagttttcttagataaatgacacatgatcctaattgtgaagatgacacatttgattggcggagcacacaaacttaactaattactatgcaattaggatgaaggtatctatgtgcataaacgtagtagtttggaagcaaagaataggaagtcactgattttcataagtggtaaatgagcaaactgaggagattagatagattagcaatttgagaccttgagttatctaaattagaacgtggcagaatcaaggactagaagtcacttttctgggttctttctatgaaacgatgattctagaatgtggctcttttctatgttcaagcatcataggtaaaaatgatttcttaaaccaggtaagtgtgtgaagcacagactggctattttgcttcaaaaggtgtttatgttaaaaataaaagcaaacagtacttatttatgcttattatattgtattaacatgaattaagtaaacaagtgactatgctggaacttgaggtgtcaaaatatgaaaagatacttgctgttattaaattgaccttagatgttttattttcctttttattgttatttgttttatcaaaagaactcttctcccctgtacatctgtagtaaaattttgaataggtacagtttgtattagagcctccttaaaaataaagttgcagatcaatcaaaactatattcattctccataggataaagcatgacatttctgggcatacggttttaattttaatctgcatgcctccgtttctattctcccatgagtctttgcggcaggacaaggaaaagcaagtcttataaaaagaaatacagtatgtggtgcttattaaagttacatacatctcttctcacaggagaaatttgatttattgcaggttgtgcatatgtcgcatatggacatttctagggaacagattccttattgctgagcagtgaatggcttctagtactccattattgctccgggaacatgttagtaataattatgaaaggtaggataccatgaaatctgtaaggtgatttggcagaagtcgatgctgttggtgccaggatttgggtaccgtaccacggtttcctgttttcaaatgtattaattgatccgcaaaggacatcttttggagacaagaattcagacagactggcacagcctggacctccgccaagactgctcggaaggttgccatactgggagcaaaagagtgagagagagaaagagggagagagagaggcagagggagagctgaggaaagaaaaaaaggcaagacttggcacagctcagtcaaatcagcttcttttgtctgctttctcggcttgagcttcaggaaagaaaaccgtcctggggtacagaaaaactcagaactttttggttttcaaacttagaaggctttttaagtctcttgggctatttgaaagtgttggtacatacaatgacgtttagtcaccagtattaagggaaataaaagcctttttcaaaacgaagcttccatagtgtccatgcatttgggaaatactatatttgattttttgcatgtatgattataccatgagagacaggattaatatagaagatggcaaggcaaatttctaattagagggaatattaattttctacaaaataaagtttgttcatcaatacaaacctgctttcaaatcaaatcagaaagacatccttcggaatgtgttcagaacgtaagtttttagattttattttattttatttttagacatttatagacattaacttttcaaggagcctttctaagattttatgcagcccagccaggaagtcagagtaaaagttgttttatccatgtgtttaagaaaacgttttcttaaagcaacagcttttatttctgctgcttcatgctgtcctaaactacatcccccagcaattagtgacaacactgaagaccagaaaggcaagctgaagacaccagacttcgcttgaagggcaaacaagaaatgtgagcttggtcattatttttttgtgtgtctttgctctgaaccatttttgggaggtgggtggggaggtgtctatgtctaagagatgtatgcgattagtgaattctcattgtgagaaggaaatgatgaaaggtgatttttatgatgttggcagaaatggctgggaatggtagagaatagaaatttaaatcttttggagaagaagtggtgagctgtgtttgcaatacttggagaaaaatttcttatttttggttgattagattttataattaaacgattactgtagcctggctctctcaaaatgttttaagtagaaggaaaatttagaaagtttaccgattttctttttaatactacctggtgttttacttagatatatactttatatctaatttctgaacaatgaatctttcctattaggcctgattatgattggattgtgatagttctgttcttaaaaatcagcattattgtaggagaggttaactgtaaggcatgtgttactgtggatcaccctgattgtaagtattctgtttttaaagacagtttgacttgtaggattaagttatgacttcctataatcatgtattttctttttattttatatgccgaaagaatacaggaaaattgtatctattcacataagtactcatcattttgggcagtataaaagactgcccctggatctgtgcttttgtttggagtatgtaatcattgatttcttaatccttcgacaataaaaacctgtctatagctttccattattgcgcgccttaaatgattaattgtttcacatgttttttataaaattatagtgacacatcagcaatcctgaaaatggcatttaatatataaatatgattgaaaaatatatgaaatctaacagaggtgtttgaacagttaagcttaagtatgttcttcaactttttaattaatcaacattttgattttctgtaaaatgaaatcacttaacatttatgtgtgttgccaaaatgacaacctttgtttaataagctcctttatacactacgtcgctgatactcctaaaatggacgccaagacatgaaagacatgctgataggcactcggaaggaaatgtttgcctgactgcagtcttcctttttgaattgattacaggatcattcatgcttatactaaaaaacaacaatatatgaaacaaaaagaaagttcagcaaacaagtttaaattgagcttcattttaatactgaccgtcttattgccgatttatatttacttccatttacttcttaaacatttaacataacttcttgccatttaggtttgctaaatatataacttatttaatttttaagtccattttttcttgaagttaaaataatttttgctagctgatttcttaacttctttgcagcgaactcagaacaaacttatatccaaactatttcatgtccaattattttccagcagtatgatcaaaagtaggtgaattaaaaaacaaatatgtcagaatataccttaagaaatattaaatttttcgatactggtaaaactacattttacagtgtatattaaacttaaaatttgataaatactagctattatagtcactgaagtttcttaccaatagaaattctctctggcctacacattacatagcttaaaatgaaagaaaatctcccataaagatgttccttgtaaaacgggtataatagacacgtctttgtgcaagctttttttaaaaaaaagtgtgattaagaagttgcgttgattacatttttttaaaaagacatttagttgtaacataatgcatgcttctttatttttagaccttttgtactacaaacacattgacatttaggttattaactatttccatattagtatttcaaatcttattttaaagtatataaatactattggtttgattgtaaatgaaccctatctcacctcataattatggtcgtttgaattgtataatattttgaagtaaaattattgaggcagaaatgcgttaatatttaactgctacttgatacgtattattaaattccattttgatgtatgtacctgaacatacaagcacattattctacaaattaatgcgaacttctcaggaagcgttagtccagtattttataattactcgctcatttattcatttattcaacaaatgtttattgagcactcacttaaatatgctaatattttattgataaagttattttgggtaacggggatggaagagggaatagatttaaaataaaatttaaacgcctagatagaaaaaggcagtactataatgagattaatttcaacaaagtatgttcacttttcttgcacaatacacatattgtagagtgtgattataaaaaatcaggagattagttgtattacacgtagctgtaagaatcttgttttatgactattttggttgttacattttattggccagaaaacttgagttgttcaagtcttctgacagacatgtaaaataagcaattcaaatcagggaggaagaaactgagattgagccactgctcacatgctagatcttacatatgtcaaagcaggtgtaattgaaccttcgaagacgtggctgcaacgtaaacaacagtggcctgtttatgtgggatttttttctttcctttgttttctgttgtgagacaaaggaggaagataaggcccctcccacatcctgaggccagcatggccctttgaaagaaggtttgctagggggtgtggtgtattttaaatggacctatcagttcactttctatattctagtggttcgtgtgtgtgtatgtttgtgagtgagagagagagagagtgcatttaactcagtggcctaagtttattccatgcagttgttctctgatacaaaaagaaggcataggttcatctttgaagaggagataaaagtcacgtgatctgaggagatgtacttgtaggctgctttggtggcccaggcgtgaggcagagctggtggcccatggaatggagatgaggagtgtctcagccgtgggtatacactgctgaggtcattcagcagatactcccagaggacttgctctgtgccaggcaaaagatataattgctgcccataggaattcctagtgtagttgggtagaggagaggataggaataattgatgaatgtaggtaccttttcaggttaccaaataccttcgcctgttattccatgtaatccaagcagccatgctgggcgcagggactggtacacaatggccacttaataagtattcatggaagaaataaactgagtggcgaaccagagtattagcttgttgagtcttatttgactaagagagtgttttttccttcatggatagaaaaacaaaaagtactgtgctttctttatcttgtttctctgttgctggctatgggtttagaggggtgcagcagagggccacattatttgtgaccacattaggctctcttgcggtggccattggagatgatatgaaacaaggacttgcctggtgtggggtggccctggacaccggctttctctctggccagccctctgttgtcttgcattccctctgtcctcattttcccaaagcatcccatattgtactttaggacttggtggtgtggcctgagcatgcagcaggccagtggagtgcccagtgagtttaaagtgtttcttttgagggcaggacaaaggcagaggggatggagacagagaaggtggtgagggcagttgtgcagagttgagggcgctgcccagcaagcagcttcagtcctgttgtagctgcagcactaggggcctttgagggagcaagggtgaatgtgggatcctgggttagactgcaatatcagcaaccgcaggcgttgagagggcataaggtgttattgaggggctgcatggggggatgtaaatgggttgctgaggccagttcatgttgaacatcgtctttctgggtctttgtcctgggaggttttgaggcccaggagagggagaggcagagtcaggagcattgtgtatagttctgtgtccaaggcggtgaggggctggaatttagcctcagctttgctgcccaagccctgtgccttgatctgctgcaggaaggtaccaagtccccattgtgcttgtggaggtcctggggtgcatacaggcttggaactggaatagcaggtattgggagaaggtcaaaggtctgtggccagggagggcagtgttccagtatctgaccatggagtctagggggctaggggatgtgatcagaagtgttctagagaacatggtgaaacaggggaggatgagtaagtagaaatttagatcaagtgaaagaaaaggttttgagagtactggagttaggagtttattctgaaactcatcagattctgaataattgtaccacctctgcaaagctcgacttaaaagtttggccgtgagttgtgctcaggttattttatttctccaaaagcaagcagaaagtgaaaaatgttacctgtgtgtgttctgtattgcacgttatcagaggagatgaacattttcttctcttacagttaagaatctctcagtcttacacaattagaataccccttatgtgtggatctggaggttttgtgcaaaatactgaagaattagtccctctggagtgatgccattcttttatccttgtctatcaatgtcatttatatctcttttcctattagcccttctaagttattgtacctcatctgaaaagatcaaattgttctcaaagacccaggagtgtttcaccttagctgtattcatgggaaatctgcctttgaaacaaatagtcctttaccgtcttgggttagagataatgttcctcagcatctccccaaactgagtttgaattttgactcaattttttggttgtgggactttggccaagttatgtaaacctaatttcttcatctgcagaacagggatcatggtatttccctcacacgattttgggaggagaaataaggaaatacatgcagagctcttagcatagtgtctggtatgtagtaaatacttaataaatggtagatattatttatgttttacaaaattatttttttaatttttagaaattgtgataaaatatgcataacatattttaccgtcttaaccatttttaagtggtatcaggtacattcacattgttatgctgccattaccgtcatcaagccacagaagtcttttcatcttgcaaaaccaaaattctgtacccataaacaataactttctattcttcccttccccaaaccccgcaacagaatcgtggcaaccttgattctgttttctgtctctatgaatttgactacttcaggtacctcatataagtggaatcatacagtgtttgtccttttgtgactggcttctttcacttagcataatgtcctcaggattcatacatgttttagcatgtgtcagaatttccttcttttatgaggctgaataatactctattgtatggacagaccacattttctttctccattcatctgccagtggaaacttgggttgcttctaccttttggctgttgtgaataatggtgctatgaacatgagtgcacagatatctctttgagctcctgtttccagttcttttgagtatatccccaaaagtggaattctgggttgacaatttcttttttttcagcgcaacttcagttgtactcccttcttttgcctttgtgttttctgatgagaaatctgctgtcatttgaattgttttgcccttcagctaagatgtcctttttctctcactactttcaaaatcttgctgtgtccttagttttcaaggaatgtgttatgttgtgcctttttgtggatttctttgggtgtatcctgtttggggctcattcaccttcttgaatatgtaggtttatgtcttttgctaaattgggaaagttgtcaggcattatttctttgaatacttccccaggtgtgccctctttctcctttccttccaagacttggaggatgtgaatattaaaactttgttatagttctaccagtgcttgatactgattattttttaagtctattttctctttactattcagattgcataatttctattgttcttaccttcagattcacctattcttttctctgtcatcttcattctgctgtttagctcactgggtgagttttaatttcggttattttatctgctatgtctttactgagactttctgtttttaaaatttgtttcatgcccatttttagttgtttgtggaaacatgtttataatggctactttcaaatccttgtcagataattccaacatctgtgccatctcaatgttggcatctcttgactgtgttttctcatttaaattgaggttttcctggttcttggtatgataaatgattttgattatatccaggcatgttgggtactatgctatgagactggattttatttaagccttctgtgttaacaaaccttctctgacactgtgctagcaggggaaaggggggcactccctcatttctgtgaggtgggggagtaggagggtaccttattattggtaggtgagggtgaaattcaggctacccatagttgatactgttatttttattgttagttttgtactgggtgcagtaacctggacagtgtctcagctctgtattccttaaatttagcttatgttgttggtgctacttgtgtttgataacttgtttaatgatagttacattctcaaattagggactgagccttctttaatcactagctacccagagattagtatgtgtttaccactagcacattgaataaaagaatataagagatgacattgtagtttctactttattaatttagaaaaattatttttaaaaggagagaatacgctacctgggtaagatttccatttttttggttattaacatgcgaggttttatcagacttttgcaacttatttttagaagaggtcagtatattaaaaatagtcagaagaaacagatttgactgaaggctttaaaaatgtcagtgataaagtattctgtttcatttgtgaattcaaacctgtagcttcaggacagatcttaaagatgatgcatgtaactttggaataatatattgtcagggttcttacgggtcatctgtgctgtagcattgacagtgagatcccagttttgcatcacttactaactggataatcttgggaaaatctccaaaactctaaaggttgacttttcctataagtgaagtggctgtcataataccaatatcaaagggttgttcagaatattaagtgagataatgtgcctgaaagcaatttagctgataggtatcataaacatgggagacaattatctagttagtttctccagacacatgaggatgatggataaagataatgtacctaattctgtatgcttttcagctgtttattccaatagactgttttatatatatatatatttaaaatgctttaaaattgtttaaatatcgaagaccttcaaatagatagcaaagtattaaataaagtagaatgaatacccatatacccattattcagaagtgacaaatgccatatttattttcctcagatgttaaaaaaaaaaattaaggatataactaaagccttactctctctcacgtctgaaattggtgtagaacactttcatgcacatttttctggaattacagcgtatacatgtagccataaacaatatattttacatgtttaaaaactttgataaaatattttaaactgttgctatccttttgcaaatgaaattagatatttctgagcgttatctctattgctaatgtgggtatgaggctgtagagtgtctcattttagcgtagccattcttctgtggatgggcgtttagggatctgctttgtgctacccatgctgtcatgaccctcctacacatctgggtgatctctagaggaggacttagaaatggagcccagtttctgaatatttcagctttactcagtaatgccacgccattctcccaagtatttgtaatgtgaacccaaaagtatctgagacaggtctcaatcaatttagaaagtttattttgccaaggttaaggatgcatctgtgacacagcctcaggaggtcctgacatgtgcccagggtgatgggggtacagcttggttttataccttttagggagacgtaaaacacatcattcaatacctgtaagatgtacactggtttgatctggaagggcaggacaacttgaatcaggggcttctaggtcataggtagatataaaaattttgattggcgactggttgaaagaattatcctcaataagaaggaatggctgggttatgctaaggggttgtggagaccaaggttttatcatgcagttgaagcctcctggtagcaggtttcagagagaatagattgtaaatgtttcttatcagacttaaggtctgtgttgatattaatgctggcctgcttttcctgaattccaaaagggagacggatataatgaggcatgtccaaccccccttcacatcatagcctgaactgggttttcaggttgactttggaatgcccttggccaagaggagaggtccattcagatggttgagaggggcttagaattttatttttggtttccagtacccatttatattcctgtgctagagtatcaatgttcttgtctcactgtatcttcaccaacagttggtagtaccagactttaaaattcttgtcaatctcatgggcaaggaatattttgctgttacgtttattggtatagctgattacttagtgagattgaacatcttttaatattggtaatttagatttccttttctgtgcattctgtattcatatgctttgcacagtattcttttgagttgttttattcttactaatttgtatcatattaactaatcctttgttatgctcatcgaagataccttctcaatctttttttttctcattttccttatggcaactttggaaattaactatggaatatgtttgaaaaattggaatgttttcatttttcattttcagaagtgattttagtaataatacatgcttacaatccatgctttccgatgaggcagagagggctaatgggactaatttcttagaatgcatcagaattttatctccttaattaacatctagaggaaaaagtttctcattttccatgtaaacttttggtcaacttgaaatgtcaggcagattcttagtccccaggcatccatcattgaattaaagagtattgtggagttttactctattatttgcagggactgctatagcacaccgataatgtaggcacattcccattgcatctgcaatgttaccaaataggagttctagggcccttagaaagaatgttctgttgatctgattatagtgctttctatacagtgaataatctcggtgcaataagcactttctccttcccctaaccagtagtcttgctaacaaaataacttaattgagaaatgcacactgttggggcaagtggattgagttgtggctgaggctccttgtgtatcttttgttgtgcaatcaagtagcacttattcaccgactttgctcatgctgtcccgtctaaacaaaacccacctaatcttccaaatcactttgcaaaacaaaagaacacacagaagatatagaaaccaggaggaccaggcggctgtggagtattttaggcagcactccctctttccctgctagtaaccatgtatatgaaattgctttagtaattatacatctgttttaaaattggaatcggaaaggatactctttccacaatcctataggaaccctccttggttgttcaaacatttggcaccactgcgtgtctgctgatggtttgccacagtcataggtgaggttctgggcagatactaacagctgagggaagagtgggcttgcaaacccaaacgtggaagtcagaccttgaggtatggttctcacagacttgactttcttaaggacagtggccatacgctttgctcagtcaattccagttggccttattgtactcgtttgccatttactgcagggagtgagcctcccttcagcatataggaaccagtgaaatgtcctctcattggctagctttgatatttccttctttctccacttactgaattcttacctggaatcagcatttggctccagtcaccgtctctgcaccattcctctactgtttaaaagttttaaggaaaacttcaataaagagtatatgaaaataatgactgttgtttaattacaaaccctgttttctctaggttatctaagtcagtgcaactctgtgagagagactggcagacacacacaccacacacgtttcaggtgaggaaatagaggcccagagaagtgaagtgcctgggcttgttagtagcaatgctagagtttaaatcaagtcctctgcttccagatttgttgtgcttcttgtgatttcacatttgttcactctgtcatgggaccaccaggagaatatagtaagttggtgcttttatggtagcctctccatacacccttgggaatgtgtccttaggtcattccttctgtctgctacccacccacctacctacccactcacacacccacccacctaactacccacgcacctacccacctaccccttccctccacccgcctacccctctacccacctacccattcacctaccccatctatccaccttcccacccacctacgcaaccatctaccccatccgtccatccatgcagctgtcagcccattattcatttagtctctgagtccctcagtgctgagtgatgaggccacatcatggatagaacacagataaccgctgccatcacccagctgatgatacagtggtgaaggactacagatcagtaaatgtggccaagcgcagtgactgttaggagaggagaaaggatcctgcttttcctcaccttcttgtccctctgcaactcagagggagaatcaaaattcacattttttagagaacatggatctttcagaatatgagagtttcatgagtgtttttttttttaatttaacacttaagtatagcactctgaaaaataaacactctagagttttagtgtcttagaggtcatttagtttgcctccttgtaaccaaaccgatgaaaatctccttttctgacctcctgagaaatagatgctagaatctctgggcagcagtccttgtggtactcgtactcagtgcctagcaaagaggtccataatgagatattctgtgcgtctctgactcagaacattcctgtttcatcttccacctggattccttctaatgcttttcaataacagatcagtgtagttgagttttgtttagctatttctgtatgtaagcatttttaaaaaaggaaaaagaagcaaaagaaaaccacaaaaacccaacatgctgtttaaataaagaaaaatgagttttacttccaagagagctttcgtcattttcttaatgcttattctccttctgagagcttgttatggaacagagtgtgacagtagtttaccgtggtgagcctgtcttgtccgggccaggggatgaattagagcactgaaaaaggccagaggagtgggcagaactgtacctaaattatccccggatattgctaagtgattctactttttaaagacctccagagagagcatccctaatctcctttagtttgcctttacagtgtttaatgacctttgctgtcaggaaattcttcctcatatttaacccagctgtcccttcccaccaatcactcccatttcttttgttgtccttggtggtgacagaatataggggtcgttgtcttcttgataatatacttaatgttcctgaagggtatgagggaggcctcccttagcccagacttctgcaagtgagagaaatataaattttttctcctttacacccccgttctcagtggttctatttggacatataatctctgacgtttgttcttaagtctctgttgcaaacattcacatcaggccttcctggagatacccattggttccattttcactcacagggcaagatcctttcatgatttccctggctgttgattcattcacattaactcctgtttgttgagccctcattaggtgggaggtaccaccctagtggctgatgggatgtgaagaggagtgactcccactgacttgcacctagaaggaggagcctgaatgtcacctgccagttacagtccttgcgatagtctgtggattagaactgctggttcctctcttccacaaagacttttttttcctgatttatattttggtacatttagagtttacattgaccccatcctcagaaagttaaggcactgtcatattattcatgccctcttctcttgattcattttataaacaccccgaggaagtttgcacgtagaaactttggcctgtgagcaattggcgaggctgtttcccattagattctgtgcagtcctcacgagggggtgtgatggatctttgcaggtctctagcacttatcagaaatgcctggcacgttttaaacaaactaatgactggtggttggttgtcaaatgagttgttgggaaattttttttttttagttctctgtctctccactccttttacctcaacataaaagcagcccagagcttctgcctggctgccaatgtaggcagccctcccacctcagctgccaagctcttagcagatgaaataaaagtctatttataactggcctctgatggatttcctccctacctgggctagtgctccatcagcaggtgtactgaacagatggagaagggttttaagtttttcagttcaattagatcaactctctaggttctggccagcgcattccctttctcacttagtttcttcctcttggcattaaaattgttgagcatagcaaaacacaaattaagtccaggagataaaatgcatatagtgcctgcctttaaaaaaagcactttggctcaggaaccatatttgacatcatatgctaaatctgttttaacccttttttacctagtgcttaattttaatgtgttttaaatcaatattagagtactaagatgctaaagagcacaaatgctttctttttttacttttcttttcttttcttttttttttttatttggagatggggtcttactctgtcacccaggctggagtgcagagatgcagtcttggctcactgcaacctccatctcccgggctcaaacgatccttccacctcagcctcccaattagctggggcaacaggcacgcacctaccacactcagctaattatttgtatttttggtagagacggttttaccatgttgcccaggctggtctcgaattcctgaactcaagtgatctacccatcttggcctcccaaagtgctggaattataggtgtacgccactgtgcccagtcttttttcttatgatgtatttttagcattggaatttaagtgttttgaaactatatcacactgtttttgaagaaactttatttctgatagtagtttagtttatatgatgaagcattttaatgaggagatgaagtcattcatttcatgatggttgtttgatgtctttttttcacagtttgttgaactgttcaggacagtgatcaagtgataccacgcagtggtccaaaaccagtctgaatatggccttaggctctgggttttaacaccgctagtctgtgaaagatcagttgccacagtttttggtttccacatatgtaaagattcgtcataattagcaagttcacccttagtaggctgtatcacctcttgttccccacatcccagatttcagtccgtccttggctctcggatgggaggccactctgattgcagccacagttcatgccccacacagacattcactgagcctctgcccagcgttctgacacagacttccacaaggcccacatctggattctttgtccacgctaacaccatcacatttaattaattaatatctttgtgaagctgggtttgaaacaagaaaggtttggactgtttcagtggatgttttgttcatataactggagcaggttttctttggtggttttattttgccccattctttattatttctggatattttcaagagtgtggattatccagatttgtggcttgttctccagcctccctcccattttgttacccactaagatgcatatcatggttgtcaggggccaaaggagactccactgagtcagcctcactgctggctggaagtggggtgcatgatttaagttaggagaaacagtgcaaacaagaccaccgcttcctatttgtgtcattgtctggcaagtgcctttgaagattttctttcattgttttctgtactttttcacagactctcatatttggaggatgagttaaatattacctagaaaatcacttctctgatccttcatctccttggcaggatctgtgtcaaatgtcttgattttcacagtagtgatcgcgctttctcccaggctggctgacctgtgctgtctttggtaagttattctgttgagttgtggtgctgcgatctttctatccattactttcatctgtggcttctcctttaaccttttggggtcatacagcacaaaatctaatttcgacacgtggcagcctttcacatatttcaaaaatgacccttctgtattccaccaatcagacaggacatggttcagttacatggtttttctcctaaccatctccagtctagcaatttctttattgtggagtgggatgcaaaaaggaaagtcacatttttatgtaggttctgtctgacaagtgtggaaccattactgacctagttggaggtcaaggaagtgtcagaacttcctgtgtgcttgatttgaccaagtgtagcatcttagtctcccagtaggacaaaagggtttccgtgttatccagggacggggtggatcaactttgatcatttggacctggctttggtcatttcttggtacccattacatggctgggtgatggcagtacatgaatgtatggagaatgatgtcaaacagggtgctggatgacaagttcgggtctccagagcacttatgtggtctgtgaacataaatcattccattcagtcaaacctccacccttgccccctccctcattgagatgctacaccactgcgtcttctctctcttggggccacttattcttgtcttgtttgtgaaagccaaaacaataggatgctaggttcttgaggcagataaaatagattcccaggttaactccatttatgatttgtcgatcttttcccttcttcactcctgcagtaagggaattatcatagggagggaccatcagacaggcctttttggggactttttcttatatagcgttaacacatttatttccaagtggtttaaaggcaaaatatatgaatgcctaggtattttgagatctttcagaaaatagaaggaatgggaatgttcttgttcatgttattgggctagtattgcatgagaagagcagtcaaaagcctaaaggaaatattagcagattgaatatcagtttttagagagaacttcttttggttcacctgggtagctggtagcatgctatgtgctgtgagatggtcacacacgctgtctcatgtaggtctcacacaactgccctgtgaggcttacattctgtcattaacggaggaggatggtgacactcaagtggggaccagctggtccttgcagcagctgaggtcatagccgcttcttcctgatgttgggtttttgtggctgctcttggtgagatttatttaccagaagtttgtcttctttatttttctttttaagactcagttttttttttgacttagttttaaattccatttgttaatcctaatagatagtctttgttctctaattttgtagtcacctctgacacccaagtcccagcttttatccacagtcctgcgctgtctccttattttaaaagagcaactcaccacaatcacgtagggtttattccagaaacaaaagaatagttcttaggaaagctagtagtgtaatacagtctattaattcattagaaaagagactgaccatcttgatagatatgcaaaagccatttggtttgattcaacacctactttttcttaaaaataaagaaataaaagctgttggtaaatgagatatagaaggctacctctctcacataatagagaatttctaggaaaagctgttaacattcttactaaagtcacggccagttaaaaatgcctgccacagtcacagttcttcaaccttgttttggaaattgtagctaatgccattaaacaatataaagaaataagaaatacaaatactggaaaaaggcaagagtcattatggtcagatgctgtgattacatggaatactcatgaaaggatatttcttgagcacctactatgtgctaagctccctgtcttgtaaaacttatattagggaagacattcaattaaatatgcaactctaatgtagtgatataaattccacgacagagaaaaacacagagacctatgggaacatgatagccatggctttctgagccctgcaggggtggggttggagaagtttttctctttctcaaacttgtcaagctcatggtgacctcaaggcccattgctgcagccattccttgtctgaagagctctcacccttgaacttttatggctgccttctttgactcagggggtctgggctcagttgtctccttttcaggagaggtcattcctgaccaccccgtctaacatggctccttacccctgctggtccataacagtgtcacccctgcagtgacttctgttggctccttgcatattctctgtctgcagctccatcacctcacaggtatcctccaagagcgtagggcttgtcagtcttgttcatggttttatcctcagggtagagaactgtgtcttccccctgtaggtgctcactaaataatttgttgagtgaatgtgctggaagacaggaggtggagacaggatatggtgcttataggctgccccttcaggaggaagcagagggtggagccctacctgggctggggaggcatggctttggtgaagacaggtcttcttttttttttttttttttttttggaggtgtgtgtttaaatgctgagcgaaaagttgatttgggagatctaaaagaagggggaagggaggatctatggcagactgggataaagggcacaggggttagcctgaaagaggaggggaaacagcttttacctgtaatgggagggtaggaggaggggattgtgcagaactgacgttcataggtttggtgatgggatgttggggaagttttcttctttgaatgatgctgttgttgacagtgagaagtggtgggcttggagatttgaataaagtaggtaataaaatgggtactggccattaagaaagagaatgagacagagcagactgagaaatgtgggaggctggttgggtacccagttaaaggtggaagactgttaatttatggtgacaccaatctgtgagttcaggagattgtgcattgaagccttaagcagcccaggtatttgcattttttttttttttaaaaaaaagattattaattgtttagtgagatctaattcacatactgtagagttctccattttataattatacaattcagtggttattagtatattcacaaaattgtgtggccatcaccactgtctaattacagaacatttttattatccccaaaagaaactccataccctttagcactcactcctcattctcctcttccccctgtccttggcaattactagttcactttttgtctatggatttgtctattctggacctttcacgtcaatagaatcatgtaataggtggtgctggtcattggcatctggcttcttttgcttagcatggtgttcatggttcatctatgttgcagcatgtatcagtattccattccttttatggctgaataataatccattttattgacataccatattttgacattttatttatccatcatcagttggtggacatttgggttctttttactattgggttgtttttagtatttggctatctcgaataatgttgctgtgaacattggcggacaagttcttgtgtgaatatatgttttcaattatctgggggccagacgtaagagtggaatttttgggccatttggcaacctatgtttaactttttgaagaatgtccaaactgtttttcacaatagctgcatcattttactttgctaccaataaagtatgagcattccagtttctctacatccttgccaacacttgttattattattattattttttaaatgacagccatgctaatgggtgtgaagtggtatctcattccaagtgtgtgcatattgaagatgcacttagattgatccacagttgggattttgctagaaggctctatggaaaaagagaggtcttacgtagctgaggatggtggcaagtggataattgaagtgacgggtcagggattgaattaaagaaatttgcaggaccaaggaaagcaaaccacaaaaatttactaaagggaagaaaggaagccttaaattaatgaaagactcaatattgtaaagatgtcaattctcttaaaatctcatatgtaaatgtaatataattctagcagaaatcccagtgaaaaatttgtgaaggatttgctaaaatgatgattaagttcaactggaatgtttaaatgcatgaaaacactcaagatatatttgggggaaaaacaataacaatgatagggacttatttaccagatattaaaacatactataaaattagttattaaacagtgtagttttaggaatggaataaaccagtggattgctggaacaaaagagaagtcccaggttaacatgaacatgtattatagagatgacattgcctcgtcagaagtgaaaggataatttcataaatggctttgggcaactggcttactatgtcaaaaatgtaaagttatatccctgtctcacatcagctgacagcacaataaatttgaagttaaatatttgtgaagaaaaatatattcatagaacactagaagagtaactgcggtcatggtgttagattttgtggaatggaagagagaccagcctcacagcgaagaggccattgaagacttggacagagctggctgtgatgcagccacagccaggaacagtaagaatggcaggggccactagaagctggaggaggcaaggaaagatcctttcctagcaccttcagagggagcagggcccctccagcacctcgatgtttggacttctggcctccagaactacgagaaaatcaatttctgtgtctaagacccagatttgtggtaatttgttgccacacggccctagggaacaatgcagtgactctcagacaggatttgatggagagagtggtcagaaccagtggcgctttctaaaagattgatgccatgagctgtgtttgtctagtctgggcagacaagagatttccattcatgattaaggagggcccacggatctgcgtgatgaatttgaggaggatacactggtcccgcagggcaaggacgtcatcttagtcactgctgtatccccagcattaagaagagttagaagaggacacagtccacactcaatgactgtttaatgaattaattaataaatagaaaacacacaaaaatgtaaacactatccatttttaaaacaagatactaatttttgaataaaaccaggttgtggtggggaccatagggccagaatagttgccgtccccttcacctcccacttgattcacgcatggtggctcgaggggacagagatgtgagatcgtggctggaaccactgctctgagttggagctgctgaaatggtagcttggcggtctgccctcatggtgcatggcttgaagctacatgtcaaaggaaagcaccatccttgcaaccaatgacactaaaactcaagttagattatggcaagcttgtccaacccgtgggccacatgtggcccaggatgccgttgagtgcatcctaacccatattcataaacttttttaaaacattgattttttttaaattttaagctcattagctatcgttagtgtattttatatgtggcccaaggcagttcttcttccaatatggcgcagagaagcccaaagattggacaccccctggactatagtattaatgcatcacatagttcattcttttcacatagtgagtaaaaagtaattcgtttgataagcaattcttgagcacctcctgtatgctgaacgccatgctacgctctgcggtacagagaacaaagaggtggtccttgcccttgaggcttctacagattgttgtaggctggtagccatctagataagtagacaaatcacttggatatcgtgtgataacatacatgccatcgatagacacctaggatgctgcaggagcacggagcagggtctgccaacacactggtcattgtagattttacatatgatggagttttgagattacaggctcatgcctgtaatctcagcactttgggaggctgaggcaggcggatcacctgaggttgggagtgtgagaccagcctgaccaacatgaagaagccccgtctctactaaaaatacaaaagtagtcgggcgtggtggcagatgcctgtaatcccagctacttgggaggcgaggcaggagaatcgcttgaacctgggaagtggaggttgcggtgagccaagattgcgccattgcactctagcctgggcaacaagagcgaaactccaagatggagttttatttgggccatattgaggcagaggctcaaatgtaggtgaaatggttggttaactgtatggaataatgtgaagggagctgaaaatccatctgcccagagcaactatgcaggagcatgcctgaaatggcagctcatatttcttggcctcatgctttctaggagtcctctcctaaaacagagacgcctctgtcagattcctagagttcttctaagtaggcatgcctactttgttgagttcctaggtttgatttttgagggaagagaagtcacaaaggatggaacatgggatgggggaggagagaggttggagcagagcactgggcatttagggaaaagaatcgtgaagggaaaattcctagaaggggcaacaaacacagcctcaaaaatccacagctcttccctagactgggtctgccaggtgccctgatccagctctctggtcagccgcattctgcatagaaaggggagcagggctggtcttgtccccatggaagtgtgaacttggggctcgtcttttgggagcagagaaaaatagttccttgatatacatgtaagtttctatgtggggtattagaatgaatcctagctgttgggagcatgtcttttacaaatcaaattaagtatcttttatatatagatatagatagtctgtaatttgatggtactgatgagagtgaaaacaatatgtggacttgcccatttactgaaagatcaagcaaatacatttcagggtctttttgatagctgtgagtattacttgctagtattaaaatattttaattttcaagaacttggactctgtttcctttgatgaaccagttaggaaatattgtcagagaaaccctaaatttactctcattttcagtcatgaatgaatccctgattactgtgatgaagaaaaatcctgggtcccaacttccttgcccaaatcaacacaaatgtaacctttcatcttgatcaggagatgctgaaggtagaacataaacaaaaacataagaaaccgttcatcactctgagagaggtttaattttcatcagtcaggaaagatacagacaccaaatcaaaggtgttgataggatttcactgtaaggttttggcgattttcttttccctgggtgttcattctccccttgggctgatggtggttggcagagctggagcattcaccgtggcttttctgattcctctttctcatgttggagtaatgtttttagttcattgcccatatagccttggcagctataatcagtcactggagtatatccttgattgtaggagagacttgataataatgactctttcattcatttattccacaaacataggctgagtgttagctgcgtgcagtgaaccatgggaagtgctatggggaagcacagctatgtaaatcatggctccaactatgtgcaaaggccccatgacataaataagcacagaagatgtgtctgtacctctgtatctgctttataacctccctgaggaaatgctacaggcctgatccatctctcccctctttaaagactgtcaggggctctctatttcccccaccatagagtccaaactcgagcctagtacccaacattcttcagaacctgaccccaagccatctgggtgtcctcatctcccaccgctccgcccacaccctgggctccagcatttgactcttccccagtgtgccgtgtgctccttaccgctgcccctggccttggcactttctgttctctcctctgaggacgcctggcctcatcttcaacagctggtggacttctacacgtccctcaaaaccagctcctctgttacctccaatgtggcactcttttctaagctaccccaattcccacccaaggcagaatttgtctctaggcttgtgctagaacatgtaggatacaggggttctttgggaagaggacattgggaaggcatatgggaatgtggaatatgggaaggcaacaattcttggctttcctggtccagcccgggctggtctggtcccctccagatgatctcagcgttcatgaaggcaggttctggagacttaggaggagggacccctccccgccttccctgggacgtggaatcccctgtgagcaggatggatctagggtatgtcttttagccttctgtatatctgcatagacttttcttctgccttctcatagttcatagcttgtgtctacacaagaactctctaaacatgtgatagcgaattaaagccattaactccattatctgggatattgtttcaggtatattttaatattgctgtataatttgtccataaaatgcttatcttcataatgaaatatgaatgggtctttgtccgacagaagacttttgttgaataagatgatggcagaacgctgtaggatcctgctatttgaatcttcttggagtcacattccttagcatctagaggaggtaacagaggacatgtggacgtgctttctgctggcgattaagtcccaggcttgggagtggcttgtagcaggctgatgattgaagtctggagtgattctagcacagaaaagcaaccagggcgcaaggtatttctgtgtgtatttggttcgctgatcagcacttgggttaccaagatgattaaagcacagccttgccctttgggagagaaaaccattcaaagaaatgctgtgacaaaagacacaagcattgagtgatcaagtacagcatgtgcatgattattggagagcaccaggttgtcagtgaagacagtcgtaagggaggagagatgaggtggtgggggagacgtcttataatcgagtagagtactgagaacaatgctggggttatctctctggtgtacaaagggactaccttggtcagggtcctggcagaaatgtacctaagagggataattggagaaagctgaaggaagacactatttacaaaggtgtggtcaggattaagagaaaccaacaagagctggcagagagctttgaagctttaccatgcctagacccaaaaaggggcaagaagagagcaatgacaagtattgaaccgtgatataggagagggtcgccctgtaggaattgtgccctttagtagaggaactcagccactgccaaactgtggaaagagggctgggggaagaaataccgagtctcccatcagtgtatcccattggccaagtccaacagaaaccagagttcaagggagcccattgatacaggtcgtgcaacaggatagagagtggtcccagcagagcacacagagactgtcctgcagaaagactgattaggcaccggcaagagtcgtactcagccatgttgagagccctgctgagcttggaaacaatcactttgtgattgtaccaaataggaaggatatgggattctcattgggtgagcaagagtgctttttctgttatttggaagaggtatcactctaagacctgtaatttgcccatccgtgtctggtttctgacactggcaccctagaacatgtacaaaagggtagtgacaccacgatttaaggaccagctctctgtgtatggctcagtcacttccaaaatactaagctaaaatgttttggattcttatgttttatccagcgttacctcacgtcaattcagttcagttcaattacattcggatatttgctgaacatcaagaatttcttggaactatgctggatgtgctcaggatacccagatgagaaggcatggagttagaatacagtaggggagatgatcatgtaaacaaatcgtataattaaagcgaagcctggtgaatctaatggaagctcttaactgacctgcccttgcagactcactgtgttaattgggaagccttgttctctctccaaacgctgtggctgctgggctggctagcctacatggtttcggcttatttggctgtgtctctgtgcacctgtacacgtccatgatttgcatgtttaccaagagtctcctgtgtgtgttcccaaatcattttatgtcagttgttagtaattaaatttatacaatttaattacgttttaagtgaaccagtgaaatatagatgcaaaataaaaagctttcgtttgcgttaaaattaagtcaaacatttcagaaaaagttaataaagggtagtcacttaaaaaatgccatttgaaatgggtacagataagacagctcctcatcccttaaagctggcagtaaggatgatcttgacaacaataagtttgtcgatggtaggcaaaaaattaagactgtaccttgatggtttctcaatttttctgtgagggaggaatgagcagtgaaatgatgggggtgggagcctgaggaccgtgaagacagcttgaaatagataacttggcaggggaacgggaggttgctggctagggcctggagaaggacttgtgggcagcactgaccgtgcatccacctgaggctggagattgtgatttttgtcatggcccccacctacctaaacaactgtgcgactttcttttgcagtgcttggcaggctgacgtagaagtgcaaaaatagttgcttagagcgatccaggatggggattttgtgggggcaggtgtggcaggggtttaaggggaaacgagagttgagtttgggcaagaatgatttaaaagtgacttaagccttttggccagaattgccatttttcattaatttgcctatgtgatgaacatgaagggaaagaagagaggcacctgctatgttttctttctttcttactccctctccctctctcttttttttttgagactggatcttggtctgtttgcctaggctggcatgcagcggtatgatcatagcttactacggcttcagactcctaagctcaagcgatcctcccacctcagcctcccaagtagctggaactacaggtgcacaccaccatacgcaactaatttttaattttttttttttttttggtagaaacagggttttgttatgttgcccaggctggtctgaaactcttggcctcaagtgatcctccttccttgggctcccaaagtactggggttacaggcatgagccactgtgtaaatgttttgtaggacttttagaaaacatggggttgtgcctttggccacacgcatgcttgtggatctacaagaacagcggtcctgtaactcttcagggaaggggcaccacatatctgtcctgtcaccatggcaaagctggaagggtctgcagagctacccagcatgctgctggtgttgttgtaaccaagcagagggcaagattctcgccatgagaattgatgtacatgtctagcatgtgaagcatcctaagggctgaggtgggttcctgaaacctgtggaggaaaatgctcagtgcaagaagccaaagaaaaaggcaccaggctcagcgggagcacccgcctggagaagcatactttgtgaggatcagcagaaaggagctgagtgtggaagctgtccccaagtcatggcacaaaagtattcaaaagaaaggatttctggattgttttttaaaaaacaaaactgtgatgtaaatgatgaattgtgctctgtggtctgattaggaatgtaagtggatccagagtacagtggggctgaggcagtggaagtatttttttgtgtttttttttttaacttttaggtcagggatacgtgtgcatgtttgtttaatgggtaaacttgtgtcacgggggttcgttgtacagattattttgtcacccggataccaagcctagcaccccaatagttattttttctgctcttgtccttcctcctgccctctacactcaaggaggccccagtgtcttttgttcccatctttgtgtccatgtgttcacatcatttagctcccacttctaagtaaaaacatgaggtatttggtttcctgttcctgtgttagtttgctaaggataatatccgccagctccatccatgttgctgcgaaagacatgatgtcgttcttttttatggtggcatagtactccatggtgtatatgtaccacattttctttttacattctgtcattgggcattaggttgattctacatctttgctattgtgaatagtgctgcagcgaacatatatgtgcatgtgtctatataggagaatgatttatattccttggagtatatacccaataatgggactgctctgtcaaatagcagttctgtttttagctcttcgaggaattgccacactgctttccgcaatggtcgaactaattcccaccaacagtgtgtaagtgttttcttctcttcacaatctcaccagcatctgttatgttttgactttttagtaatagccattctgactggtgtgagatggtatctcattgtggttttgatttgcatttctctaatgatcagagatgttgaacttcttttttatatgattgttggctgcatgtatgttgtctattgaaaagtgtctgttcatgccctttgtccactctaatggggttttgttttttcttataaatttgtttgagtttcttattagatactagacctttgtcaaatgcatagtttgcaaaaattttctcccattctgtaggttgtctgtttactctgttgatagtttcttttgctgtgcagaagctctttagtttaattagatcccatttgtcaatttttttcttttgttgcaattgcttttggcatcttcattatgaaatctttgcccattcctatgttcagggcagtataggttgtcttccagagtttttatagttttgaggtttacttttgagttgactttttctatgtggtgtaaggaatcagtccagtttcaatcttctgcatgtggttagccagttatcccggcaccatttatggaatagggagtcctttcctcattgcttgtttttgtcagttttgttgaagatcagattgttgtaggtgtgcaaccttatttctgggctctctattccaatccattggtctatgcttttttttttctttcttcttcttttgagacagggtctcactctgtcacccaggctagagtgcagtggtgcaatcgcagctcactgcagcctcaagtggaagtctcgatgagatcagggaggagtaggtgtgaagacagtagaagttctgggaggctgaggttggggaatggccctttgaccttgggattgcagaggtcgaggggcttctggtgtgggtggggctgcagccttgggtggtgtaagtgaagtgataaagaccactggatcagaagacatctagaaacatagaggcaaaggggtttcaagaccttctttggggacattgagaccaccccaaactgccaagatttgtgatagataagtggacagggagatcattggcaaagccattgataaatatggtgacagctccaagaagattggcaggcgagagagaggctgaggagtgagtgtggtataatggcatgggcctcaaagggcttttccctaaggagaggggaatggtggttttcccctgtatgatttctttggggcaaaccagacccgtttttctgtaagcacaaaatttgtgcttttgattagcagaatatctgctcccatttcaggaggcatctgtctgctatccgtgtgactcttatggaaaattctaaaagtgactggtgccataattggagctaggactcacttcttgctcctatgattctactttgatattaaataagtttcctttatgagacaccagtcagtaaatagaacaggatgtatggttaaatagctaaaattattttcatcattgcaattatagtatgccttgccatttcaaaccaaatatccacttatctttcctgaaattttgcaagaaatctattattcgaggatgcagagatgatttttttttggttgagttaaacatttttatggattagatatgaattcagtaaaaataattgaattaaattgggtaatatgaataattcatgacatgtaatttcacatcagttctaccttaaaaataaagctattggtttatgtactgggaagatgtattttattatttagaaaggtagagaacattattttggaatataactcactgtatgattaactagatacattaaatagtaagattgaaagaaagtacagaattcaaactaaggtgctttgatgcaattcacctgttccatcttcttgatgaaacactagttgctctgtgtctgtcattagcgattccgcaaggcatgtggtgataagacttccagattttgaggatatgtccagtaattgtgcttgaacattgtaatgggtgtgacggctgccaggtgcctcatttggggagtaggggacaactttctggctaggtcattctttccaaagacatgtactctctgcttcctctgtgtgtagcccagcatactgggacatccatatgactaaggcttggggagtttcttgcagagtggtgtggtggcacagatcaaaatcttggtagaaaagtgagcccaggtagtcacaggcttgacccaagcctggaaggaggagcaggagttagctatggagaagaagaggggagagaagggggacactcaggagtgagaatcacctgtgcagtggtaccagggccagagggagtcagtttggacctgctggctgcaactggacggaagaagcacatggactgtggtgggagatgaggctgagaacattgggggccaggctcctgaaccgggctaaggagcttgaacctgatcctgcaggtatagcgggaaccactgagcagcgctgatgacagagatgttctgtgttggtaccacagtcagccgaaagtctctcgtgaaagttttccctcttaaatgtttgtggtggtagttcaaaatggaattggtccacaaaggtattgcacaatagaagatgcagtatcttaaccattgctatcatttgttgatgaccagaagttcaatcacagaaattgataccaatacctgttattactcacaacaatgcgtcatcctttattaggctcctagtgccttttggccattttacactaagacaaaaccactaactgctttaaaaggcgttggtcacaacttttatgatttgagattaatcaaaggcaccgaatgtcagagtctcctacagaactcagccaacttttagggcaaggctctgtacttctccatctttagaaggaaagcagggaaaaccgtggaaatcatgctactttcattctcttcttggaggactatcccctgggtaaaaattcaaggttcttctaattaatacattgtaactaacacattaatgaatactgcctggtgagatgagttgtatcttaggtcacagttgttgaagccagacaacgtgaaagaagatgatgggcaaaatggatggttttagttacttcttttttaaataccgtattgtttttgttaaatgatacaagctttctatgaatgaagtaaaatagtacctgaaatgcaaaggaagtaaaaatcactccaaaatttcatcctctagaacagcagttcccaagctctgtggcaccagggactggtttcatggaagacagtttttccacagactgggggcaggggcgatggtttcaggatgcggctgttccacttaacatcatcaggcattagttagattttctttctttctttcttttttcttttgagatggggtcttctgtcgcccaggctagagtgcagtggcatgatgtctgctcaccacaacctctgcctcctgggttcaagcaattctcgtgcctcagcctcacaagtagatgggattataggcgtctgccaccatgcctggctaatttttgtattttttagtagaggtgggattttgccatgttggccaggctggtctcaaactcctgagctcaagtgatccactcgccttggtctcccaaagtgctgggattacaggcatgagccaccatgtccagcctagattttcataaggagtgcacacgtgcttagatatcttgcacatgcagttcacaatagggttcgcactcctatgagaatgcaatgctgctactgctctgttaggaggcggagctcaggcagtagtgctcgctcacctgccactcacctcctgctgtgcggcctggttcccaacaggccacagcctggtccactagctaggggttggggacccctgctctagagttaactacagatgacattctggcgaacatactaccagacatttctctagaattcataactttgtattcttagtccttcttgcaaactctggtgtgcttggtcctctctgtaggatatctgttgagattgcctagaatttttttttctttactcttcaagtttcttaatttttgccaagtgttccattattggaacgctaagcatgtgggagttatttgtatcctactcagggtcatcgccaaggtctgtttgcaaaaattcaaaaaattgcaacctcaggcataaatgggtacggactatgttcaattttgtttcttctttttacagtgtgtggcttgttttgtaaacaaatgaatacatgaattaaatctatatggagtacaaagggatgaaggagaaacagcttctgagctgtttgtaaccatccttgtttgcataacctacttattattgaattcagttcagagatcatgctggtggtcatcttactggttagctttgcctcactggactagagtcactcagatgaaatgagtggaggatgatacattaatgttttccagagatccttcctgtagcttactatttaacatccaatccatcaatggatatttgatattgggattaaggtactagttatatttatggataaaagagaattgggttaccttagctaacttgatcaaaattcaaatggttgtggttaagtagaagaaataggtaattttaaaatgccagagtttgaatgagtgcaagtaaaggcatgtagatatgaaaacctcatccttttatcttgatggtgttttgaaacttcaagtattttttttttcagacctccaggaagaatggattttttattgccttcacgtggggtggtttctttgtgtacgtgaatgtgccaccagggcagtgtttctcctggggcagtgtttcacactggggcaagttgtggacccacctgtgaccgtggtgcatttccagagaggagaactgcggatcttgtgcattctctgtgtctccttctatttttcaagagacctttaaaaagtttctgtctaggccaggtgcgatggctcacacctgtaatcccagcactttgggaggccgaggcaggtggatcacccgagatcaggagttcgagaccagcctggccaacatgatgaaaccccatctctactaaaaattcaaaacattagccaggcgtggtggtggaggcctgtaatcctagctgctcaggaggctgaagcaggagaatcacttgaacctgggaggcggaggttgccctgagccgagattgcaccattgcactccagcctgggcgacaaaagcaaaactcttgtctcaaaaaaaaaaaaaattctgtctaaattccagtgatgatcagatgtgaacataaacacgttcaggatcatatacattgctggatttgccatatctgactttgtctgtttctaggatattcgaaattctgtgactcctattaatgtatcattctcctggggcatcacagctgaggctggtgtaggctcactagtagcccagcctggaaaacaagctactcagcacactcctcttagcttggctttgttgtgtgtgcacttcatgagggtgatgctgcccatgtgatattccagatgtaggtgagtctccagaacggacagcagctacagtagtgtatcttttagagagcacggaagagttgcttaaaacttcttttctattcaactcttcatcagaggtactcttcatgacctcatctattcattcatgcaacagatatttactaaatgtttacgttgcaatggacatagtagaatgaatcatcaaaagcttgttattatatattaggttgattttttccaggagaggagtttaggaagacattcagtctccttggtaaacttgtacatgcctttactgtcagccttacttaaccctttacgctatataatatgctttctctcttaattttctcacgagtttgcaagccccttgaggggtaaagatggtatctcaactcttcgcagttctattttatgcaaatagaggcagtggtggctaattgatgattccatcatccagaatatcttatgcctctagcttctgagtgacggagactctgttttttaacagatgatctgaaatgagtttgctgtaggttctttgctgtcttggtcacccctggacatgattggtattctgcatgactatcattggtagtggtagcatggtatcgtaaaggcaaggatgtaaagagaaacaaactcgggcttcagggtgaaaacctttggctctcctacttggaaaatggacttgacctgaaaaatgagaattaaagtctacatctttcagggttattcagaaagttaaatgaaataaaataaatataaagtgatgaggtgaaataatttcttggaataatgagtttccttgattcacccttgagcagacacctgttctcttgccctgcagcctctgatgcagggaaactgagagcaccaagcaggaccttgaggaagagaaggggaagaccagctcaggaggaggcctgattctcatgcaggcttagagcacagcatgcatgggttggactgtgcagatcagaaggggtgggaatgctgttcttacaggcttaggttttctctctttattcctccatccttgagcccctggaggttcaaaaaagcaaagataccagttattaggaaaaataaagacattctgtgtttgtaagtggctgagttgaatctgtccaaaccagcttatacttgtgcaaactctgtgtctggcttgcacagggttgacattcagcaaatagttccattccccatatttctcctctctctctccgtaatgataaatatgaatacatacatatctatatataaaacctgtgacataaaatatatagaagcaacttggatattaaagtgtgagtttgtatgtgcacctatccccatccatccatatgctagcagtacctacatcccttggaagtaactggataattggagacatgggtgggatgttgaaggggcatttctggtcatcttaatgactgggagtgctattggatgtatcaaggacgctaaacattcatcagactgtcaggcagtcccttatcctcaccaatagagaatttttctgccccaaatgccagtagtacttccattgagaaacactgtatactgacagtgtggaacatttctcagcaactttgtgaattagagactgctcattattctatcatacaggataacaacttttcaggggaagttatctttaacttccctgtgccccgactaatggtattactcggtgagaatgttgactgcatgttgatccccactgggggattctagacatgttaagctctaacatgtatgtgaatattatttcagatctgagggcattgtgatcattgttctctttctgttggtgtggatgaaataagagttgttgctgcttggatattttcccctccgacattctttcactgggaagctattagacaaaaattgtgtaggctttgtggacaagacatttcgacggaaaaaataatcttggcgtcactatgcacacacacagagaccgcacatacaaagcgattttggagggcccttttgaaattacatagggaaaccaacagtgccagtaatagcacggggctctatttctcacagtgcttttgaaggcatagaaagcaaatgacaattctggcggtcgctaagatgtattttgcagtggctggaaagaaactagcattcttagaggagtccagcaaattgtctttgagcctttgagggcacacagaaagctaatgacacctccgaggaatagccttctcaggttttagatgccacagatgctaaagccaggatataaaacctttcttatagggcctttaagaatcctcagtgtgcttttattagcaagctgagtgtgtatatagagatgttaatggtctgtggagcaagctcagcttgtttttgcaaactacagaactataaaagttatcagaaaggacacattcttgcctattgctttgttcctttgtttcttatttatttccttctctgtggaatgttagggcactgatcatgtgctgggtcctgtggatacaaaggggaatcctctgtggattcttctctctggaagcttgccctccaatgtaggagaaatgtacacgttcatatccacagtgcaaagtatagaaggcaatgacaatgcaaataaagcctaaattaaatggaaatttcgccacagaagaaattacttctagctgataggatcaaagaaagctacatagacaaaagagtggaaatggtatttaactattttcaaggatatgtaggatttgggcaggtagcaattagctttcaggaagaaaagaagacttattgtaggggagggcagtccatgccggggagtggcattcacaaaggttatgagtgtgaagtgagaatagctaaggttagcaggttcgtaggtgtacactcctgaccgttgagagaatgatcctggatttactgctcgttaatgaatggttaggaatcctagtattcacacattgatgggctacagaaatccctatggagcttgttagaaatttctatccctgggaagctctccataccctgtggttagaagatctcagagatcttgccgtctctcattccctatggccagtgtccaccctgcagccagccactggggactctgtcgctgcctcttcctgagctgggaggcgatgctgggatgccagaaacacacaggagggaaatggagaacacttttctcagaagtataatccccaaatctcctcttaagccattacaataacatctcatattttatttaattttcttttaatggaaaaaccagttataccaaatgaaaacaaatgactgaagaagaactgaatgatgtttataagccttttatatgattttttaaattgagtttttggtctcctaattgattaataaagggaaagacagagaagactgacatgtgttatcttctgtcacagttcagatagagtgaaatgactcccaccttgccaatacaattctcaaggttgattgctaattttaatttatctgaaccgtgcttttcaatgaggtgatattggtcctgatcgttctgtaaattggagattttgcccgaggaagttaattctcccctttcacaaaaaaagtttggactttcagatgacttatttgacattagcaatgttagattcttgctccactgcagctctgcctggccactctctgttctttttgtcactgaattctctgaagcgtgtttgactctgcttaggggacccccatcactaagcctggggtctggttaccatggatcttaggcagtttggctgctatagcagcataccgtaggctgggtggcttcaacaacaaatttatttcctcacagttctagaggctggggaagtccaagatcaaggcactggcagacttgggaagtccaagatcaaggcactggcagatttggtgtctgatgagggctctgcttcctggtttacaggtggtcaccttcttgctgaacagagagagagaaagcaggctgtcctataagggcactaatcccattcatgatggatccacctggtatatttaaaagcccaatgacagtcctgtgagacatgtaatagtaataagatactaattgctgtttatcaaatgagccttgtgtgccagggactgtgataggatcagaaaggttaaacagtttacccggagtcataaaatagatgtttaaaatagttgcagagtaggtacacaaaggtatgtcttttgacttgtctagatggaccccataatgcagaagaacgagtcttggccatttgcatactgacacttgggctagcaggccagaaggttctacaataggcctggcctcaaatatatttcacttgtaataagcaccatatggggtcctgccttggagctgagtcatacaagagtgcctagagtgccttttaaaggcctacagccatccaactcttagggaagggagtccgcattggacttgggtgctctgggaagtggtctggttcctggatcaattgttgatgaggtatatatttcaatcatgttttcccacggactgtggggaaggcggtgagggtggctggagacagggttggttggggagaaggggctgctgttggttgaacattagttacacagagctgcgtgctataaattctggctcactgaatcctcacgaccactctgagacttatattattaatatgtattagaaagaggacagtccgtggggtgctctgcctcctggactcctccgtcaggaaggttgttggttcagggccagccactgcttggctaacgcctcagtgcttcagcgacaaggaccaggccgtgggcacaaataaggtcttaggtctctcctctgtgcacatccaggagagagattttagggatagttcctactggcttcatcactctagggtttaaatctgggctttgctgcctaccagctgtgtggcccttccagtgtgaacctgtccagacctgagttttagtatacccacagtggggaaaaaagacctacatcacagggttattgttaggcttaaaggacgagacagatgcaaagtactaagcatgtggcctggcacaggggaagtgctcaggaaatggtagtgactgttaagactgtgatacttggaggctgaaccttaacaggatattatcctgacctgtcagtttagctctttggatcctatggtttttttttgttgttgttcttttgtttgttttttgagatggagtctcgctctgtcgcccaggctggagtgcagtgtcacaatctcggctcactgtgacctctgtctcctgggttcaagtgattctcgtttctcagcctcctgagtagctgggattacaggcacctgccaccatgcctggctaatttttgtatttttagtagagaaggggtttcaccaccttggccagcctggtctcccaactcctgacctcaggcgatctgcccacctcagccttccaaagtgctgggattacaggtgtgagccactgtgcccggcctggatcctatcttaaaggaatttctgtggtgataaattatgaaatgcctttctcgtgccatccgacctcctgtgttcactctctgcacctttctattgtttcactggaagtgtcatgatattccatgagcacgttggttgctattaccacgtaagacaatgggaaaaaagaagcctccagcttctgggtgtttaccgtttggaaacacagcacaacacttgacattctcagtgctgagctcatgtagaggcagcagacagactgcagatacgtgcctgtcctgccccattagctgcttcgcaatgggggtttcagtttatccctgtgccggtgttgctcccaaacacggtgaccgtggggcacatccatgcctgtctcacataccaaggcactgtcagcatgtgctcctgctgcaggacccttcggccaagggattcatcctgcggcacaggctcgagtctaagtttacccgtgacctgtggtcattctgtggacggcagaccaggcatgactgcacgcctcgtatcagaactcggaagcctggtggtgacaggaaacagtccgactgctttagagaggtattagtgaaatgtctaggagggcagtcttctcctatggcagaacagagcaactagaccaaacgcttggttgaagtatatctttaagtctttgattaaacatgccgttgcattttctgtttaaatgttgttttacaagctgtgttctgactgcaaggtagggtttctaagaaatcagtcccaaagagctcttgccccggagtgtttgttgtgtagcctaggtgggctgtaaaagctagagctgttgctaagggaaccaacggaggaatgtgaatttgtaaatctctcaatcacattaacattttgtgtaatatctgacctcagctttactttaaggtgaagaggaagctggtgtaggaatgatactggtcaaagatcaatgagagaggcactgtcattttagaacttgacactttgtcatcagcatttctatttcactcttgtaatacacaattctttatttctttgtaaaaagtcctatataagcaatacctgccgtggttccccacttttcaggccatgccctctgtgacattgggggttgcctattttatagagaggcagagtggtgaggagaaagtcattcggtgtttttgccgttgaaacctaaatctctaaggtgacaaaagaaatcccagtttacttggcatgagagagttttgccagttccattctacctaaaatgctcttttgctctgttttatataagagaggaagaagtcattttattgtgctgaaaaacagtggaagtaaagttaccaacgagtaatattaatgacttcaattcataatattgggataatgactaatgtgccaggtattatattaggtatttaatatacatgatgacacttaaatttatactatggtcaggcaaaggtatggttcatgatcccaagcatataacatgcacaccagctgaatataagatgaaagcaacattctgtgcattcgcgtgcccctatgctaaatatacttaggttgacccatatgaaattgccatttttatgggcaaagagagccaaatatcggtaattccaagtggttcagcccagcacatgtttgcatatacgcaaactggcagacgcagttctggaattttgttgagacatccccaaagtgtttcacaggcctacagacacgtgggtcttttcacagaggcataacgaaccatgcagaaaggtagaatcctcagatgctttatctaataatcacagaactgaagatccagaaggatccttgggggctgcgtgttgcactgtggttgtttaatagaagtaggccccatgaggtgaggggacctgcatgtcgggtgagttagggctgactgtgaggctgggacttaggcctgtgtggcatctggaacactgtattctatccattttaaattttaggccatgaaagtgagtaacacatgggctgtaacttagaagtcaactaagtgataagggcttgcagtcacgctgggcacagggaccccgggcagagaggagctctgcggtgcagagaggcacattggtgaagggagccaggcattcagccacatggtagaggagggcgtccttatctatctcaactagcttctgctatcggacttctggggagaaagggtttggtgttcaaggcctaacattgcctttcctctcagaaggtctcgttcatgttacacagctttgttcaccctgagcctagcaagctctgagctccttggagccaccattcctctctcgtacgcaagaaacaagtcccagctcgggagcccacaagattaaaaagtgcagataaccagtagccgtatggaatcatatgtcttgacaggagctatggacttgtcctcatttttaaatttatagcactttgaaaaatcacaagtgtgggcctgtacattgtagcatatctcttttgacacagtgggaacgagagcctttacgtcaagggatactggttagatgcaggccttccagaagcttctgcagtagcatcatcacagctgccctgaggcaaggcaggagcccactcggggtcaggggttcaatgtcgggtcccctccttgcaggacacacttcattgctgttgggggtttcacctgtgactgtgtgtcttgccctctccttccccattcttggtgtgtctttgtaaaattagaacttgtgtcttcttctctccacatccctgtactcagtgtccaccctgctgtctgtccagcatggacggcaaatagtctgtcaaacacctctctagtcattgtcgtcatgggcccaaaaagactgttagcctctttaccatatagatagatcaaatatatatttttgtcgaattctgcagtaacctgtgatgtgcgttggcctgagacaaaaattcgcttccatcctcagatccttgttgtgttctgaagagggcacacatttaacagaacaaagctcgtctgctttgctgggacgatgggtggctcgcccagcaaatcatcattggagccttctttattttgacgtgagttttcaaaaatagcatttctgcttttatttctcgacttaaaagcatattttaaaaaattggttttctgcatttgtgtaatcaagtacaggaatggttttatggttttgtttgacttaggaacgtcttggtgcctgccatttttcacggccatcatctgaaaggttctttccactttcacaagttgttaactgctttctttgagagcaagcaaagtaggctgcctcaaatatacacctggaatcggtatttatttccttattctgtgccctgtttcattccaagattgtggtatactgggaaataagagaattcaatgaaaagggcttctataacaaacgaactaacccattagaaagaactgaccataagcttagtaggaatcagtcatgtgatgttgcagctaaaatagcgaatgctgtggttttcaaacttgtctaaagtgggagaccccacttcctaacagtgttctgatttgggaccttgtgcacaaagtgggcagtgggagtggtgactggggaggtataaggagcttagagcctggatgggtgcctgccctgccccttccaggtaaccccctgaaacttgaaaaccattatgttaatacgttaattatatagctatagggatcccttaagtaaatacaaagttttattactgtagaggcatgtttttatacattgttttatttgaccctgaagaagagaccgcaaaggcattatctctagtgtctgtatttttcatagaaggaaactgaagatcagggagattagtaccatgatcaagagcacacaggtaatgcataaggcagcagggattggaatgtgacttagtttagtgctcatttcactgggtcacaggcgtatatagatgaaataagagccttggcttcttggagctggtcagactctttctggattgttttgttcagtgatgggtggtaaattggagaatgttgagagaggcgtgactgggatgtatccctgtgcagtacagatagaggtgaaagattttaaaatggatatctctttgagaggtaattcattggtgtcagctggtttcaataaaggtgctatctaaagaaaaaggtgctatctacagaaaagcttgaagatgggagggtgtgggagccgcgggacacggtgtggatgtcacagtgaagggagaaggagaagaaagggaggcccaaggcagggcagaatcttgctgcaacttcgatgttgagcattctggcccacgggacacacacagcccaccagttttcaaaatacattctttgttcctttgccaggataagaaataagacggctgctttcatgtctctacttctcaaatatgtcagtcttttcagtgacattcttttattcaatgtagtgggtgatctgaattgcaagaatatttcctattttcccatgggactaaattaagttatttgcattttgaatggaatagaagactctaaacacatttatttttttcttcctgaatcatccttggaaaaagaggttgctcgctgttgatttatttcacaattttatctgggtaaaagccacttgcaaaaccactccccttatcttagtacaactgtgctagtgcagaactaaggccaaagggtggaaaattccgtgagagtgatttggattcactcttaaaatgatagcagcagcagcagcagcaagactcacagcagcagagctagctaccagaaacaggtggccctagagctccttgtccccagaaatacacaggtagaggctgggtgctgtcagtctcagtccctgaggagtagacctctgtgttgggtgttacattaggccagtctgttcttttgagatctaagattctgttattttaaaggctttcattactatcccattagaaggatcaatttgaatttcttgtatttgagtggaaaatgccgaagaatactgaggtttgagtttctgatgttttgtgaatttttcactgttgatatttcatcagaaagaatctgagaatgttatgatgtaaagtgggccagatttgctaatctattttaagaacatgtaatctgtgaataataaaagcactgatttgaatattggaatgataaagcaatattcttaattttaaatgattcttgttttaaaaatagcatgttttaaaccacttctcatgatctttattttcacttattttttatactaaattcgggggcgggggacaagtgcagttttgttacatggatctgttgcgtagtggtgaagcctgggctttactgtagccgtcacccaaacagtgtgcattgtatccattaagcaatttctcatccctcatcctgcttccaccctcccaagtccccgatatctgtttttacactctctatgtccatgtatacacattatttggctgccacttacatgtgagaacatacagtctttgactttgtttctgagttatttcacttaagataatggccaccagttctattcatattgcttgatttcattctttttcttggctgagtagtagtccactgtatgtatgtatatgtatatacaccacattttctttatccagtcatctggtggtggacattgaggttatttctatatccttgctattgtgaatagtgattggcacaggtgttgctgaaagtgtcctgagtgtaagaagtagagaaggattgttttcctcagtgttgtgtgtaaagtgcccatattttatttgtgtaggggagagaagatttctgttcttacccatcgctgggtttctggctgagtcatctatagcaaaagacagatgaacaggaaaaaagtatacatttatctgatgcaagttttctgcgacacgggagccttccgaaatgaagagcgagggaaacagggaaacctgtgtattgtatgcttaggtttgatgaagagaggacagatgtggaggagtgtggtgtgattagacaaaggaggagtgagctaatggtgataaacagagggatactcagcaagtcctgttggttctgattcttctctgtgtccctgtgtattcatagatgtggttgttccttcctccagttacagggagggcacttcaccaatgagaatcttatgacctgccataggggagaagggcaggaaaagggcatagagtagccttcctgcttctgctgctttcttgaatgccacagtgccatattttcaggtagcatgtcctgaaccccatcatttgcatagctttacaaagatttcctatttttatttttgattggttttcacatttcaggcatttgccataaatgtttagctttaccttgatctacgagatttggaatttgatggcctataataaattcacgttttagcataccaagggcctgatattacaagcaaatgaacaaacatacaacccctacatgaactgttgtgtaatatgcataatttctcggtttctctattttataatttggatttttctgcagcagggatggagagagcacattttctatcagaagttaccagtgcacaggaaaaatgagtcaagatcaactgactaaaaagaagcttaactcctttaagagagaagtacgttctactttgctttaaaaaaataagaacagggacataaatctatctaatggctaaaaatagaaatgagtgattgaggatgaaaaagagaaggaaagagaaagatcacagacacagacacactcggagacttcacagtaataaagaaaaaaaatcaaggactcagagtgagacacagacaaaacgagccatacacctaaagatgaatatatgcaaggcaggcaaacggaagtcctttttgggggctgtgcaaatactggtgtaacataagaaaaggtgatgggcagatgcagtgagttgtagagggcctgttctgtccaaaggcactcaaatccaacaaaccctgcgctcaccaaaggaaattcatctgtcatccactggccaccagcgtagaccctgggttctgaacacccacagaaatgggagtggacgttatactgagtgcttaccctgtgccaggcctggttctgtgtgcctcgcccctcacgccttataatcctcacatcaccgtcgggaggcctgtgcaactgccatttccccacttcagaggtgaggaagcagacctagaaaagtttccatgacttgtgtgatagcacacaactgatcaaggatgagttgaggtttgaacccaagaagcctggcaccagaaaggaaaacgcactccaatgcacaagacatacattgtcacccacacaggcccagccatctcccctcctgcttcatctaaccactagaagtgcggggatagttatggcagagacaaagaaacccactcagagaacacacagaagccttagagctaagcatgcatggagtcacatcccagccttctggcttctgctgtgcacataatttgtatcctaattttaatgcagtcaatgctgtagtagacctctgaaagatacacagataaatgggaccagagtgaaggaactcacctcttgacaaatgcctgctttttttttttttgttttaatttagtttgctttcttcttttgacctggcataaaatgccaataagaatttgctagagacaaaacttggcagcaggttttttgccaggtgaaaatggggttctaggattaccgtggttgcactgtgcctagctggtagtaggcactcagtcaatgttgatgactggatcacgagatttagcagttgtttaaccatcagtactctcccaattttcaggatttttttgtttgtttgtttggagatggagtttcgcacttgtttcccagtctggagtgcaatggcgcgatcttggctcaccgcaacctctgcctcctgggttcaagcgattctcctgtctcagactgccgagtagctgggattacaggcctttgccaccacggccagctaattttgtgtttttagtagagacggggtttctccatgttggtcaggctggtctgcaactcccgacctcaggtgatccacccaccttgacctcccaaactcctgggattacaggcatgagccaccgtgcctggcccttatgtacagtgtttccctagttatctcagaaacttctctaggccaacgaggtaggtaataggattcccattttccaggagaggaaaccaagacccagaggactgtctggactgcggtcttagagctggcaagtgatggagatggcacctgagggcttctgcttctaaatccgtgttctgtcctctaggctgcactgcccttcagtggtttaagtggaaagccatggatcaatctctagggaaatgtggttttcagagcagtagcatttctgacaaaggtgaagctctgatttttcccctctcctggaaggaggaatattaaatatctgcagtgtctgaatttctttaaccttccctccaatctttagtctctttaggaggttatttacaactctgacttctgtttgtttttaatgtcctctgcaattgaaagaagacagtgagtgtgatgcttaaatgtagtagatttttcccggactatttgataagatctattttgtaaaggaactgccaaagtcagttgcgataatagccataatagttttaaagtgatgttttccaatgcagattcacttattgcctggtttttgaaattattttgagtaactattagaaaataatactttaaaccatgtttttatttccaaaaactctaattgaaaattaaacattcttcagaacaaagaaagcaccttccttttcccagttcccaccctgatcctttattttgctccatttccccataaatccagataactttgttatgtggagtaagaagtagaagatttcactggggcatgctttgacttccccagttccctccatcaaagaattaagcgtaatttttatccaaagaatgggatgaaaggaggattccctgcaccgtcgttttggtttgtcctcttctttcacggggaaagaggagctgaaatgtgcttaattgtttgctgcatttcctgtgcacatgtacttatccctcacatcacccgagaccaagtgaagagggagtgtttagaaaaaagagagggaggctgatacccgttgaaagtaaaatgctggcatcttaattttaagagaacacagaaagccaaatgctttcagaaaagggtcccttcacggagtaatttgcctggtatggcatcccagtttgttgtataatttcagccccgttactatggtaacctgctttagtgtcgcagcgattgttaatcaggatttgtcgttattcccctttcatcacgaggctctatatccttatggattaaatcgcagttctcatcgacaatggcatagatcaaacattattgccagacataaaaccccgggtcgctccctgtcattttccccgttaccagaagcagcaaatgcaagctgaagtctaacttttgcaaggaaatcagggctccttctggctcctctgatatctaccctcatgacagaattccaagcaagagggccactttcgtttccaatcaccctgtgcccatgggaagggcaagcaccattttgcgtcactgcaaacctgactcttcagatacatatccagacaaaaagttgttttaatgtgacctctaactcttcctcaaaccttattcttattcttggagcagccgactttttctttctttctcatcgattttgtagattcttgtctgctgcttttctataggaagtccgtgtcaagaagcaggggagaccaagacgccactcctgttgaggatgttctgtggtgaatcacagagcctcgtgaggctcgtgggatggtggcttgcttttcccatttgtgaagtctggtggtaacagtacccagacagggaagtgaacaaccctatagtatagtgaccggatttagcagggccggatcgccaccatctttaggaaagtcaggttaaaggaacataggagcggtgaagtctcgtggtgccatgttctaggttaggtgcatatcgctagtcgtagtgtgtcttcatattgcaaattgctttgtttaggagcgagaactgttaagccatgcttgttaatagcctctggagccagtctgcctgggttcagtgtttggctctgccacctcctaggtgtgtgaccttggcaagtttttgaacctctctgagtttcagtacctaaaaccagcgtaatagtagtacctacctcagagtccgtgaggatgacgtaagttaatatttgtgaagcgcttagactggtgactggcacgccatcagtgttgtataggtgtttgtaaatagatgaaacagaaccaacattgcacgtacatgtattcaaaatatattcaagatcagattatccaaataccagtaaggtgttgaaaacagcgcttccccccctcctcccccttccctctccctgctttttttccttgatctctgcaatgtgcccaacccccaagtataattctgattggctaaattaattctgcagcatcctgctgtgaataattatgttgatccagtgtgtatctcatgcctttttttttctctttgcctaaattataatgtgacaattgcggctcacagctggctcatcagaggtgggcagttgggggattggcacatctgactgtgcttctctgttaactctgtgccttgattgcttaagacaagacacatgtaaaccccatgattattgccatttttttggactttgcaaagactctgccttcaaacataaagctgctgggctcgttttgggggagggggcatgtaggagtctcctttcccctccccccgcctctccctgcttttcctttcagacaataaatagctgtcaggcttatgtcaaggatgaaattataggtgcacatgaggccttgattacattgttttggagagattgctattagcatactgaaatgaagtctaatttttcactggcggagctgagtcaaactccagggacaggcagggcctatgcagtgcgaggcgagaaccgtccgatcggagcacctgttctatgtggggatcagcttttccttccttaagacaaacaataggaataaaataattcatacgaagaatagctttgcattagaaaagaaaggccaactgataaaggatggaataagacatttcggttagataaggctctttgtgaaatgaccgtatatgattttcaagtgtgtttaatccatgttaaggcagcatctcgcttgttgattcaggctgtgttttagcctgaagagtgtaccatctgattttttaggttgcttgccgcctgcataattcattttctactgcccggccctgcaagcaggcatcctctgaagaggcgtgtttgtgagcactccatccacggggcgggtggccttcttgtacttttgatgtttatacattctgatgatgtgaccctgtgacctgttcactttcaaaatccttcaatataaaaattattcttggcaagtggtttccctgaaatgtgtaagacatggtgcctcccgaatgatggtggattaataattatacatggcttattgtataactgtcctggctcactgcagtgaaaatttaaaaattacacacatacacacacagatgtacatacacccgcatctgcacgtgtgtgtgtgtgtgtaatgattttggcattgtaacttgaaagcttattcaatatcattgtttcatcattactattattaagggaaaaaaacaaggatttggtgtgggtggagaggacgggagcgtgtcctccaatttgaaatctgtaacagtggagaaaatttgtaaacagaccgtatatttatgtatttggagtatatactttcagtacctactacatgcaaacagtgcgctgtagtcactgcagattcagagctgagttagaaatggttcctgctgtccaggagtgtgtggtttggaccagaacaaaacaagcatgaccacataaccctagagcagcaaagaatggtgcgatcgtaaaggaagaacccatatttgctttgggttttttttcccctagctatttgggtgatgttagagtaaactgaggaagagaagagagagtgaaggtttaatggaggaggttgtatttgaagtgtactttgcagtgtgggtagaattttaaacacagaaataaaagaaagacatccccagaagggtgaaactgtgagcaaaagcagggtgaggtctcgtctggccagaggttctctccctgggatgctcttgcatcggtagagaactgtgagtaaaacagctgctgcctgaaatccagacacaggaagcaggtgagtggctgctgagggccgagggctgggggtttcgaggaaactaggagtggctggatgcaggtaccaggggtattttgggggtgatgacagtgttctgaaatggaatgtggcggcggttgtacaactttctgaatagactaaaagccatcggattgtatactttaaatgggtcagttgtatggtatgtgaattatatctcagtgaaggtgttattttaaaaaaaaatactgctgcatactgatgaaatcacactttctgggcgtggcgctggtctgagcctccttaggagccctgggctggagcagacgctggacatagcgttcagctggaaggagaggtggggctttatcttagcctggaagggcttgctgaaaggtttgcaaaacctatttgcaaaagggagccattggaagttttaaagtagggtcttggcacattcacactattgtttaaaaagctactcacagacctgtggtagatggtttctggaagctgggacgccagctggggccttgttgggttaccggcagaggcgaggtggcccttcccaggtacagatgagtgccggttgcagtgagagtcgaaatcaggtgacaaatgtaagggacacagagagcagaatgtcagcagggcccggtgctgtctggatgtggcacgagtgggagagagggtctgacgggtcctcaggtttgagccagagtagatgagaaggagcaggcctggaggatgtgacatgctcagtgttgcatgtgttggattcaaggaaccggcgatccatcctggagcaagatgggaatgtggctctgaccccagcaaaggggctggccaccgagcctagggagtgtggagggtcagcttccgcagcagctcagtcatcagctgttggcaggaggcctcagaccttcaccacgtaggcctcaccacctctgtccccatgtcctcacaacgtagtggctgacttctcccaaggcgtgtggtccaggaatgagtgaaagtcacagtgtctttatataaccctgcctgggaagtgacacactctgtctcctacgggtgacgccaaccaaccgtgtacagggtagaaggggtcacacagggcatgagaacaggaggcaggggccatggggctgtcctggggacagtctgccacctcttgatgcctggcactgctcttggcatggccatctgcatggaaaggctgtaacgagaagggtgctcaaccaccagctcacaggcagggaagcccatgctgcctggaggattcctgcattctcctagcatctgtggcaccccccacgtcccaggggctcggagacaggtcaccgtttctctggactgtcactccagcgagttcaccgcccttcgactctgagcagtgcagagaccccggaccacaacaaccgtgttcctcagactgatgcgaaactccaaagagcgggaaaacgactttagagggaccggaaaggggaagcgagtctcccatggtttgaggtgttgctgcccgtacctgtgcacttggccacagtccaaagtgactccattgcgggcacagccgtggggctgacgtgagaccccagcctggcaaagcgagcactcggaggcagtgggcagaaagggctcctctcggctctgcagccggaaaggagacatctttttagataagagttacagataatattctatttctggaaacgcaaggatgggtgggatgaaccttcttaactaatgtgatccattcagaagtatgttaaaatgtatcccttcatataatgcaccctgctttaatttttagatcagggctgaagagtttttcttttttttttttttatgagaaagggaaaatgttgtttttaaaattaggaataggaatttaggccaggcacggtggctcatgcctgtaatcccagcactttggaggctgaggcaggcagatcacttgaggtcaagagttccagcccagcctggccaacatgatgaaaccccatctctactaaaaatacaaaaattagccaggcatggtggtgcacatctgcaattccagccgcttgggagtctgaggcaggagaatctcttgaacctgggaggcagaggttgcagtgaactgagatcgcaccattgcacttcagcctgggcaagagagtgagacttcatcttaaaaaaaaaaaaacgggaatttagttatatttaacaagtaatcattttgggaggccgaggcaggaggattgcttgaacccaggaggtcagggctgcagtgagccaagatctcattactgcactctatcctgggtgaaagagtgagaccctgtcgcaaaaaaaaaaaaaaaggaaactctgtctcaaaaaaaaaaaaaatcataacttgttgagaagtaattaaagacatgcagaactggagaaggtaggacaactccgatgagtccgagtgaggggtggaggatctggcgattgtgtgtgtcgctggtaaatttttttttttttttttgagacatagtgtcactctgtcgcccaggctgggtgcaatggttcagtcttggctcagtgtaacctctgcctcccaggttccagtgattgtcttgcctcagcctcccaagtaggtaggattataggcacatgccaccacacctggctaacttttttttttttttttattcgtagttttgctctcgtcgcctgggctggagtgcaatggcacagtctcggctcactgcaacttccgcctcccgggttcaagcaattctcctgcctcagcctcccaagtatctgggattacaggtgcccaccaccatgcccagctaagtttttgtatttttagtagagatggggtttcactgtgttgaccaggctggtctcaaactccgcgacctcaggtgatccgcccgcctcggcctcccaaagtgctggggttacaggcgtgagccaccgcgcccggctgagaaattctttatgcaacttctgtcctgctgccctccctgcccaggcccctccagggcctgtgctgattgaagggagaaggtcgcaccttattacaacttacatcgccacctcgtgatacttgccaatttcccctttttgcagagagagaagggaaacattgggcaggctaacgttttaataacattgtttggttttcactgtattaattgtgtgtctaccttctgtctgtggacagtcacaggctgtccatttgtagtggtggtatggagttctctttagaaaataaatgcatgtacatatagtggtttccatgaaatacgtaaataatagcacagttggcagaaaccacaaaggtggtatggaaatgactaatatttgagaagcactagtttgtggcacatgggacggtatatttgtgctgtagggcacagcgctctgagctcccggagagcagattttataaacactaaggtggttttttttttttttttttggccaactttatctgtcaatttacaaatagttgctggtaagtgctgttttttcctcctgaatttagttaaaccaccaagggaggctttcttacactgggattgcagttgctctgttggattggggaaaaagtgtcctaatgacccaggaacactttaataaaaaggttcagttgaaactacaggaatgccgagagctgactgaaaatgcagagaagttctaagggggtaatcggcagtgagggaaaagtacagtgcctcgtggcttctaggatgtcctttgtcctatattctcggctcttttcaaattgaaggaagtgggtgagagagatgctgctaattacatctatgaataaagtgacacagtgcaccggctctgagcagagaccaacacaactcgagagagaaaatcagtctgtcatatttgtacaaatatgtgcacttcgatgataattaccatagtcattgtttactattgctgcattatattaattatctattcagtgatattaaatacataactctaaacatcatccccgaacaaattaccttttatcaattgaaacaaaccaattaaaaatttcaaaatgcaaccatgtaatcaacggcttactacacgataattatgaccaaaatgccaattaatgtgttaatatatgacctcaaatctacagaaacaaacaacaaaaaaaagcagcctcacatagcaattatggcctcgtttgattgacagatatctgtgggtttgtttttctgtctgactcggtaatttgacttatatgaaaacagccggcctgttctgtcccgtgttctgaagcctgttctttcccgtgtgtgacaagcgcgcaggattaaaaagcacagccttttctcttcagctcctgcatgtcccttccctgcactgcccagttgcatccctttccagcatcgtttctgctgctcttgaacctgtggagtgggaagcaagacagggatctctcattttatatatcagtaaggtgtggcgtggacagacccgtgtcgctccctggacaccactggtggtattgattttatggagcagaggctggtgcatgcatgtgtgtgtcaggtgggcagtgatgggggggtggggatgaggcatggtgataattcacaacataccctctatctagttgggatccgtaaaggaggaggttaggggagggaggatccatgcctacttgtggagggtatcaagaagggcttcctggggaggtggaggtgagccgagctcaccaggagcttcaccttcctggggaggcgcagtgagccaagactgcaccactgcattccagcctgggtgacagagcgagagtctgtctcaaaaaaaaaaaaaaaaaaaaaaaaaaataagggcttcctgtaggaagcttagtcagtggaaaggatttagagaggaagggacaggaaatagagaacagcaggccgggcgtggtggctcacgcctgtcatcccagcattttgggaggctgaggtgggcggatcatgaggtcaggatatcgagaccatcctggctaacatggtgaaaccccgtctctactaaaaatacaaaaaataaaaaattagccgggcgtgttggcaggtgcctgtagtcccagctactcgggaggctgagccaggagaatggtgtgaacccgggaggcggagcttgcagtgagcccagatcgcgccactgcactccagcctgggcgacagagtgagactgtgtctcaaaaacaaaacaaaacaaagagaacattctagcaggagaaagggcgttgagtgcttgggttgggtcaaggcacaagtctggctgaaatttagaatctttgaaggaaagcgatggtgagattatttagactgggaagatgaacctgccaatcttatttcttattctgcgtgtgtcacttgatgagaaggccatgtctccaccctttagtaaaggccaaggtcatttaaaaggttacctggcctttttaagtgacttgaaatgtttagcacagttttagaaggtcagtgtctcaccacctgacccttatttccttggtttatgatggccaatttattgcgtctgttttattcaaaagaaaactgagggtgcttctgaagtagtttcttatttcaatgtgtacacacctccactctgaaacatggctcccttaactgcacaggcaaatttatcacatgtagttgtgaacatatatttgtgtgtgtattgcagtggaaaatccccttgaaaaatcagcaaattggacttcagcttgaaaagtatagacagagaacaaaactgtctgtgtgcaaatatatgtatatgtgtgtatctaaaaacatatataaacacatgtatacgtatgtatatataaataaaattggattgagtcataaaagtataaatatgtccaatgtaaaatctactagagaaggagtttgtttttatgactcagagggaatgtgtaataaagaggtatttttaagaccgagagccagtgtgtgtcagcttctttttgcccattgtttgtgtcctgggcaggaagatgactcactagatctgaatcacaaggcaattaagagccccaggaaaggctgatttcaggatggatatttagaagcttcagctaaatcaggtcttgggtatctaggtggattggggaatcagtgaaacaaatatttctcttcattgttttagattctgtggatctcttgctcagtacagaagtactttttttcccccaaaaaatcatatgaagaaagaggaagcgctgcccattctgaaggaggttgttaaaaatgagtaacgcacacttcatgttcacagcagcagtattcacaatagctccacgtgcccgttgacaggtgaacaggtagacagaatgtggtctatctgtgcaatggaatagtattcagccttaaaaaggaaggaaattctgtcacttgctacaacagggatgaaccttgaggacatgatgctatgagaaatcagccagccacaaacagacacatactatgtaattccactgagtcgaggttcctagagtagtgaaattcatagagacagaaggtagaacggtgatttccaggggctgaggagaagaggggatgaagagctgctgtttaaaggatgcagagtttcagttttgcaaggtgaaaaattgctggagattgatcgtacatcagtgtgaatgtacttaccactactgagcggtacacttagaaatggttacgatggtaaatttaatatgaggtgtctttcaccacaattacaaaagtggaatgagtgaagcttattaaggatagacagcagatggctgagaagttggcctggctggaccgttgtctggggggagcatgtggatgaggcatgaggtggggaaataaggaacctgtctttcttccagttaattgttctttcccccttgccttccaccttcctttccctcctgatggctcatcctgtctccctctcacgtgcctgctgtatactttcttccttttccctgctggtccacccgacctatttttactccctcacatttggttgtctttatcctcggaggagaatgctcacaccagcgtctttcttcaggacagctttctaccttcctttttttttgccattttaagaccgacagtggcataaggtcactgggtgaggtagagatacactgatctttttttggtggcagttagggatattgacattggtcatttcccaaagcgacagcagtggtagcacaggtgagggtgtcgcccaccgtctgagaaacccatgaagtacgctggctgctcttccatgttgcccccttcataacaaagtgttcgctatcacgttaagaaatatgttcgaggaggaagccgtgcaacagcttcagaaaaaaattctagagctagaacatgcagttggttttcaaatctcatattcttaatttcaatccttttatttcggatccaggctttaggatgcctctctctctgatatcactaaataaaaattatccaaatgtttaacattatatagaaataaacataatggtgtatttgacaaaatttgacaattttcatgtggatattcaatgccttgtggtcaaagtttaaatcaaaaccaatgtggtcttggcttcaggaatctgtaccatcatagatagcagtggagaagaggaaataatagtctggtatccttaacccataatatagattgtatatttgttgaaagtagaatgcaagggtggcaaaggcctgatcttgttgagggatgggaatttgtcaaacgcagtcactgaatctgtgtggtggacacgcgtgcttgaaaaccttgcggaagagtagccatcaaaaatacttacagttcttaccaaggttacggcagggcaggggtgctacccaataaggtagcacccaaatcggcttcactgcttcaatacgatggaaggctgaaggacacatttgtggttttttttttcttttctttctttcttttttttgagactgagtcttgctctgtcgcccaggctggagtgcagtggcacaatctcggctcactgcaagctctgccttccaggttcatgccattctcctgcctcagcctcctgagtagctggtactacaggcacccgccaccacgcccaactaattttttgtatttttagtagagacaggatttcaccgtgttagtcaggatggtcttgatcacctgacctcgtgatccacccacctcggcctcccaaagtgctgggattacaggcatgagccaccgcgtccagccaggtttgtgttttataggaagaataaatttccattttaaatgaaacaattctacttttttcttgtgaaataatgttgaagtatagataaaatatatcaattgtatgaagatcatttaaagaaaatcacatgtatattgaaaaagattttaatttttttttcttggaaatagtgatctattgttttaatggaaaaaggaagtgtagtttttaaatgttctttaatattgatttacagaagcttaacattacctttttaaataccacaggtacagtaaaatttaatgggaaagctaatttttaatagtttgataatgtgtatatattttatatatatataggttttaccttgcattcgcattttaagagaacaagcttattttatgattaacagaatcattaaaaattttttattgtaagcttgccagagtcctagatttaaaaagttatactcacaccacatatagtctaatgacgacaataaggataaagaaatactgaacttttttaagtaggcttatgtcggtagggatattgatgacattctgaaactattttgtgtttatttaggagagagtaaatgagcaactaagtgaattgatgtgttggacaccaacattttcactgtggaaggagacataaatatgaggaatgtgaggtactggatttgagttgaaagtatcagtatgaagtcatgttaaaatacacccacgctctctctctcactgttgtggttgtatcaactgaagagcctagaagctgtgccatcccaatacgcacacattctctctctctcacttttctagttgtatcagctgaagagcgtagaagctgtgccatcccagccattatgagcatctctcatgcccagatcttcgtttctgaatttctctttccactagaagaaaccatgagagaaatggcgagcctgagatcctttattgcaccaaaagcaaggaagtatggaaggagagctgagggcttgccaggacattggctgacatggtctctcactggtcaaacttgggatggttggaacatcaataaagaatattaatgatcatggattataagtacattaaaaaaacccatatgagtccacagtgatgagagttgggctggagcagggaggggaaagctctgctttataggaacatgccagataacaaatatagaaggagttagagaattagaaactcctcatgttataaccttaatgtaatcaactgattcaggatggatgtgaaaactattggatgagaggctgttgatgttagcacagtattctctgtgcttttgcaatgtagagattggccgtgaccttaatgaagtggtcaggtttggcgtcactaatggtgggagtcctgatgtgatgcggtaggaggatacctgaagcccctgggaagagtggcttcgatgctgccaaggagaatgtcatgaagtacagagctaagtgcaggaactgtttcagattagggagaccaagcagaaataacagccaattgcagtgaatgaaacttggtcggattccatatcgaaacaaacaaaatggctataaaggacatttttgagacaatcggggaaatgtgagtgtggactgtatgttggatgatggtattgaatcaccctttccttttttaaaggtgtgactggataggagaaggtgtttattcttgagagatgccttttggattacttagggtgaaatttcacaaggtcttaagtccagttttggatagtttggtaaaaggaaagcatgtgtgtgtacgtgtgtgtatgagagagaggggatttgagaagatattaattcttggtgaatgtaggtggagagttatcagtattcaatgctatatcgtttgtttctgtaggtttgatatttttgaaaataaacaataagtaaaactaagtggcatagaaattaatctcttcttttcatatggacacatagagacatggtgctaggatggcatgtgggaaatagtttctgcaagatgagcatattcttcctccactgcccctaccagagaaatgtgaatgctgattcacttcttttgaccagtggtgatggaatagaattttccagtcatgcagttgtacttattgccttctggttctgtatcgataagcttcattcctttttttttttttttttagcttcattctttagaaattggattctttacttagtcaagtctataatcaaaatagactttccatggtaagtaaagtaacatgggagcgcataacaatacctgtcatttatgaagacctactgtgtgcttggcactgtgctgtgcttttatttaagtcttctccattcttcatcatccccacattaccaggaggagacaggctcaggatgacaagtggcttttgcaaggccgcgtggtgaatacatcgtagatttgaaatttaaacccagttctttctgactctaatttacctatatgttcatcctccagtatcatgctacctgtatgcctggaaataaaccattttacatagtttctaatgggattacatttttaaaggaaattcatggtagtaaagatctcgttaacactcccttgatgtatggtatttgagtttaagtgtgaaaagaagacactagcaatggacttgtactgagattcaggaaccctggcttctgcttccagttctctcactgtctgatggtgtgatttgagggccttagtcttatcaaatataatcattggttggtctggttgatatctcagttaatttgggaaactaaaatagcatgacattttcaaagaatttttaaaaagattactgtggcagaagcaagttctgggggtggaggtgcatgaggagggcttgggatagtgggaggtggctggagtaggggctgggttattaggggtctgtaggcaatgttagggcttccaactttgtaaggggcaatgaaagttctcataggttttttacactctaaaataataataataatagttctttaatatcaaatatgagagtcagagtcaaatttccctcatttatactttgttcaaatcaggacctaaagaaggttcacacattgcaattgctgataggcctctctccccctctctctgcccgccctcttcttctttctctctctccccatctccctgtctctctcttcccttccctctctccatccctctatcttttaataacagctgtattgacatataactcacataccgtacaattcatctatttaatgtgtacagttcaatggtgtcttattccattgggctactataacagaataccatatactgggtggcttatatgcaacagagataaatttctcacagttctggaggtggaaagtccaagatcaaggagccagcagatttggtgtctgatgagggcacacttcctgcttcatagatggcaccttcttacggtgtcctcacatgctggaagggcctcttttataagggcactaatcccatccattagggccccatcctcatgactgactaataacccccaaggctccacctcctaatactgtcacattgtgaggaaagatgtcaacatctggacttcaagaggacgtaaacattcagaccgtagcaaatgggtatgaactgcagtcagacagttgtgcaaccatcaccacagtcaattttaaaacgtttgcattacctcaaaaagaggccccatagctgtcagcagacattcctcacttcttcccaacactcccccagctatcggcacaataatctactttctgtgtctatagatttgtcaattttggatactttacataggtggaatcagataatatgtggcctattggcttctttcactagcataagttttcaggattcatctgtgttgtagcatgcatcagtgcttcagtccctttgattgctggtcatcttccattgcatggatgtatccataattgtatggagacaccacattttatgtattcatcagttgacagacatttgggttgtttctactttttgtctattgtgaataatgatgctgtgaatatttgtgtacagttttttttgtgtagacacgttttcctttgtcttagatatgtatctaggaatggaattgctgggtcatatggtgactctgcatttaacattttgaggaacttccacactgttttctaaagtaggtgtgctatttttcagtcccacctgcagaggattccagtttatccacatcctctccaacgcttgctgttgtctgtgtttttgattatagccactctactgcgtgtgaaatgttatctcattgtaattttgatttgtatttcaccaatagccattggagggttttagggatgaaatggcatgatctcatttagattttaggaagatcactgtcaccgtatcaaagaggatggatgagagaggtgcaggcagattaccagataccagatgatggatggcagcagacaggccaaggtagtggcagtaagaatggtgagaagtgagtggattacaggggaatctagaaatactgtccgtaagaatttgtgattggtcagatgtgaggattggggagcgctgaaactgcatttcctgcctgggcacctgcgtgaggccatccattgacagaggggacagagcagggtgggtagtggagagtggtgtgtgcagatctggaggggttgagtttgcatttactatcaagagaggagatcaggagtggtctctgggctggaggcagacatttgggaattgttaatatatatcagcagtatctccagaactgggaatggctgaggttggagagtgagaggaaactaggatatttgagcttacctcttacttctggagctttgtgatgcttttgcccttttagaaaaatgcatggaagtacagttttttactcaatatggaatacagttaaagaacaacatttccttcactttattgaaatttgttgcaggataacatctctgtcaaagcactttacaaggctttctagtaaagtaaattttgtgtattgcagtggggagaggggagggggttgcctcttgtaaggcagaatttgattggcattatctcttaagtcttcatttccagcaacaatcttaacatgctgtttagatttaaatggtgggtggaccatatgtcatgaagaggtacagtgatagaaaacaatctctaaatatctaacccatttaagtggttcctacaggtttttatgtttttgagatacatgcctaattttggattattaattcttactggaattttgtctgttaagttaggaagaaacgacttataaagtttcctttggttttccccaggaagatacttttataacatgaaatctttaaaaaaccctttagaaaagtggtctatataattcttagcagggtgttgagatcaagtgcttttcttcttttcattttttacactttgtcagttgaagatgtgcaaagaagtccatttgaaatttccctcgggccacttaattcagcttcattacagtggaagtgggttaaaaatgataatcatacagccccaacaggtgattagaaatatagataggatggggccaggcacagtggctcacacctgctcagcactttgggaggctgaggtgggcagatcacgaggtcaggagatcaaagaccatcctggctaacacagttaaactccgtctctactaaaaacacaaaaaattagccaggcgtggtggtgggcccctgtagtcccagctacttgggaggctaaggccggagaatcgtttgaacccaggaggcagaggttgcagtgagccaagatggtgccaccgcactctagcctgggcaacagagcgagactccatctaaaaaaaaaaaaaaatctatatagatctctatagataggatgaatccatgacacgtccttaaaacagttttattttttccgtttcatgaatttagcaggaggatcctattctcactgcaacctctgccacccaggttcaagcaattctgcctcagcctcccgagtagctgggattacaggtgactgctaccacacctggctaatttttgtatttttagtagagacaggatttcaccatcttggccaggcagatcttgaactcctgacctcgtgatccacaccccttggcctcccaaagtgctgggattacaggcatgagccatcgtacccggccgagatttcatttttaaaaaacatgaatccaagaagtgacttgagttccaaataaataaatttataaatttacttatgttctagaataaatgcaagtaattatgactgcattagtgcagcattaattaacattgctaattctttgtaattatgccaaataataacactaataaaatgtaaatatcaaatgaataaggcgagagcctcccctcctctttttaaagccactatattacagtgtcagattatgaacacacaatattatcaagcttccagatatccactttctaaatacggtctgtgtgaattctaatgaaaacatcagctctgtggtataaatctcctttgccgcctggttcaatgaggggctgcccagcaagccaataattccattcctcagagcattgctgagaatatttatataattaaatatcatctgtttccccatttaattcctggtggctatcccccaaccccctggctgtttttgctgtttccttgggcaggaatggcacaataaagttgctgcagtgctgatggattatcttcattaggtacttgggtgatgagtccccaagcactgctgaatttgatttaccctgtgcaaaggcccaaccttccatagaagcgctaagtagggcaggttttatgcagcttgaactggttggtgtgaagaagaaggaaaaaattaagttgttcttctagaaaacaattttgggaaatgctttggtctcttaggagagcctcctttgcctccttttatacaatctcaacaaatggtgatactgaaagtcctttttggtaagaagaggcggatgaagtgagaacgtggtgagctggagagaatgcaggagacccgggttctgcatctggggtcagagctgaagccaggctgaccttccttgggtctcggggtgtctgcatctgggcagcgatggaacaggactgtggctctccaaggccacttcagctttggagtgggaccttcgtgaatcccgccccgcccctgataaccatgggccctgggcaagtcaccccatctctccccgcctctgacactttgtctttaaaatgggaatacaccacttgttttgcccacttgttacagggtggtccggaggtctgaatacaagagcgcactgcatggtcctgtgcggatcccagctcgcagcaggtgcccacaggacgccgcccctcgcttccctcatgtcctagattctgtgagacacagcccgtgacactttgaagcagggccgtaggaattccgatgggaggtgattagagagaataaacaaagtgacggagttgggcctgagacaggggagtggtctgcggtggaacagtgctggagtaactcctgccactctgagccaaggctcttatttatttttattttggacagggtacttgcagaatcaaggctttgggagtctggtgagtggtcagacccttcatgaatgggattggtggccttataaaagggactccagagatgtctctttctctccttgcaccatgggaggacgaaatgggagtctggccatctgtagcccagaaaaatgttctcaccagaacctgactgctaccacgaagggtgtttaacctacattgagtgccaactgtgcttctcctttaattcaaagcctttgatttctgggggtgcctgttctgatggcactgatgggcaccccctgttgagtggggcaggtgacgggaggaggactggcggccgtcagtgggggctaccatgggggtccagggggcctgtcaaactgtggcacaggggaaacccgtagctctgtgccttactattttactataccatctcatttagtgcccacgatttcttaagaggtaggcactgaaggggaaacctgtagctctgtgccttactataccatctcatttagtgcttatgattccctaagaggtaggcactgaaaccattaccatttgtagatggggaaaccaagggtcacagtggcttgcccaaggccacacaggtcataggtgggagaactcattggagccctccccgcctcagccacgacagtcgtgtgtaaaggtgggttcacggaatatcatggggcctcctgtggtcttaaagtttgcacctctccaaattcctaggttgaaatcctagcccacaaattcgtaagttagtatttggggagggggctctgggaggtgatttgttacgagagtgcgaccctcatgaatgggaccaagagccttagtgcctgcctgaaagggacctctttgcaccatgggaggacacaatgggaggttgaccaactgtagtccagaagcgggcttgtaccagagcctgaccatgctggcaccttgatcttggacttccagcctcagaaccatgagaaatacacttgtggtgttcataagccacccagtctgtggcagttcgttatagcagcccccgccgactcagaccacgctgtaggatttgaagcaggtgtgctgagaatgtagggtagacatgtcatggtggccggtcaccttccattgtcttctctttctaaacggcacccaccttatgggctgctatgagaaggaaatgaggccagtgtgtggactggcgcacccactgttaatcagctgccgctgcttggcccgtttcatctgcccggaggccgttcctcactgacatcagctagtcattctgcccttcaccttgggagggcatcacaccttgtgccttcgtagagaaaaattcctgtttctgccccacgctggaaagtcagataaagccagcacatgtctggaagatgcaagatgaaatgtgaaatcagtatggcattgggtggaaacagaattctactgcacgataatgacagccgagatcaaaggaccgtctatttatcgataagagtgaaggaaggataacatggcagccagaggcgtcatcaaaggggaggatggctggggtaagaccctccaagggggccacaggccctacccagatggacaccgcatgctggtgtggcagacgagggcacagaccagtgtggcccctccgccctttgccccagtcggcattgtcggctgttgctggcccacagctgaacatgctacgtgtcatctagaaccagcctttctgtctccatattctgagtccacaagggacagtaataatgttgggcccacccctggaaatgtaagaagaaattctcttagcctgtcttatcttgtacttgattctttaggtccttctcttaagtttttcttttctgttctcctgttaatctgtctttctttttaaaaccgcatacttacacagctagcgttttattgcagaatactacttttaactggacctaaagagaaaagtctaaggtgttagcaggtatcattctcaccagtcatgaacgattgccattcacagtttaatgttatcctagtcttatctgtcctgacctcatttcttgattaaaatgttcctgttaaatttcctgtaaatccttcctaggtgaaaaatccctccgagggctgcgtatcgcctggggctgtcgtgtattttggcagcagatcccttcccttggctgctggctgggtttctccaagctaatgctgttcggtgcaaaggaatggccctcgttagcttcctgagctttttagaagttttaggctgtgctggttttgaccccttccttcctctctaggactcctgaataggccgaagaaaaaattaaatatttaataaacaacccaatgtcacagagaatgggaaaactcttgggattacatacttgtacccaaatcctaatagactttttatgcttattgttaataatatactatatttgaaagcagagtataatgcctaggacgtagaaggactttaaaaaatgttagtttcctttccctgtagaatagtcaccctcaaccctgggctgcacttaaaaatcacctgagccagtggctcaagcctgtaatcccagcactttgggagacctaggcggtggatcacaaggtcaggagttcgagaccagcctgaccaacatagtgaaaccctgtctctactaaaaatataaaaattagcctggtgttgtcgcagacgcctgtattcccagctactcaggaggctgaggcaggagaatcacttgaacctgggaggtggaggttgcagtgagccacgatcatgccactgcactccaccctgggcgacagagtgaaaaaacaacacaaaaaactgtattgatgtctgggctgcatcctagaccaattaaatcagactcttggagagtgaagtccgggtgttaatattttaaaaaggctccccaggtaattctaatgtgcggcctaggttgagaagatcagctcttagaagaatacagctggccgcctttttgctttatacgttttgagctgctggcttctaattagagttaatatcattacaatataatgcctttgttttacattaaatttaataagaacaaccactctgctctccaacaatatagctactttctctggcttaagtgcttctattctttttttaaaaaacaaacaaacaaacaaacaaacaaacaaaaaactgagtttccgattaaaaacccaagcttaggccagaacagaactttggaactgcagtcaaacaaaattttagataattgttttctaatggcttcctgacaaatggagactaaagacaggcaagggggctaagaccaggctgggtggggagaggggacagcagcacgttggtacctgggtcacctgccagaaaatgagtggcagtctgtgcccaggtggcttcaatttcctgataaaatgaaaaagccatgatatctctgtagaccgagtctacgtcctaacccccaaatcaggacacatagtcttgtaagtgggagagtatacacgtggacattgtagctggaatctgagcctcagtttccccatctgccaattggaggcattgcagagtcctcctcaggattgcagcacgggtgaaaagcttgctgacaaataaatgcttcctatgtgtcaaacaccattctcagttttaaaacgtgttaaataactctgtgagcagttaccttatcacctgtcttatactgaggaggaaatcgaggcacagagaagccaagcagactggcctggtccctggaatagctgggatttgaacttggcagtgattccagagtctgggcgtaaaacatctgtgtccagtgcacaaggtacccaagaccgtgtgggcacaggatggaccctcaaggcagcgaatgaaacccggggctggtaaggtcaaaggtgtgtgagcagcagtgatcccagcttcactctggagagccagggcagtctcacactgggtatgaggtgggtgggtatggtagtggtgatggtgttggtgacaggcttctttagaagttttggagcttttggtttctcaggtagcaggggagaatgaactcagaatattattaatgaaattatctgtaaggttgaaatgtacaggagtgcattttggcataatggtgtgtatgtgcatgtgtgtttttgtgtttgcataactgcatgcacgtgtatgcatttgtatgatagtgtgtgctcatatgtgtgtatgtgtttgcatatgtctgtgcgtgtgtatgcatttgtgtgactacatatgttatatttacatgactacatatgtgtgtgcatgcatatgtgtgtatgtgcatttgtgtgtgtgtgcatatgtgtgtgtgcatgtgcatttgtatggggttgtttgtgtatgcatgtgtgtttgtgtgttggagaattatataacaagcgactttgtctcattcttcagctttgcattctgtgggctggggatctgcatttttccctccagcctcttgtattacccaagctcactcattcacttgatcatacttttacaactctgtgacatttttaccatcttagctgggcccttgcttgttggtggttttgcccatttctaggtgtgtggcctccctggccctcatctgtcagcagagcccatggacttaccccagaattgcaaccctggaagcatcttagcatcatctgggactgatgcccccatacccctaattaaatcaggccctctgctcgggagccatgatgggtctagtgtattcctagggttgagaaacaactggctgtattcacccaacctatgagaagaggatgaggtgacatggagaagtcagtttacaagagctggagcaaagtgcagagccaaatatcttggcgctgggctaatgatgcccttttcattctcccctcttcttcttccctcctctccattctcttccaacactgcttccccaggtcccctctcccatgccaggaattaaaatgttttgtctggaaacaagtgagcttgactaacgtggccgggctcccactgcagctgagttctgcatgttctgatgtcagtgttgtgagctttaactggagattggtgtccaaaggcagccgatactgctctgtccatttctgttgtgctgaaaatcacatggaaaccaatcacataatgatcttgggaatgaagtattcaatgcacagtgttattaacatgtaaaagacttagggcaaatcacttttaagtatgacaaggcttcagatgtgtttggtttgagtatagggaaaagagtttggggggttgtttatcagcagtgccatgagggaggcttatttcttccctttaaatctggatgaatatgcctgtgtgcgccgcatgataataacaatcacgccagccaggagattagctgagcttttgctctagtaattctagcatgcaaattcaaaggactgcagaggaggcaggggaggagcgtacttagcatcttttgctcccctacatcctaacctttgtgctgtgtcttaggttcatcttagggacggctgaacgtgaaacctccatgatgtcaaaagcctggagagttgggtccatgcatgaatgctgatccactttctctcatagtgagatgtacaaacagaagggtacataaaacttaataattatagaaacccatgtaactacccccacccctaaggaaaaaaacattgccactgccctagaaggccctataccctgatgttatttaagaaaatggaccgcggaagagaggcacatgggtggccaggaatggagaagctctgttaggacttgggcatggcacttcttgactgtttctgatctttatgaggcagtagggattctggaacccaacagtttgggttgcaatctcatctatgttacttactagctttgtgtccttgggcaagtccctatgctccttgtgccttagttttcctatctgtaaaatggagataataaaagtgtctaccttgtaggataattgtgagcatatcaagtgtgttaatacatgtaaaatcattaatacagcatcaggcacatacatgttaactactattactttattaataatcttggttctaaaaccttgtgttgttttatatgtggaattcccagtcttctaaacagtatctctctctatagatgactgtattatcctggtcttccacgtcgctggtgtgctatcatccctggccaactcagatgtcactgggcatctccagcacagccactgttcttccttccactccatgcagaatgtggcagcctggcacacaaataatttttaataaaattttagtgtataaatgtggtttttggaaagtagggaggagggaagtagcattgatttaatatttaaacagtaccatttaaacctagtagcaaaacccctatacgataatgagttgtagtctattttacagatcaagaaagtgaagctcagagaagggaagcaactggcccaatgtcacatagctagtaagtgactcagctgggattcgaccacacttctgttttcagaagtgcccatcccttgcggggatttgagctctcacagcccagcctcccatccttgcaggaatccttccttccacactcccaaaaactgaccatgtaggcttcactaaagtaaatcataaatttggaagtctaggacatcttgaacatgctaaatatgtatcaatacacctgatatattgtttccagtcacagataattccagttgattttcaggcatgtgtagatactcatgatataaagattgagttgttactaatcactatgaggcacgggcaggtcttgaggtagaacctcatgaggggaatgttataagtacttttgcattcgtatgattttccccataaccttctctcatgctggcaggagatagctctcttttccaaattctcaagttggcacagttatgaaaaccttctaggacatcagtgtgatgatgtccagagacaggggcagactcctgatctgtggctgtgcttggtactccctcaccccttcattggtctaatgggccagctgaagaatttacacaataggaaaattggccaaagccttaacattgttaccaacctgcatttcttcatgaagaaagcacaatacttgccttaactgagggaagtttcgcaggaaggggtattcagctgtgtgagtatgtgctctgattcttgcctgtttctcagttccctgtgtgttactgccactttcatttattactgtttgcttattttagagctatgtaccttgcaccctgtatgaaattaactcaaagtggatcataaacctaggtgtaaaacataaaaccatcaaacttcgtgaagaaaacattggcaaaaatctctgtgactttgtgttaggcaagtgattcttagataagacacaaaaaccagaagccataaaagaaaatgatagattggacttcataaaatgaaaatgttattcaaaaacattgttcagaaaaatgaaaagacaaatcttgcccatgttcattcccaagcatttcattttgtctgatgctattgtaaatgataccttaaaaactgaaaaattcctaaccattcatcattagtacataacatttgtttttaataattttattttttaataatttgttttaataagttttgtatgttgaccttgtcttctgagacccattaagctcacttatttgttcttgtaacttttttgcccattccttggtattttctttctttctttttttttttttttgagacggagtttcactcttgtcacccaggctagagtacagtgacgcaatcttggctcactgcaacttctacctcctgggctcaagtgtctaccactacgcctggctaatatttttttttttttttttttttttaagtagagacagggtttcaccatgttagtcaggtagtcttgaactcctgacctcaggtgatctgcccactttggcctcccaaagtgctgggattacagacgtgagccactgtgccgggccttccttggtattttctatatggacaatgcttgtctccctccaaattcatatgtagaaacctaatctccaatgtgatgatatcaggaagtggggcctcgggagatgattaagtcataagggtggagcccttaggcatggagttagtgctcttataagaaaggccccagagagctgccttgcgccttctgtgatgtgagaacacagtgagaagatagccatctatgaattaggaagcaggtcctcagcagacactgaatctgctggtgccttggttttggacttcccagcctccagaattgtgaggaataaatgactcttggccctccatgtctgtcagttctgcatcagtggattcaacgaaacttggatcaaaaatgtttttaaaaaaaacacaaaaatacagtgtatcaaccatttgcaaagcatttacattgtattaggtattgtaagtcatctagagatgatttaaagtatatgggaggatgtgcataggttacatgcttatactgtgccattttatgtcagggacttgggcatcctcagattttgctacctatggggttttggaaccaaccccttgcaggaactgagggacaactatactgttgtttatgagccatccatttttatggtactctgtccaatcagcccaagttggctaagacatagatgatcatgtcttctgcgaataatgatagctgatttcttcctttgctatctcaatgaattttacttccttttcttattgtgctagctaggctctccagcatgatgttgcataggcgtggtgagagtggatatcttcccctagctcttgatccgaggggaaagcagtcagtttttcaccatgaagaatgatgccagctgtaggtcttttgagagcactgtcatttttacttttatttttggcacatggatgggaaggctaaagacttgcaactgactttcctcctatacctttaacattttgctgaatggtagagaaagagaagctgggccagatgtagtctggttagaatgctgctggttgggagtgagtttgaatatgttttagaaatactttgtctttctcttctatgtgccattcctcttagtctgttcttattcctgtacactccctagtcctgaaaaaagtagtgacagacctgacattttaagagcactatcccaatttaaactgtacttttttttttttttttaacagagctttaaggaaatgaacagctctctacattttcttgtatttgtagcaggaattctgatcaaattttcaccttttagtttccgtgagagaaaacaagggccttacacctttgatgataagacatcaagtaactgttactactgagtaaaatgtaagaagaaatatactttttaatttgtcagcattgcccttccctcagtgaccaagttgctgcacatttgatagcacaggcaaccacagcaaacgactgatacggacttacccagttaattacctaaagattatattactggaaaaagctaaatcatcaactcaaccatgtgtaaacactttgaacatcatctttaaaatgtctttgcagtttgtttaggtggtagtggaatttgtacaaagtatcagtcattgtaatagcattctaataattctgttaacaactgcttgaaatcagaaagtattatttctgttgtttagatttgcccaagcatttcttgtgtaatgttataagctgtttatgtgcctcttaatagatgagagaatgcactatgtgaagtctgaagtatctgaagtaggtaatggaaccagaggaacttaggttatgagatgggggtatataggtaatatcccatatatcatagtaataacaagacatagaaactaatatactcactcccagatttccatggggactaggaggagcctccattgtagccggggtcaggaatggcagggtggcagaactacagatgcatgctccctccatgccaatgtgtggaaagggagtgacggacaaaggcagtgggatctggtcacgggagtatgggttggtgtgtgtcaccctgcatggggtatgatactgggctgctacaggagctcatggattccagatcagcaaaggaatgccatttaggaggccttgggaggtgctgatggggttggaggggtggcaaaagccagaaaagatgggactggtaggaaggacatggctcctgggcttcattctggcgctgtctctgaagcttgagcggaagagtccagctgtggtcagtggaagtagcagggcaggggagggggaggcaaaggggacgcaggtttctagcttggaactctggctgatggcagagtattagcgtaggggcggaggttagggaatatgccaattagaccagtaatggagggaatatttgacctaaaaataaaagatagacttagaactcagtcttaagggggcaaaagaaatggctccacttgatattgtaaataccaattggaagttggagtgaacttctaagaatctagggcccaaagtctcccatgatggggatagtggactcaccagagatgggaaaggaggccaggtcactgggcagcagggactcaggttgcctgtagctcaccccttcgcttactcggatcttgattcatttgttgggccatgcataccaagaaccgattatgtgccacgcataggtgctgtgttacaaagatgaaagtgagtcttaaagaggttatgtgtgagaaggggacagatgggaccagtcattctcagcataacaccgagtggaaataaccatgacacagattggagcaaagtgaggaggtgaagcagggagaggatagggaagaagaatattctaggtggagagaaagagaaagcatgtataaagaccatttaaaatagcacacttctggagggccacctttttctcacagcaatctgggtcttacagccctttttctgttcaaagtcttccttaatacaaactgttttatttaaaatcttagtgcttttggttcgactatgtgatctttagctttacagtgagaaggcggttaaatgccagggcccctctgagccgaaggctctccgtgtctgcctgcagcctttgttctctgccatgtaaaagatgaaaaattgtgtcagcaatatcacacccagttactgtgaaatcaaggaatcgctctggtgaagaatctgggggtgaagaccagacaaatcgaaacggcttggcgtcatgatttaactttgtcaagccaaagagagggctcgtgtttcaatagttagcctcaccttgcatctatactgggccaagtcttctttccgtgaatcctgaaccctgaaggaatcggcctcctctggctggttttaggcattgcccataaatcgaggctacaactgttctccaggcatctccctgacacctcaaacgtatgctcagcactccttgggccccatgcccaggaatctttccgcttgtctcttttccgggcttgcagccaggctcaacttttcaagatgttgtcttccaaatcctgccttgattaactcaatctgcagccccttctttgtcactgttttcttgtcactcttttggtttctcctgcagtcatctgtgtgcctagtctgtcccatcttaggcatttgcaattgcaaatgactacattaacatttaattcacaccaggcagcatttgtctgctgcataaagacacacctggactgcacggaagactgaggacctgggctaatggtcccagcgtgctgtgggtttggttggctgaggtcagcatccacattgaggtgggtgggcctgggcagatttctaagacaagacaagatgtgaggactcgtgtctacatggtatcttctagcttggaactctggctgatggcaaagtattagtggaggggcagaggttagggaatgtgccaattagaccagtaatggagggaaggtttcggggaaggaggttagaagcagccttagctgtctgcacattccaaacagggatttgagtatttgttcctggatattttggtgagggtgtggagaggtaggagaggggagcctgcttccaactttgtaaagagagagaagatatgaaggacacagatagaggagcttgctgacagctagaaaagagaaggtgagccgagcagatggcgtgcaggtgagcgaaggcatggctaggggtggactcgggatggaggagcccaggaggcttcccgggagcaagtctatgtgtttggtgtcacgcaaccatgcttttcccacaacccttctgtcttgggtcttgtggcactgtcttggttctcttgctgcgtccactggaggcctcttctcccatgacttcccagctcacctcccctctgtgagctcaggccccagcctgcagtcctacgttcttcgcactctctcagcttcctcccctgagctcatccaggcccccagtctctgttttcacccctctggagcagactccccagcctgtctgcagtcttgtccccatccgccctcttgctccatctttcattgctggttagacgtgtctactgctatctctgtcacctccggctcagcgtgctgcactcagacatccaactggaggagtccatgagctgacctcagagatgccctccgacgctgagtttctttgtcaaaaaacaaactcttcactttcatctcttcaaatggcattttattctgtcctctggtgtctgtcaatagatctcatctccccagacaggctgccttcagcttcccttcacagccttgccgatcttgcccctttccctgttaatccacacagccatcacttctgaacttaattcctatagcccctgacgttctctgactcatccgtcccttgtgatctacccgaacatgattcaccatccacatttctggttctactctacctgtctagcccctttcccacaacttttctgcactcaccctcctctactatggccgtcccggtcacttcaccatcttggagcacctggcactcatgagatgccacgatggtcacactgcatcccttccctgaaaccttcccagcctgtctcggtcattccattgttttatttgacttcctctagaatcgataatctctgctacacaatttagcatgtaaccgtatatgctcagtgttccctttttgaagtatattggtcttatctccgcaattggaacatgtttaccctgttggaacatacgctgttatcaagtcacaacgatcattatttttgctttccccaaagtgtcaagaatgtaacacaggatcaacaagtgttgactaattgataaccgagattccagattaaagacaaattttagtctgatgatcttaaaagtaattatgctgggtggaaaataccctcactttgggtatggttaaaatgactatcttgaatatctcattaagaggataatgtctcattgacatttatactgacagcccctagcatggagccttacgtactggctagtgtgttgaatgaatacctgacttatttaagcttttcactttgaagatgtttggtagcatttccatccagtccttgtacataggtaatcattgtcacggaggaccaaagggtcttcaaaacctgtgatgccaagggggcattttactttctccttttgtgtgggtagccacaactctattcgccgtttttaatatttacttttggctttatcactccatcaagttgtttattttttattcattccttacaatagatgtagcagaatgggataaggcagcatcattttcttccattccattttatcttttatcagcatttagttctcatgtatagcttttcctgagtcatcagtattgggctaatggactggaagggcccaagttgaatggtaattacttactctgttgctgatagcccagatgagaataggacctattagatctgtaataatggaaatctgtgtttaatgcagatcttttaagcagtttgaaacgatctcaaattcatctctctttgccatatgttaaaatgtcacattatggttttaaaattcaggatgagaactgaagtttcaggagagcctgcctgtggaaaagtcctcaaatctgtcctttttaaaatcagaagcatttgttcatctcaaatcaagcctcctcagagatgccagctctgtctgggcagtccgtgcaggcagggtgagacgaagaagaatagggcttagttcacaaggatctaggacagaaggggactgaggggatgtgaggatggtggactttgtgtggtgccaggaggcttcccagaggcttgggccatggattcagtgaatgcattcaagtcaggagctcctttgtttccttcttcatggtagggtccagggctgaatgctcacacttgtgtatcattagctcatctcctgtttcagcagcagaagactttaacttttccccaaatactgctttcttctttccccttttcgtgtgaagaataaaggtacagaaatttgacccaagatacttctgtgcaaaggccatcctctttagattccagaccagacttacgaagtgaactggtttacacaggtcataggtcaatcaatgctggaatgggggctcagagcagaacctagtccccacccagggctcctgccatcactctcagaagtgttacaactggaacttctggtcatcaggattgttgtgtttttgagttattttcaataacctgtatcattcttcttgtctgggaaatggccctaaataatttagcttcctcttagtacagagtcttgtctggagacatattgatgggggctgtaacctcacccagtttcataaatgaagcaggttcatgatggagctcctgtttctcaatagagaccttagaatgagaaatggttctcaagacttgttcagtttattacgtgctgtttgctgtttgattcaatgagtctcttgtatctttgcaaatggtagatgtattgagtagtactagtatggtgttgaaaaagttggtactggtgaaatgttccaaccttgaacctcctgtgacttggaagagtcttcacagaattcaggacagacaggtggtgctgattcattggtgggggattggtttatttcccatagttctaaattatgcactttgacaactcaataaacctgatgtaactgacaacacactgatggatatggtggaggataaagaatatgattatttgaatcaagatgcttatggtatggcatcctagagtcgattgctttttaaaagattcttgagctttgataactttttgttgatacattttctttgagttcagcgagctggcttcatgagtgtgttgttatccacctcttctttgggaggaaaggattgtgttttagtacttaccctgatggctatagaagtcactgtttcatatgctatatcagaattgacttaaaaattgcatgtaggtatttgctacatgttttggtgacatgatgtataccattaaggaaatttaagatctttttgatcacaaagttctcagcttacatctggttatttgttggcgttttatttattggcaagctttttctagcagcaggtctatggacagccctgaaatttctttaaaaaccagtcttggaaagaagaaaagctgtggatgcttagttgaaagttcaagttacctgcaaaacatttgtttcaattgaatttgtctatctatagttgatgtagagtgggattttagggaccagggagtgtctccttggtcctaagttaagaaaacaaaaataaagtgacttcactagaattactttgaaccaggtcaagaacctgttcatctcactgtggggtttatatcctccttaccgcttcacctgcctcttttttccaggacaaatattttacatctgatcacttcctaatgagtacatctattcctgagaatggcaaactttgtgattatatcagagcaagaaatcttatttgtaaagaggctgcctaattatccatgacatttaaaatgtctgcattgtccttgagctaagagtgtgaaaatcaggagacccaggggtgtattcacttcctgatagatttcgcttagtttaccatactctgacagtaaaaatcaaatgaatctgagctgcttaacattaacattccaggccggacacggtggctcatgtgtgtaatctcagcacttcgggaggcctaggaggggagatcacttgagcccaggagttcaagaccagcctgggcaagacagcgagaccctgtctctacttgaaaaaaaatttgaaataaaaacaaaaacacaataacattccaagcaggaaagtaattgaaaaaaactgctatcatccatattgctaattttataatgcggaaactaccacagagttataagtgcagcgatgaagatataatagacatatttttgtgtaagaaaaatgaaaattcaccttagtgactgaaagcatagattgactttgcatagacatcagtgtcaataatgatcattttagtaactcaggttttgtttcttcagttgaaattcaaagtaacccaggttcataagtaggctgtgatgttgaaagattggaaactctcaattttgtcaaagattggaactaggttgagatactttggaatgttttactagataaagaggcagggaaataaaataactgttgtttcctgtgatttgagaactacaggatggcaccagaatctcagacctgcagcccagtgaagggattccttcattaaggctcttgttcatttctttcttggtaattttgttggttttctgtttttactagaggaatatgactcttaggaatcatacctgcatgcaaatttctgatgctctgttgattcgtgagcactagaaagagttaaaactccctatttctcacaatctcccccttggcagagttcagttcactgatgactatggtgagtcagtcagtgccccatcctgtgtcatggcatcccacaggacaacattatcttttaataattgaattatttttgcctctatagtaatgtgataagacagaatcatcatctattttttaacatatagcaaaattacccagttttttgaagaagctggaaatacttggatctgcatgctaaataggtaccaaggacagaaggaagacagggttcatcttctctttctaatcgtgggactttgggctgtaagggttggtgtcttcatctttccagtaaaggggtgggactgagcaatctccatggttactttcagctctgagagtcgatcatttataattataatgcatattgcatctgtgtatttcagtcattctgaacagaagggtttttgtcttggcaaggttttgtcttggaatggtgtatatatttttgtggaatggatgctttctccctaatgtctggcaaggtcttgtcttgctttcttctttgttgacattcctggtttctggtccagccctgaatcgacccagctgatggggcatattaattgggagcatgggctgtggagttaaacagacctgggtttatgttccagttccaaacctcagtttatctggctttctcatgtgtaaaatggagaggatgctgactttgtgggttgaggtaagatattcaatgagaggttgaaggtaaagcgcttagctcagggcctgataccttccgatgccttcctggtttcctacacctctccccatgtaaagatttttatttgcagaaatgtcaaccccaaagttgttctaagtgggaaaactgtttcctctacactcacaaaacatttctgacaccaactgtatagattttccacaccaagccattctccagttctctgcagacaccaactgggtgtctaataattcaattcaattctggcattaacgacctggaattagaccccacagcttaagggactcagtccttcaaggctgcccccaacttcagatgccaattgcaagtccccaggttgtcacctgcacttctctctgacttgactacctgactcagtagtccacacaaccccctccttaggtttgataatttgctggaatggctcacagatctcagaataacagtttattatatttactggtttattgtaaaggatacaactcaggaccaacccaatggaagaggtgcataggtcaggtatgtggaaggggtgcagagcttccaggccctttggggtgctaccctccctcacagcaccgtgatgtgtttaccaacctggaagctctaggaacccattgtttagggtttttatggaggcttcattatgtaggagtgattgattaaatcactggcctcttccctcctcagaggttggagagtggggctgaaacttccaatcctctaatgacctagttggttcctccgggagccagtcccaagccacctggagttacctcattagcataactcaggtaaggttgaaaggggtttgctatgactaacaagatgctccccttacccccatcactcagaataccaagggttttaggagcgctgtaccaggaaccagaggcagagagcaaatacatattcctttttgtgtcataattgtatatatttcgtgtatttttgtctggtatcagacactgttggaaattgtggtttagtttacttcagttgttgcaccgaagaaatgtacaggaaatcaggtgtttttggaagacactggattaagagctgtactaaaatgctccatctatttcttcactacttccaaatgttgccacatttttgaaattggaaaattctgttttagttgacttcctggactttacctcttgtgtatgacttcaatcttgataacgttccatgctagtcttcgtctctggacttctctatcaaatccaccgttaacccatcaaatatttattgaactctaggcactatcctagaaactggagataggtgagaatgagaaaaattcgtctacagctcccagtaaatacttgtccgcagatgggaggaggggacagaacataacctgtaagcagatatattataatttcagatagtgctacatgtttcaaagtaaacttaaagcagaaggcctggcagggagcagaaggggatgctattatctagagagcaagggtttgagtagaaacctgcatgaagtcagaaagtgaaatatctgcaggagaaatgttccaggcagtaggccagcaagtgcaaacaccctgtgggggtaagaatcttgagatgatcaaaagacagcgtgcagtatagcttgtgcacacgtaccctaaaacttaaagtataataataataaaattaaaaaaaaaaaaaacaatgggagaggaaatgaggccgaagacccatcagggatagattctaggggccctgtaggccaaagtgaagactgaaatgtatcctaaaagtcatggacaaccacaggaaacatggaagctggggatgacatgattgtatttacatttaaggcaattactgaggagaacagatgggtggagaggagcccagagagagggcaagagtagagtcaggaggcaattcactagcagaggaaatagatgaacttgctgggtcatgatggaggtggtgagaagtggtcgtggtccagacgtattatgaaggtcaagctggtgggacttcctggggtcacatagaggtagtctcaccaacagtgttagtgctctggagacctcacttctacccttgggtcatgtacctgcatgggaaaagcctttatcctgaccccaagtgccttggctcaacttcgtgattggtgtgcattttgggtgagtgggggtgagcaggagattaagtaagaaatttttttttctcttcaaaatacagacatatgggtgaaatacaagggtggggcagggagaggatatagttctcttggtacatgaccccatctacagctcctatctggatctcttggcttagctctgacctcctaactttttgaggctggggactagacagggaggtgattgaaaggcttcagggacttgcttggtttatcctctaagctgcagcagctatgtcaggtttcctgattcctgaccccaattccagatattcctttatttgacttacagaatgactaagaatatgcaaagtgagagatgaaggtgcaggctgttaaggccaagagtataaactaaactgtgtgtatcagttacctcttgctgaatgatgcatcacataaacctagcaccttaaaacaacacacatctattctctcacaatttctgtgggtcaggaatccggacacagctcagctgggtcctctacttcagagtctctcacaaggctaccctcaagatgttagataaggtggagagctcatctgaaggctcaactggggaaggatctgcttccaggctcacttgtgtggttgttggcaagattcagtttatttatttatttatttattttttatttattgtgggcacatagtaggtatttatgggttacatgagatgttatgatacaagcatgcggtgtgtgatcatcacatcatggagaatgggggagattcaggtttccaagagccattgggctcagggcctcatttccttgctggccatcgcctggaggccacacccagttttttgtcacatgggcctttccaacatggcagcctgcttcatcaaagcaccagagagagtgtcctagtcacagtgctttgtaacttaatcacataagcggctgtcctcagtgttgccatgttctattagtgagaagcaagttactcaaggagaaggctctaagtgtatccagctgaaatcctgtattttctgttttccccctttacatcagcatgcctttgaagcagataatactgtgtagaccaagtctttaaaatagcacattccatgagccaaccagccacctcacctgcctataacattttcctttatcgtctccactgatgctatagctgaccatgttaggaaccctcatgttatagcttagtttatcttaaatcttgactttgtgtttgctcttagctcttgaggactatttgccttcctagacttggtactcccttgactccctcagtcccagccaggagagtgtcattttaggccattgtcacactaggatgtaggaggtgataaagacagcttagttaggcttaggaccaaggctgtgtgagaaccaaccgaagacagacctgcaatgtgtcatctggtacttacggcctctgtttgccaggggctaagtgtgataatgggtcagaaagtataaggtttacaaagtagctgagatgccacctgggacctactattaaaagccagggcagaatcctacaactaggaggtcataacagtgcttggaaggccattgaagctacagtcaggggcagaccaagggtctgggagcttgaagaagtggcggtcaaggcaaaaatggttcaaaatatagaagttcagattgtggagaatagcaacattagtaagcagagagtaggagacaggctgatctctggctaggttatttgtccccacactttcttttttcaatcttttttcccactctaccctggaagcccaggcctagatacagaggcatagtgtttttctctgcgagctaaagaggacggtgtggcatcagggtgacaagctgagctggtggtggtggtggtggtggtggtggtggtggtggtgctgctgctgctgctgctgctggtggtattggtagtgatggtgttgacagtagtgttgttggttttgttggtataggtggtgttggtggtggtagtggtggtgatggtcttggtggtcttggtggtggtgctgctgctggtggtattggtagtgatggtgttgacagtagtgttgctggttttcttggctactaggtggtggtggtgttggtggtgttggtcttggtggtgttcgtgatgttgttggtgttggtagtggttttttgttggtgttattgtgagtggtagtgttgatggtcttggtggtggtgctgttagtgttgatagtgatggtgtgttggtagacttgatagtggtgttattgttgatggtgttggtggaggtggtgttgttgccattggtggtggtcgggatggaagtggttgtgttgatgattttggtgttgatggtagtgagcagttccctcactgctctcttacacagccagcctcttaaataatccccactcttaccctctaagccccaccttagacactaatacattctaaacctcttccaaagaagcagaaagaatcagtttcctgcctgggaacagtaaaccttgataactactttctctctagatgtaaaaggtttggctggtgttattctcggtgaaaatagcagaaaatccttctctttccagactgggattaaatggcttgatttacattggattctagggttattattatttttaacacttccctgatcggtttttttagaaactagcaagacatttttaaggatgaaggcatattaaaaacaactctaaggatgccttgtctgatgcattcagcttgcctcgtccatctccccatttgttttcactgatctacttaacaacttgtgtagacaggtagagcaggcatgacctaaatttggtggatgaagagatctagattcagaaaagttagtttacatgtcaaaggacacacagtcgtataactgacaactgtatgcaaccaggattcctacctaggtcttcccactccaaatccagcactcacattgtactgaaaaatagcctgattttatcacttgacctgtgaaaggaaagaaatcaagggtgaacaaagggagagaaagtaaatgatgttgaataaaacatgagaataaacagtttgcatatgtagccttttgatctttattgcagggctgagacccggttcttaactgttctttcctcatgccttctgcttttggtaaacattcccaacatttaccatgaaatcctctctctcaaggctgaagggctgctgctccttttgcagagcccctgctgatctctcatctctggagatggctgtgcccttagcgaatgcgaatccccctgtggacaattggtgactgagggacagctgtctgcaaggggcatttcatcagtatgcatcacgactggggcttggcagtcattagaattcattataaattactctgagtcccaggaatctcatttagttctccctcagcagctggaagatgctaccagctgtggatctagggtttcccccaaagattttacctaagcattgtgggtaggggcaaataggcaaaacgatctgatgatgagtgggtggggtaagatggacaaccctgtttctgcctttctacctcagagttaatgccctgaagatgccactgggggaatcagctctgggcacagcttaatccttagtgcttctggtgggccgaggaatgctcaagggtgtctttgtgagtcattgcgagaaggtccatgacagaagagggaaagaaccaaagagagagcaatggagaagaaagtagcagatggttctctgtgatcttcaagagccaggccctggtggtattttctgtttcagctactgtgacgctttttgtggaatcctggatgaggcctgaactgaccattcactcagtcctctggacctttgagtcctgtgttcctacggaaacccactcatcttgcaaggctcaactctaatgccaggaccaagtgctttcgtgtgaatcaccccttatgattctcacaacagctccataagataggggtaatttccattcattttttttttcagagaaggaaagcacaactcagaggggttattgacctgtgcaaaggaggagttctgggttggggggagtggaacccatgggagctgcacactcagttcctttgtcccctgaccatggcactttccacacaatactgcatacgtatcggaacagcgtgcctcttactgatccttaccgtgttggaccaggacacagtggcaaggtgagccaggttggccttctgtgctcctggcctttcctcacgtggcccttttcctatcatgtattcacctcttcactgaaagaggtgcttccttgtaacctcactttgccatcctcttctcatccctgttctaggacaggggctggcaaacattttctataaagggccagatggtaaatattttaggctttgcaggccatacggttcctgtcacgatgactgcactctgccattgtagagtgaaggcagccatggacagtatataaatgaatgagtgtggctgtgttcccattaaattttatttaatgacactcaaatttgaatctcttagaatttgcatgtgtcatgaagtacttctaatggttgttcagccattaaaatatatgaaaaccactcttagctcataggctgtacaaaaacaggaggcaggctggatatgggtagctggccatggttttgccaatcccctgttctataactaattgagtagtaatcctttacctttgggtaaaatcatcactgtgttagttctcctgaaagcgcatacaatttaaacctttaactgcaggtgaaaggctttgttgcctcctaaagggatttggggtagtagtggctgtgatgggtggggcggggagaggtcacaccaagcagatagctgcctctgcctaacataacgttagtcctgccgtgctgctattgtttttttcagtggaaatgttagatttaaaacctatatgtcatttgtctttgagctctgtatggagaaaaagatcttgctttggtttttgtaaaaataccagccttagatctttttgtgtgagctgtcatcagtcattccgattgttgatcttgtaaattcatgctttttagtgttggcagagggttgcctttgtttctgtacaatttcatgaagtgtttctttcaattgggacttactttgagcttaactggagctatacttttcatctcaactagattttaaagacatgggtacctggcagcatgctacagaggattgttttagaatctttcctcagtgtgagaacttcgggaaatggtacgaccagccgctgattgagccccctttgacatttggtctccacatgatccacagtgactgagcatggcttgaaacttggccggtgatacctggagtgtcttgaagggtttcctttttactcattcttggatgtgtcctggagtaaaaatttttgtattccactatttgtggaatttggaaagaagcacaggaaaggaaatggagatttaatgaggaacttgatttacaccggtacccaagctaccttccaccaccagcttctgccgcatgttgtatgttaggaagcttactaggactgcagcagctagagtactgtgcaggtgcctgacttacacaaccaccctttcaaaaatcgttccacagcccaaggcaacattgacttaatacatttctcaacaaactgaggcctggaaatctgagaaataaataggtgggctatccactgtaatgacaaggcatgacttcctggtttgtatttcttcccatagtgttttgattacactaagcgttaccggcaggcaatagttatttgctattattgtttttaaattaatcctagaaggtcctttaagtgtatttgataaacatcatgttacctgccagcaaggaattgtactctggatatttctgtcttcagaggtagttctatagtagttctgttgtataacagaaagaactatcaattatttgatcttacagtcattatacatgtagactataaattcatgggatttaatttaatgaacaggttcctgcctcagaactttgaacattatgctgtgggaaggaaaatcttttcaatttgctttacagactttgagtatttgtaagttcaccttttaaacaattagggaatatttacatgttgaggatttctcacaagattaaaaaaaatacttcttttgaaatagttgaagactgaagagaagctgcaaaaatcgtacatagttccaatgtgcctttacaccagcttcccccaatgttaatatcttacataatcagtgtgttgtcaaagccaggaaatgcacattggtgtaatacttttaaatacagatcttatttggatttcaccagttattgtgtgcactttttttggtgtaagttctatgaaattatatcacatttgtggatttgtgtaacacagatctatagaactgttcatcactccaaagaaacttcctcatgttatcgtttaacagtcacattcctctcataaggttgtgttcagactgtttcgttaggatgtcaaaatagcaacaaaaacagaggtggattttgagaaagtatttagttttcagttgatttccacaattacggatttcgagtgaatgaaagaaaaagaatggggaactgtattcaggttgtgagcactttcacatttatagctacgatccatttaaagttaattgtcgtataaggtttgacgtaagagttggggtttattttgtcccatttagatatacagttgttccagcaccatttgctgaaaagactgtcctttcctgattgaattatctcagcacccttgtcacaattaaatcctgtcttctctattctgttccactcatttgtagaacttatgccattaccacactgtcttgattactgtaaccttacagtaagtcctgaaatcaggtagtggaagtattccaactgatagttccaaattgtttttgctattttaggtattttaatttttcacttaaactttagagtcaattcatcaatgtctacaaaaacctttctgaggtttccatcagctttgtgctgaactacagattaatttggaagataattgacatcttacagagtctttcagtttatgaacatgatgtatctttccattgatttctatatgctttaatttctctcaacagtgttttatagttttcagggtacagaccttactgacattttattaaaaatctccctagtatttcatgttatatgttgttattatgtaaagtacttcttttaaaaagaaattaacatttcatttgttgctactatgtaaaattatagtttatttttgcatactgacctacatttggtgagcttggtaaactttttagtacaaatagcttttttccttaggattttttacttacacaatcatgttgtctgcgtataaagtattttccttctttcatttttgtacgatttttatttctttttcttgccttttttgaactgactaggacctcactacaatgtcaaatagaagtagagtgagtgtaaaccctagcttcattcctaatttaaggctgagaacgttcggtctgttaccataaagtatgatgcagctgtagctttttagtagattttttttattagcttatctcccttgttgactaaaaaaagttttttaaacacaggtaggtattgaattgtatcaaatgcttttttgtagcatttattgagttgatcagattttttttcttttttagccagttaatatggtaaatgacattaattgaattttttcattgttaaaacaactttgaattccttggatgaatcccacttggccatgattgttatactttttatatattcctgaattcagtattattaaagaattttaaattctgtgttcataaaggggatctgtctctagttttcttgtgtctttgtctggttttggcatcagagtaatgtgggtcttatgaaatgagctgggaaaggttcccccttcctcttttttcaaggcgtttacataggattgatattatctcttgcttgaatgtatctagagtttctcagtgaaaatctgggagcatggagttttctatttcagattttctatttctcgtgttattttttggtgatttgtatcttttgaagtgtgtctgttattaatttgttgcctcttagctccaaatacatctttctgtgtaagctctgtgataagccaaggaatgtccttggtgtttcttgtttaatgtgagcacgacattaagcattgtcagtagagggcgctttgggggaggggggtcattgctggaggaagtctctcttgccatttcttttgtgggcatgaggaccttccgttgagcctgccccagtcatggccccagaactcagtctctgcgacctcaaaccctcagcctggtggtaatgtttctgcagccctccccacagggcaccagagcccctgggccgcccctgcctgtgccgcttctgtccgtggcagtgcccagcatccccgcagatgattccaaggcctcctgcccccgtcagtgcctggacacccccagcacgtcatgctgctagttcctgacaatctgcaatccagagggtgatgttgcctgtctggtgtctccagatcagctctggcctggccaagcccgcaaacttctcagccgtctggtggctgaagcacaccttctccaagacatctgagtcctttcatgtctgtcttccttgggcactttctgtcagtccgtgtttgccagagagagtttagatcacgtagttactattttattgtagtattctttatattagactttccattaacctactgtgtggtttgtgtctcctgaatggttatccaaaaatttcttgtaagcagtatctgagttgagacttctgtgacctatggtttttgtcattttcaagaagggtaggagacattgctatgtgttcaactggtattttttcctcctttctttactcatcccgtccttacgtgtttttgccagggacttaactaaaatctaaaatgaggaagagggagaccagagtgtagtgagactaagttcaggagtcagtaaactagggccatgactggtcgatcagcttcagcattagttttctggtgtctcatgaccgtgagcagagatgttgaggattttatgagacactataagcatagcgtcccattcttctgctgcttagactagaggtcctataaccttaagctgcttatggatgaagtatctaggctaataaatcacctagcttaatagcagcaacaattttaatgtttagattttattttatttttatagcaaaagggaaaaaacatattttactatagacatcattatgaataggaataaccccaccatctttttacttctgtctagtcagagaaaagagaccccagactcacctaaccaactgatcaacaaaacaaaaccccaccgaaatacagaatattctccccattgcagttaggcctttggcattaacttaaatttagcctccctgggaattttggaaaaacatttttcttcattgtttttgtaagccctatgaggcagaggtataacttccccaaacaaaacagcaggaaaagcaagtagcaatcccctggataatgcaaatgaataaaaattgccagaattattacaaaagtgctaaaagccctactttgatatcttacactctattcctagactttagtggttcagaaatgcctgttttagcaatgccagcacacgagggaacaaagtttgtggagaaaataaaccacatagagatagtctccaacttagaaatgggtcatgttctaggggtcgatttgtaaatcagttagactggaaatatattgttcctgtggaaattggcattataaagatgtttttttttttggcttatgtcattagttttcctttggaaaaaaattgcattatttttcttttattagaacacattactgtattaattttctatcactgtataatcaattattctaaaacttagcagtttaaaacaacactcatttactatcccatagttttcttaggtcacgattgtgggcatggcttagctgggtgcccctggatcagtgttcctcacgaggctgcagtcaaggtgtcagctgcattgtgttttctggggctcattcacagggctgttggcaagcctccgtttcctgccacatgggcctcttcatagggctgccttacgatatagcagctggtttcccccacagcaagccatctaaggagaacaagagagcacccaagatggaagtcatagtctatcatccactcacggaatcaaacccccatcactcctgttgtgttctgtttagtagcagtgaatcactaagttcggcctacactcaaaggaaagggattaagctccacttcttgacagaagagtatcagaatttgtggctatacctttagaaccaggggaggatctgctctcaagttcactgagcctttccaaccagtgagcggtagagtggatcctccccctaccaagccttcagatgagaccgcagcccagctgacaccttgattgcatgtttgtgggacaccctgagccagaaacacccagcttcctattctaataagaaattagaccacttaacttaaagtgtaccttgcaattgaacagtggttgttgtgcaacaagggagttcctcctctccatgggaagaaaactcattcctcagtgatgagtagcacaatgtggagatttctgtctatagttagtagctgaaaggcttaagcaaggatgggaaatgtattcttttcccctatcctagcttgcaaccagcttgaccagtatgtaagggtatgttcttgatgttatagggtagaaattagaatgcttttctcactgaaacagtattctgtaaatggtgctcagggtccttggaaagaattatatatgagactcattatgggctgaggaggcccttctgggcaagtttaccaccgtttataacagcatgttcatggaaaatggtttctaaatctcagacacccatttcataaacatgcttttgaaatgtgactcatttttaaattgggggtttgcccatattatattatgttctccccagaaaccttctcaacaatagtttacattttgagctataagccttttgggaagaaaaagtgacagaaaatagagattactataatttagtcttggcactaatatcctggcagacctatcaagacataattctcctcgaaatcagatttactgcaaggcctatgctgaagtcttcttatagctgaggtatgccaagtcacactcgtcttctacatttctagaattctagggtcttattcaggtgcttccaaaaacatctgatcagaattagcacatgagaaacattttgggcctgccttagaccccattcagcgcatggctttatggaggcctatggccttcccgctgagagagacactgcgcaggctccagagtgggttcagtgtgaggccgcctcctctgtctcccctgtgtttgatattttcagacactgcggtaattttattcagcaaagctccattcagtcattacagaatccatcaaagaagtgtccattgctagaatgtgcaagtttttattgagcatgtattcagggacgataaccaagcagacggtgctgctatccctaatctccatctgttagtgaagtcaggcacccagcagtgtgtttaaagagccactaccatctccactgacttccctgagttaagatgttctatttcgcctccatctttcatagaaaggcaagtgtaaaaaagcaccaccaagcgcctgtctgtgtcgtgtgtagaaccaaagtggaagattttgttcattatgtttcttaatatgaatatgcgctgggttatccaacttcccttaattagccatgggaccaagtctgctatctcagaatgacaggtccttagaagaaaatgttagagtagctgatttacatgtgctgtatctctagtaagggcaggattttttaaaaaaaatctacccacttattgaaaatcaattgagagcttcatagtaaaaacttgataatttaagggaaatatataacattccaacagcttttagaattcagaatgtgaacatataaaatagattttaagatactcttctgttatggaagaaaaattgcaagagagagagtaacagaaaggatgagagggaagagggatggagcaataattcaaacagcaccaagttccagaaaggcaaaatacttgctgctgtacgagtctcactctccccctctctcctccaaagtaaaaaaggggtgaacccacaaatacttcatttttgaataatcttttatttctatccaaaattttgcatgcttgatcctcttaaaatccttcccccccttaaaaagaagataattaaggctagcctccatggctcctgcctgtaatcccagcactttgggaagccgagacaggtggatcacttgaggtcaggagtttgaggccagcctgttcaacatggtgaaacctgtctctactaaaagtacaaaaactagccaggtgtggtggcagccacctgtaatcccagctacttgggaggctgaggcaggaaaatggcttgaacctgggaggcagaggttgcggtgagccaagatcatgctaatgcacttctgcctcctcatttccacagagtgaggaaaaaaaccaaaaaacaattaacatattactctggggactgcagcccaattttgtagaggaaatgaagtgatagctctatcttgaggccttctagggtacttacttggaattttaaagctgggttgcagtttttctaccatatgatacaaatgggatcatctttgacatttgtcctgggactggatgcagtttaagcatgaggctgatcagagctcaggggctgcttacctgcagctgccagccactcctacatcccagcctggccctcagccctgggaagagactcctgggcttccaggtgttcactgggggagcaaagactggagatgtttaaaatattttttatttccgtttctgaaaaagtaatacatcacacagaagttcaaaagtaacaagagtttttaaaaacaaattatagaatgcagtactattctcctgcactttgatttttccctcaattaactgtgtatctggtagatagtttcatatctgtaactatagttaccctattctttataacaatgctgattattgcatagcatggattattttatgcaaactgttaggaccagtatttttacaagcaatcttgtgatgactgtctttgtccgtgagcaaagcctgtgctatggaagctcaactgggatgaaccttgttaatgttccatgttaatttcctatcttttttgtttgtttgttttttgagtctcactctgtcgcccaggcttcagtgcagtggcacaatctcggctcattgcaatctctgcctcccgggttcagacaattcttctgcctcagccttctgagtagctgggactacaggcacatgccaccacgccaggctaattttttgtattttagcagagatgggggttccccatgttgcccagggtggtcttgaattcctcagctcaggcaatttgcctaccttggcctccccaagtgctaggattacaggtgtgagccaccgtgcctggcctaattttctatctctttatcactatattatttcctgtagaatcttctttgtcttctgaacctcagcaagagacaataattgaataaattggaagccttgtgtttttaatggaggccagctggcctgagcaaaactgatatctatgtttatatctacaatgattcctcttttcttcttaaagtcacatatttagctatctccttcatctctcatgtaaaaagagaatcaagacaagtttgctgtaaagtttataatgacacagttcatgctccatttttgatggggagcttccatcaagaaataaagccagaattcgttttcacgaacgaatagcagccagaaagccaatagccctgaccttaccctgcagcaggcctgctttgtaaagctgacagcagtgttcaagggtgaaaggttggtgttggtctggaacagattggaaggggaggtgtgggcccatcaggctcagctgaccattacctccgatcatttatcactgtcagagaggagagggtgcggggtgggggagccactggaccactccccgctcagctgctctctgacagctgacagtgccccttgcaacctccaggcatacgatgtgccttcaagggacagtgtggtacatgcttaaggccgctgacatgttcacaaggaagagagatgtgctgtatactgtggagcttctctagaaacgtgtgccaccttctcttcgtgctgtggtgtagaactgcttgtagaaacatttaatgatgttttggaggcacacgttgggctccagagtgacagtatgacttgggtgataggatgagcaagttcctcggtgggccttatgccttaattacatccacaatacctggggactctgtacaacactgagattttaatgtggcaaaaccagcatggacagatgctggggaggaaggaaataactttgctgcttctgtgggtcaggaagcgaggcccctacacgtctttgaaggacagtaccttttctaaaaaatgtatttatttatttttattttttgagacagattatcgctctgtcacccaggctggagtgcagtggtgcaatctcgactcatcgcaacctctgcctcctggctttaagccattttcctgcctcaccctcccgagtagctggaattacagggatgcaccaccatgcccggctaatttttttttatttttaatttttttttttaatttttagtagaaatggggtttcaccatgttggccaggctggtctcgatctcctgacctcaagtaatccgtccacctcggcctcccaaagtgctgggattacaggcatgagccactgtacctggccaggacagtacctttataaacaagaataataagtatgatttgtatatgactctttatagatatgtttaacattcatcttcaaaatgtaaaatatgttttagactcaataggaaacacatgtcttagtataaaacaaattccttttggtctatagccatgtgtttcagtacacctactttcaacgttgttattcacaagggtgtcacaggcatcaggctgaaatacagattttaatccttaaaataaccttattttcattgtcatttatattctcaagattatctaattttggtagtcattaggaattacttgtgttaatagtggtggtgagatttcataaaagtcaggtggaaaatttccatcaattaatgtaatattatatgcttatcacagacgcctaagttagacatggtacttaaatgtggcaattaataaaagtattacaaaggtgaaaatggatttcttctaaaaatggaattaatgatgatggagtgcttgtgttgggaactcaggctagtctggtgcttgccggagatgcaggatgcttggagagctgcaggcagtgctgtcaacacagaggcatgtgttgacgtgtctgatcagcaaccctaagaagtgggtcgggcattgcgggctggtgaaggctggagagagggccagggttgtctttccgtctgtatcaccaccagtaagcactgtgcaaataccagtgttcaggagccacattctaactgtgatggggtttggctgaaatgcagatccccaggccttggtggggcagatatgggttcccaggtctctctgccaacgtccatccgccctgcctacacatgcccacctgggagttgataagcttgctcagaagccctctccaagacagggacagtgacttggccctgaccagagaggatgtcaaagaccagtaatacagctggtttggtttattctggaagtccccgaacagcttgagtgtgcgtcacttggggcagtttcttagctagcaagccaggatagttcaaggtgcccacaaccctgggaagaaaagggctctgctgcaccttcctgtgatggagcaggcaagcagccggtcatgggttgttgtcatggaagagagggtgactgctttctctttcctgctcaaagaaaacagaggagtgggacttagaagagaacacgtagtattttacaacttccaaaatatacccgataggggctaactttccttttttcaagcgttgctttcagtttttttttcttttgataatttattgattagcaaagaaatatttgcttaagaaaaatttgggaataaataaaagtataaagaaggaagcaaaatcacccataaatcagcatataaatcagccacgactacagcatcaccatgcttccttcttgttattttccttgactttgttctttacttgaggaggatactttattatttttttttttgttgttcttactttttccccactcaactccatatatattattattatttcctgatgccaggaaaaaagtactcatggtcatactttaaaagttaccatataatactgtatcttagaactgtgtcacaaatttattctccatgtgtggggtcattcagcttatttacagtttttctgtattttaaacagttctgttgtaaacatctctggaattctttgtctcaattctgattatctcctacagtagctatttataattgcagtgactaggtcgaagggtggaaatgcttttgacattcttggttggttgtggtagttgtggcagggtctcctctgtcacccaggctggagtgcaatgggacagtcatagctcaatgcagcttctaactactgggctcaaatgtttctcctggctcagcctccctagtagctgggaccacaggtgcacaccaccatgcctggctaacttatttatttattttttgtagcaatgggagtctcgctatgttgcccaggttggcttttggcattcttggtacctattgtcagactgctttccaattagattgtagcgtttcatgtgccatgagcagtgtaggagaaagcttgtctcactgaagcctggtcagtgctcggcattgttttcgcaagtttgccatttgcacgaatcaaagctagtctctcttttgagactgagcatctattgtgtatttatataattaacaatttatctgcataatatcagttcccatcattcctccctttgtctttggtgatgcaacctctgtcttttgcagaatcatggatgcctgctttgggagcctggagaaatggtttccatgctgtcttctagggccgctgggttcctcttgcactctaatgggggatccctctgatcacctttcttcactccccagacagtctgcagtctcagggaatagggggcatggtaggctcaccctaggccggtaggctcactctaggctgggttttttgtttgtttgtttgttttttgagacgcattctcactctgttgccaggctggactgcagtggtgcgatcttggcccactgcaacctgcacctcccgggttcaagtgattctcctgcctcagcctcctgagtagctgggactacaaatgcgcgccaccgtgccctgctaatttttgtatttttagtagagatggcgtttcaccatgttggccaggatggcgtcgctctcttgacctcgtgatctgcccgccagtttttttttaatgaataaaaagggcttgtggttggggcatctccattcagctttgccatcctaggcttgtagtcacactagtgggcttgtgcactgagcagacttcaggaaatgcagcaggcaaatcatgagaaggaagaatgccctctatttgcataatgctttattctattaaaaatgtgtcctcatccttatttcctcactctttgggctaaaaatcctctcttaggatttttcttaataactggttgatgaaatggagtccttgagtgtaggatctgtgaaatttatctttgccccacaacactaactcctggcacttatcaatgtggagaacatccttgccagggagtgaacatgagccaaaggacccgcctctaggtaccagcttatgcctcaccaaggtgggttactgtgctggctgggctttcagcctggcctgttctgcccatcctattgtgacctcttgaagctcaggcttgttcttctgcagaaagagctgggaggtatgggggttgcctggggaggtatgggggttgcctgagctgggcatcggctccattaccagccgggaggtgtatctccgttctgctgcgtctggagcaaagggagcgggccagatggtcgtggagggcggggttgactgcggggaggccgtggtcagagcaagaggataaaatcctgaatgacacctgatttgtttttcgtgctgtgatttttcactgttgtccaattgtcctctgtttttccatcacataccttttgttttgggggcagcccccacttgcatatggtccctggtcaccatgggggagagcagtgagctgccttccccttcacctccagctttgagagtaaatctcaccttctgggtacccacagcagctggggacatttgccttattcccaccatggccttcctgggggactccctgccttgctgctcctcatcacgggtcccagctgctggttgtcgcttgccttccaggtcagggaggagcactgggaattcctgggacacaggatgagtgggcgtagtggtcagcagggaggggagaagcccctcccagtgactcacccagcaccatgtttgtccccacgtagcctctcctgacatatagaacatgctgctattgggggcaaaacccactcttggttaacttgcaccttaaaacaccatatcgcacattgtaggagctgtgagggacaaacacaaccagaacctcagtgcccctgggcatgtatgactagaggcgtgactccatcctctctcagagcccctgccccagatttgagtgacagccacctcatccttagcatctgcggagaggacctgggcaggatcagggcccagaacgctcagtcagtgtccttgaggggcccgctgcagagatgggagtggctagtctgaggccagggcttgtgggccacataggaaccttacttacttcctgactgacttgtaccctgaaccaccatgactttgtgacctggagaaggagccacaaagaaacagataagaagagggactgtgagaccatattttgttggggtgttgacagatttttaccatattactgagataaatgcactttactccagccccaccgtgaccctcctctctgctgctcagtgtagtagcagctggattagtcagtagaaacacttgatacgtcagtccagatccctcaggagcatgcggtatgggttgggttggcatggggttaataacatgacccgatgagattgtacttcttgatgaccggcagttctgagagtttagtctgatccaagactcttccagtcctgagatgattttgtgtctagtggctaaccaggactcccaagatggcagctgctgttcctggaatctccagttaggtggtgtcccctggtcacccagtccccactgctttccccaccctccttacccagaggatacgaattttaggtgttcccagttgagcacaggacagggagctcatccctgattggtttatgcctgattttgcattattgtagatgtgttaccaagcagttttactgtgcccttttcaaggaagaaagtcatacaatttgaagtgcatgagacattcacaaaacaaaataaaaagcaatgtcagtatcatcttcttaagcttttgaacatgtccccccgatccccttcaacatccagaagttgactttgacccagtcttggtctaattaactgctactctgcaagcactgcgctctcaagatgaatgaaaatctgtttcttgtcctcatatcttcttggtggaggacacgtcactgccatcagcagaggttgtcctcccagagcatgtggctttggcatgtgccccttgtagcagagaaggggctggggcatgtgcccaacccaccagttgggaggcacccactctgctatggctgggtaacagatgtccctgttggagactcttgtgtctccatttgacactctactggtaatcaatagttagggctcaattaatgaatggcttttctgtttaataaatttgtttctgtggtgaaacatgccattgattttgaaacaaatttgtaaatggtgggttaggttcccaggttagcccacccttcccccatatcttactgaacctatacgaagggtttaaaggatctttggttctttggcccccaaatacttgccttagcagaatttcaatgagaaaatgtctttaaaaactccaccttggtttctaggaatagagctggggtcatttcttggttgtaaagaacttgctattttcccattgtggagtggaaagtagctctcagatttccccttattcttttatccctagagcaatatatagtgtgggggattttcagaggtttgttatcacagtgtagaaatgagaaggaaaatgacttcttcccctgtgccatctttgttttatccatttaaaccagcaatggcaaaatgatttcatcacacatgatgcctctaagcgatgagactctatgggtactgtgttgagaaaagattctgtgggcacattcagggatcaagaaagtatgctgtgtttgattagtgatgtctgccatgggcatggtcgtggaggggaggtgactaatgtttatttgccgttcctgaaacagacctgttggaaagtaaagttcacacaggtgataataccagcctaactgttatatagagtttgttatgtactggacactgttctgagtgctttttgtatttaattctcaaaacaccccatgaagtaagtacaaatgaggaaacttaaaatgaagaaattcttacagatgaggacacagaggcatgaagaggttgagtgactaagccaagatcatatgggtaggaagtgggagagctgagagtcacagtcaggccgtcttgtcctggatcgcctgttcttagccaccagttctgtcctgtctcctgcttgtgagtgttgtgcctgcggtccacaggactgatgtaagactcagctgtatttcagtagaaggtgcaaaatcacgttttaagaacctgttatctttgggcttcaggctctggaattaaagacaagacaaagccgccagggacctcatgagtgatgagggaatagcaagtgaactccctccaccttctccaattcatgcagtatttctggtctttccatctcagccagcactgcccacctctcagttgagactaggtaaatgggaaagggaagaggggttgagatttaaggagtggaatagaggagttcccttgtatccaggtcacctggctggggaaactatttctgaggggccattttcaatgatcattttatgtaaggaacacacgcatgtacacataaagatatgtaacagtcatgtgccacataacaatgttttgaccaacaagggattatgtatatgatggtggtcccttaagattatagtggaactgaaagatttttatcacctagtgacattgtaaccatggtgacatcgtagcacaacacattattcatgtatttttggtcacactgttgtaaacaaacctactgcactgctagtcatataaaagttcagcacattcgataatgtatagtacataatagttgataatcatcataaacaatgatgttactggcttatgtatttgctatactatactttttgtccttattttagagtgtgctcctgcagttataaaaaactgtaaaatagcctgaggcaggtacttcaggaggtgtccagaaggagacattgttaccataggagatgacagctccaagcgtgttattgcctctaaagaccttccagtgggacgagatgtggagggtggaagacagtgatattaatgattctgatcatgcttaggcttaggcgaatgtgtgcatttgtgtcttagttttcaacagaaaatttaaaaagtaaaaaatgaaaattttaaaaatagaagttttcaacaaaatttaaaaagtaaaaaatgaaaattttaaaaataggaagaagttttcaacagaaaatttaaaaagtaaaaaatgaaaattttaaaaacaggaagagcttatagaataaatataaaaatattttcatataattgtacaatgtgcttgtgttaagttatgttattacaacagtcgaaaagtaaaaaatagtttaaaagtttataaagtaaaaaattacagtagctgaggttaatttagtattgaagaaagaaaatttaaaaaacaatttagtgtagcctaagtgcgtgatatttataaagtccgtggtagtgttcagtaatggcctaggccttcacacccactcaccactcattgacttacccagagcagcttccagtcctgcaagctccatttgtcataaataccctagacaggtgtaccttttttttaaatcttttatactgtatttttaccgtaccttttctgtgcttatagatatctagatcacaaatacttatcattgtattacagttgactacagtattcagtatagtcacatgctgtacaggtcatagcctaggggcaatagactataccacatagccatagcttaggtgtgtagttggctctaccatctaggtttgtgtaagtgcactctgtgttgcccaatgacaaaatgacctgacaacacatagatttccctgaatatatccctgttgttaagtgatgcataactgtatatatgtatttttaatggatcaaataagttatctttcataatggctaaagagagattttttagtaccatttacctcactcgttaatttaacaaatactcatcaaatgcccgttctgtgtccatacgctgagagaggattatggaaatggggagtcagagagctacgacccctgccctccctgagcttgcagtctactgatagatgcagtccctgtacaaacagtggcataagtgcaaagtgctacttgggtgagtgctgcagaggaaaggcccttggtcctgagggatcagggtggctgtggtggatggatgagggatgctagtgttctgaccatgcaggtgcttgcaggccatgccaaagagctttgactgtggcctgagagtcatgggatgccatggaaggggaggaggggtcttggagtttgtgtcacatgattagatttttttccctttggaaagataattgtggctaccttgggaagaatgaattggacaagggatatacaagagttagaaggcagatgtcggagtccggaaaaaggggtcatgacatttggggctagggaggcttcggtaatgaaaaaaagaagtgagggggatgctacaggtgtctggagggggacagtcgctggctgtggtggcagattggatgtggggagtgaaggaagagaagggataaggacagttagaaagcaggagcatggcaggcccattcccaaaggtgggggatgctggcacagaagctggtttgggatgggaggacatcctgtgtagttttgcggtgttcagaggagatgtcagatagggtgcactttggattgtgaacatgtgggtttcagctgggccatcgacagaccttgatggattgtcctgggaaaccaactactgtggaaaaaatagaaaaatctataattttcatttgtttgaattcaaacattttcaccctagacaaaaagaaaagaatctaacaatgagaaaggaaataaataaaaataaatgtcttgcatagtctttgtgttttcatttttatgttcttctgccagtcttttcacataaatattcatattttaattagttgtcattatagtctatgtagaagttgtaataggattgtgtttccttaccattatcccaaatattttcccacatttctgtatctctctcaaggctgcatttaaaacatgttgggtaatattccattcatttgataaatcataaatggtaattttctaagcaattcctctacttttggatatttagttgattttaagattttgttattacaggtaatactttcatagatattatgtgtatcaccttttcttctcgtgtgtttttttcttaaggtgtattcttacgagtgggattcatgggtttaaagagtttggtttctgacttgtgatatgggtcaaggcaaatgttttccaaaccactgacagggctgtgaggcaagaacgaaagggcagatctttgatctccacacggaagctcagcatgtttatttgaattcagtaaccagtggtcctaaccagatcagtgaatgcttgacagggtccttccatcacacagctgggaccttccatcacacatctgctaattgtgccagttagtggctacagacctctataaggccactgagcccaccaccttgccctcagaaccctgggctgggttctcccttttcccaggctttttgcttgtaggaatgccacaatgactttacaaccagtggaagccccagaagggaactgatggaatccctaagggctacaggcagcttcccatgggtttggatgggtgctcaagatcttccgtgacctagtctcggtctaagagatttacttgccattgcttctcaaaatagcacctccactgcaccaagacagattgttctctggcccgggaagatgactcctggccctcactgaagttgctctctcacccttgcctttgcaaacctgacttctccttcggactccaggagtggcagcgccttctggcagcacatctgacttcccacccagctctcctgctacaattacctgcactcctgcagaaccctccgtccacatggcaggacttagcacataattatatgccttctttaatgtttgtttttgcagttgttatttcttgaagataactgtactctcctcgagggcaggaactgtgtcatccttccctagacccctccaagcgtggcttcagtgctgagccctttgcctgaacccagccaatccagtgtgacccattacatcaaagcgtctctgccgatgatgcagtgtgaagcgtcttagctatccttttcttttgtgttttccacataagtgctcctattcaaaacctgctgaggatattatttagaaaatgctcatagatggggaatactcatattgtctattgatcacagtttgggggttgtaagatcaagttaatgctggaaaacaataacctggtcacttgttacttccgagtcctcagtgtttactagggtgggaagggtgactggttaggaggacctgggtggggggataaggagctgtaggaggcactggaatatctctctggctcttaaggaggctggtgtctttggcctgggtgaacagtgcttgtactgtactgaaatgacatgttctgctattgtgttttttgaaaaattgctcccaatggaaccttgccctttttacttctcactttaaatactgagtgcatcagtgttctgattgttaggagtctgcagggggactcacccccagttcagcctggaagttggagctttgcttgttttttagagatggtgtggcagaagagggactctggctgggtgtcgggagccttcaggcccggctgggtctgtagccacccattgtccagctctgcacaagctcagacctcagcctactcatttataaaatgacatacctgaactagatgatctctaggcccttctgcaatggagatgaaaaacaaaataattgaagctctcttcagagggtaagcttgggtgcatttttaactcaaaggagaaataggctcattgacacatttaatgacatgtgttagtatgtgttagaactttacacttaaacttgcatttctttttttttttttctagccaaacatcatgtcaatggcaacagaacagtcgaacctttcccagagggaacacagatggctgtatttggtaagatatcaattctgaaagaaaacccaaattgtgtgcaaagactagtgccaaatttcttagttttagcaagtgttctcagggcttcaaaatctgggctcttctagatatttacaagttgttacagccaagaaaactattgagttcctagtaatttctggggttggaaaagcttattctatagaatttagcgtgctttattttctcacgttgacaaccacgtatcaaactgagtatttgctatttcttatgtccacactgtgaattaacctgctaatttagggtttgagtttttctttgctagcacggattttttttttttccacatagatatatcactttgttaaaggctggaatttaagtagttttgacttattattacacaaagattaatctaattgaatgatctcttccttctccatcatgaattaagcacgctccttaagagaaaacattaattaaaaatgttttcagcaaaggccaatccctgagtgatatacttaaaatgtacaattatgtggttgagcagaacttctctgttaaaattccaaactgtttggtgaagaggtcctttttaatctgtgtttccttccctccatgcctcatgtcatctaaacttccttcagaatatctctgcacatggccctttctttgcctgccttcttttctccattctttccttccttacctcttcttctgttgggcccatctcccacctcccctccccttctctctagcagtgctctggggttcatccctgtgttacccactgaaaatgacgacctctgtgctctggaatttcaactgggcattcagctgcctcccttggttccttcacctccacgtttagacaggttctgtgatgtctctcatcctaaaaatgtgaggtcccctgatttcacgcctcccgtagcttctctcctgctctggtcttgatggtaatctcctttgagggtacaaaactgctttgaagacttgaattgcgtttgaactggaaattagcctcagaacaacctggtctataaatgagcacactgaagttagattgttcccttattcccagagatggaaccagaattaggcatcagtgaggattagcagctgcagagtcataaacagggacccagttccacctcagtgttggtaaatcatgctctgtgtaggctatcaccttttaaaacatactgatcagtgatgagaaatcattatgcccagaaatttaaatggagaagttgattttgtagaaggcataatggcctctctaaaccatgtgctaaaacgtttgatttgctaactttcctgtcccagcatggtgtctgttatcatgggacagcaaatgtcacatatatcaatgttcaaaggggtcttttgatgatttatttatttattttccagtctctcagattcgccaaccccaggcatatgagaaactaagtcttatgtcatattgggaaatagtaaatgacactaacctattattagtgggtttccctctgttgtgatattgaagtaaaacttctttcttgaagggcagattcagtaccagatgggctgatgacattgtttgactacagaattcgaaataacagggaatgaggctctgtggcaagtctttcttttcttttctttctattttttattttattttattttattttgcagtggggggttgcagtggaaagatttggtttatagcggcttcctcaacattcttccccaaggccctcattgtttcactttcagcgggcaacttcccctctctaagcctccgcttttcgatgaggaggctgacaggtgaactctaaggcctctgcagctctaggcccttggcctttacctcttacgccttcaggactgaaagctcttggagcagggggcagcccctgggaggcccactgtgcatggccagcatgtgtggttttagaagagatgaatcatgtgcataatttctacaagttaacaacatataagaagcagaattctacagatgataaagtagaatatgtttgacatctaagaattcttactttagaagtgcagtttagctcttccagatgcttaaattaaggccttattttggttaagtatatgcaagcattttatattaatgtcttcaagatgatcctcactttctatcacttgtcgccctgggctagggtagagtaggggatttggggggttttgagggtggacttctgccattctgggttgtttatcactgcaatggaaaggtcaactcagcacagtgcttgactctttgggatacattgggcatttcatcctgccagcctcttgcaaagctgatggactcatatactcctcttcctagcgaggccatgtgacttatccagagccacttggccaaggaggtggttggtggagctacagtttgagcccaagtctaattgacctggaatctatgttcttgttgtgatgttccctgactctctctgcactggttcaaggaaccatgggaaggccttatagattcagggacacctttcagctgggtccacacacaaaagtatgatctgcagccaggcccatttagcaaatcgatttgtatacttgcatgccttcccggagtgctctgaaggagtcttgagaagtagcctttgctgggagaatactggttggagcaagatctcctacggctatcatgcttttccatttgaccacagtagcatgtattattaatgcacaggaggatgtcttacattcccttgactgtgagttcatcaaaacagtgatggcacttgtaattgtttagacccgttcttcagccttggaggtcttcatattttgtgataaaatagtatcactaattataatgtcattttttttttttttgagatggtgtcttactctgttgcccatgctggagtgcactggcacgatctgagctcactgcaacctccacttcccgagttcaagcgattctcctgcctcagcctcccaagtagctgggattacaggtgtgcatcaccacgctcaccttttttttttttatttttagtagagatggggtttttccatgttggccaggctggtctcgaactcctaacctcaagagatccgcccactttagcctccccaaatgccgggattacaggcatgagtcatcgcacccggccacaatgtcgttatctgttggttaatcatttgaatataccttacctttagaatgctaccgaaataagaactttgaaatgtaatccactctacagatgaccattgaacttccatgaagcttttagattagaatgtgaaatgtcaggaaagacagatagagtgtgggataaaggcattccagtgtgaaaaatgcatgaatggtcatatcaagggatcagagaatagatagatgattccttaaaaactgtcgctggcatacagtcttcacagattttcttatgtagcccaacagttagtttttctcctggtctccttttctctctggtttttctgcccccatcattcttagcttcctctgtggctctccctctcctctgcccttttggacaatgagaacgaaggtaataggcttggtcctccttgggggcttctcctacctgtgtgtgatgctgtctttcaagtcagtgggagccctctgcttgcaagctggaaaagtggagccacacattttgcaattacttcctgtctttgttcctggtagctgtgagtgcccccttggctctcacccatttgatctttagagcgcccgccctgtgtagtgggcatcattgtgctcctttataggcagacaaactgaggcacccagagattaaagaaacatggccgaggcttcctcaggtatgagaacatcttttgccaccctgctgggcctgtcttagaaaggttctctctggccgtcaatatcttaatgaaagtgacattccgttggccacggtccactctgtccacgtggagggccgggttccagcctctgcagaagtgcttgttctcagcacagaccagctactcattgccttaaaaatactccatagtcaagaagatgggtaatttcacgagaaaatcaaagcttactaatttaaaagggtggaaaatggagggcaggggattccaagcttaatttgtgaagattcttggtacaattaaaaaatattttatataaaatattagctgggtatggtggcatgcacctctaatcctagctacttgggaggctgaggcaggagaattacttgaacccaggaggcggaggttgcagtgagccgagatcgcgccactgcactccagcctaggtaacagagcgagactctgtctaaaaaaaaaaaaaatttaaactttactatctttgaacataaatttgtcatccaaactaggatacattcgagagtaaaaagagtgctgtgaacaattatactgaaataatgaaataatgagggataaacctggagggttttaggcaattaggatataatgtccccctttaacgaggttgtatattataacgtattgcaccaagaataataaatacacaccaagttaagtagaaatggaaaaataatgaacttggatagacaaagtgaacaaatggaaaaaattgcaatgacatagattggattgtatataatgtcacatccacactagtagttacgctaactttggaaattatattcaataaatattgttgtgttcttcctgaataacttcagtttgaaagttaatgcgtattcataaaacctagtttgtgatacttcaataagagtgagggaattgatctgattttacagttgcagttttaatattgtactaatactttccagggatgtagggtaatgaattctccattacttgagatattcagatggtagagtggtcatccttaaccagtttggaggtggggctatgtagcctttaaaaccctttgttctcaattactgagaattgactttgttttggaacactgaaacatttaaaaaaacattctgctaagtcaaaattctttgaacccatcattatttattttttaatttaaaagttttgtgggtacatagtaggtatatatatttatggggcatgtgagatgttttgatataggcatgcagtatgtaataatcacatcatggaaatggggtgtctgtcccctcaaacatttatcctttatgttacaaacaatccaattatactcttagttatttttaaatatacaattaaattactactaactatagtcaccctgttgtactatcaaatgctaggtctcattcattctttctcactattatattttgcatccattaacgatccccaccttctcctgtacccctactacctacccttcccagcctttggtaaccatcattctactctcatctccatgagtttaattgttttgatttttagatcccacaaataagtgagaacatgtgatgtttgtctttttgtgctggacttatttcacttaacatagtgttgttgcaacactatgttgcactatgcactatgacagggtctcattctgttttatggctgaggagtactccattgtgtacatgtaccacactttcttttttttttttttttttttttttgagacagagtcttgccctcacccaggctggagtgcagtgacgcgacctcggctcactgcaacctccgcctcctgagttcaagcaattctcctgcctcagcttcccgagtagctgggatgacaggtgcgtgccaacatgcctggctaattttctgtctttttagtagagacggggtttcaccatgttagccaggatggtctcgatctcctgacctcgtgatctgcctgcctcggcctccccaggtaccacattttctttgccattcttctgtggatggacacttaggttgcttccaaatcttggttgttgtgaataactgctgcagcaaacctgggagtgcagaggtctcttcgatacactgatttcctctcttttgggtacatactcagcagtgggattgctggatctgaaggtgtgaacccgtaccatttgggaactcacgtccaggctttttggtgaaaggtaagattctgcagtgagaaaccttaatgttgataaattgataccaagcagcaacagcagaagtacctctgcaaattctttgggttgtcgtgagtttttaggctcctagtagcctgatggcaatgtctctctgacctcaaaccactggaaaacatgttttccgggtcagattctctgaagattcttcaaacaagagtggggagcaaaagccaagccgaggacttaggaaaatgtgttttttgtcgcacggcacatctcttttgacagctaaggtgccgagtgttcgcgtgacctttttttgaacagctgtgtgaatggacaggtcccggagcaggggcccgtggctgacaggagcccagagacttgtccctctctggggtactcaccttcggcccctccaaggagagtgagatcaatgtaagatgaaccaatcacaagaaatcgtttcctgtctgacatgaatgggaggtgagttttgaatcagccccggttatttgtctgccagccaagaaaacaacattggaagcagccggcaatatgtcagacttcaaagggaagtgtcttggtgtctcactggcacatatccagcatgatgttggtaaataaccgagtcccggtgtggcgtatttctccctgaatcttgactgaaaactactgaagcccattctgtgaactctggaggggcagccactcattccaggaaaaaggccagaaagaatgacattgaaatgtgtttataattagcgaaacaatctaaattcacaagatggtcagaactgcaggctgctaactggtgcaaacttcttaaatggtagaacacttggagagataaaaataggccttcctccctgggtaatttgaagcaacttgagggggcaatggtcattggagacatagtttaagatgcattttattttatatatcttgtgcatgatttcaactttcgttttcttcttgagtgtagagaagtcagataatatagagaaggagaaagagacctttgaaaacctgtgttgaaaatctcttttggtttggaaagcattggctgggatggtgcagccacgttgacctgggctggtccagaaaagaacaaattatggagtcacagaggagggtgggttcatatgtttagagtatggaaggtggactgtaggttggaggatggcacagaatccattgtagaggggagtaagttagagaatgtttcatataataacactttacttgtatagagatcacttatccatgaacttctcccatttcggttgtaagtaagaaccagaaagtgaagccctcctcccacaaaaaggttatggaggagtctgtaaagaattcagaattcccaaaggtcactggagtcctgtaatccttgttgactctagacaagtttcttccgccttcttaagccccatctctcatctgtaacatgacaagaaaactgtttgccacctaggactgttgtcagagtgtcaggaaatgatgcattggccccttggcatggggatgacagaccagccggacaggtgctccctggcagaccacctgctctcctcactctgggtgagctgtgatcaagtccccgggagagtgacgccaacatcactaggctctatgggatccatcacctctccttcataacaccagacgagtcccgtaactcagggattttgaaggataacagacagcattagttgagaactcacctaatattggctgggtactgagaagcccatgttattaaactctctatcaggctcactctcaccatgtgtccaagtgagactggttgtttgcttctgtgtcaatacagagctctcagaaaatactatatttctcttttggcctcaactgtaaagctaatcagatgtggctaattttttcactttttgcagtagtgtacagcaaccacccacttgactgacgttttttcctttaagttttgacaacgagaaagatttattttacaaatgtggcggacatttcttaaatttctacagagaaaatacattcaacaggatgttcaggagaaacaatcaaatattttctattacttctctgttaattaacttttttaagaagagaaacataggtatagagaacaactaaaaggaaaaaagttactcattattaaatttaacccaactagcatttttaagaaaaatacggagcaatcaaggatcaaattcagataatataaaacctaatattatttttcttgttctcattctccccagccatttatcttgggacttgttataaaatggattaaaggaaaattaaaatatatgcaagacacagccaactaacatgcattagaattaggtaaatattaggccaaaggaaaagaaagtgaaatgaaatacacaaagaatgcatgtcataatcttacataatttataaaacttgctcataaatttggctctatgtttcctagcagcaacatgaagaaaaatcagttggttgcatgatggacttcatttttaaaaaattgtggtaacagatacataatatgaaatttatcattgtaaccattttttaagcgtatggtccagtggtgttaagtaccttcacattgttttgtacccatcaccaccatctagctccagaattattttatcttctcaaagggaagctccatagacactaaacaccgtctagtcctccttcccccagcccctggtaacctctattctacttcctgtctgtctaaatttgactactctagggacctcctatagatagaatcatgcagtatttacccttttgtgactggcttattctacttcgcataatgtcttcaaagttcatccatgttgtattgtgtatgaaaatttccttcttatcccattgtatctatagaccacatttggtttgtccattcacctgtcaatcaatacttgagttgcttccaccttttcgctgttgtggataaggctgcgatgaacctgagtgtacagatctctcttcaagtccctgctttccattcttttgggtgtatacccagagatggaattgctggagcatatggtaattccatgtttaattttttgaggagctgccatatcattttccaaaacggctatacttttacattcccaccagcgaaccacaagggttccaatttctctgtatccttgccaacccttgttatttatttatttttaaaaattatagccatcctaatgggtgtgaaatggcgatggatttcagttttacttactgattctaaaaatgtacacgtttgggggaatcacacatattttggattctggaaccagaaagaaatttttcaagggtacttaggaggacactatatgtactacaaggcatttaggcagcactgctgatggcaccctaggagtgagcggcgcgcaagtctcgtggctgtttgccacactgctcttctctttgggctcgtgaccctctccccacaagggactatttggtccttgcatctctgcaggtgctagcgtgcttgtctgctggctctggtttaacccagaagttaattgcgttgtatctaaaacaagcaatggaccagctgtcttctagaagattttctgtcaatatcatttctctcagttgagttttaaaaggtatttgttttttactttgcaattgtgaaagatttcaaacaaaaatacagagcttagtataatgaagccttgctcgctcagcttccacaggtctcagttatggctaaatgtgccttgtctacatccccactccctccccctcttctatcctagcatatttaaagcagatctcagctgccctatcaactcatccatgaatattttggtatatatctctaaaagataagatggattttttacacctaaaataatactttttaaatatcatcaaatctccagtgagtccatttcccctgttgcctcataaatgttttttaaaactgtttatctgaatcatgagccagatcgcgtatacattgcaattggttaatataaatagtttcttttcatctgtaagttcacccttctttctctctttcccttgctatttatttaagaaattaaataattcagcctgtcctatttcctttagtcttgaccgaacgatcatgttcatttgtcctcttgtattttctacaaaccgagagtgagagggctgatcagcatctgtaagtggtggtgtgtttcattcaggaggcatttaacacccggttccttttctatttatttatttatttatttatttatttatttatttatttatttattttgagaaagagtctcactctgttgccgaggctggagtgtagtggtgcggtcttggctcactgcaacctctgcctcccaggttcaagcgattcttttcctcagcctcctgagtagctgggattataggcgtgcaccaccacacctagccaatttttgtatttttagtagggatggggtttcaccatgttgccaggctggtgtctaactcctgaactcaggcgatccacccgtctcagcctcccaaaatgctgggattacaggtgtgagccactgcgcccggccctggttccttttcttttggtgaagttagcatccccttactgatcattgcctcagtccattattttcttagaaactgcaagatattctaattctagcattttttaaatttgtgagctgaaatatttctataaatagagacttctctttatcaactgtatggttactgtgagatccagtttgctgaagaaagcaggataagtggtgattttccttatgtaccattttgctccatgtatctgagcatggctctaaacgtgtattcccaagtgtcagtgtatatatggatagttgtttaagtcaaaagccatttaacaagggatagaaactgccttaatttgacggaatgaccattttcacttgggcgtttaaccagattattgaaatttgtaaccagttgggtgaatacttgaaaatagagccacagtacagattgctgcaacagatttgagtaaagcaagaagcaggcacactgtcaggtggcagaaggcaggttctcaggcaaagctctctccacggagcagcgatcttctctctcgttctttccccagatcttgtgaccaggggatgtgctgcagtgcaggtttgagtcctgaccctcagtagctcaggtttaaaaaagcaactccagagagggcctgagggttggaggaggtcttgcttctagatgtgcaatgccttcaaactgttgaaatgatagaaatggagaagcagtcaagaaattacaaagcctgctcagggatgctgcccatagcgaagattaacagctgggccatttcacctggagcgctttttcacgcctctgcttaatatcgtgaatgagtttgagggtagcagaagacactccccagagtggattttccatacttccagttctcacagaaggtgtaggtaaaactgttcgtggttatcactgccaaatttttggggattcaagaaggggagatatttactgacccacttcttttttaatctcatacacatctcgtgtatgtatttttgtaagtggtctcaaattcttttttggaacagtgttgtgtatgaataaggtaaataaaaataaaataattcccatgaatgaaatttggctgggtgcggtggctcacacctgtaatcccagcactttgggaggctgaggtgggtggatcacaaggtcagactgagaccatcctggctaacacggtgaaaccccgtctctactaaaaatacaaaaaattagctgggcgtggcggcggacgcctgtagtcccagctacttgggaggctgaggcaggagaatggggtgaacccgggaggcacaacttgcagtgagccaagatcgcaccactgcacttcagcctggacgacagatcgagactctgtctccaaaaaaaaaaaaaaaaaaaaaagatatttgttaggtccagtacaatgtacacctttttggtttttttttgtttgtttgttttttgttttcccctggtaggcaatcaaaatcaaacagtgccagttcttttttttcaggaataactggaaatgttaccactgaaagcctaagaagtgggattcagttgaagcaacatggttgaaccatgtggagaaacagacgtttagcttggcataccttaggcccaagtagtgtgaacagtgatgcaagaacctgtgaactttccctacattcttatgtacagagtcttaaaagcccacgatcattgtattattctatgtccataaccactaggtgttattaggaaaaacacttttcatcttcctgggtcatcagtgtcccagacttacacaaagaattatatttgaccaagaccaagtttccttgctgagctcactgaccttgggagcaacagtggtgcctgcagatggatgtctttctgatggaggtcccaccctatatccttccagatttcagctgggattccaacattcatgataatatggaaataatcagtgatacatcatggtagacattaccatgaagaaactcaaaacaatctttcaaaaatatgcttagcataagctgagtgaacacatagtcagatgtggccttccagaaccaagcctactcagggtgaatcagcactgtgttttcttaggaaaagaaattttattttatttttttgccatatgcctgttgtctcctaaaaagtcctttgaatcgcattcatgtttttatgtgatgacccttttccagtttcctaatttccataattctgccacttgtcaggtcacgatggagctgtttctagtgggagcctgcgtccatctttcttccagcacccttatatggattcagtgcttggtgacattcttattaccctttctttcaccagcattctgtttcctcagcatatgacctttgtcagggtggcagtgggcactcacattgggaagcatggaagagttttgattcatcttacaaggacattaagggaggaggactggggagggtcgtctggggaatttcaggaatgtgatgacactaggagcaggaagtgacagctacctgaggacagatgagcccagaaaccctttcccgttccttgctcttggctgaataacttgtgcctggcgggtgtgtctttggccaggcctcacactgacagctctgcagtacagatatgcagtgggatggccacatgatggggaaagcccaatagcatggagtctgtgtggggctctgctttcccacgtgcagaaaatgagagccgccttcccgagcaaatagccagtgcatgcttttatcctgctgccaagacataggtctgcagtgatgcataagaaatgaccagacatctgcaccaactgaatgacaaacagcttttcaattgctgtgaaggttttggtaactgtattgaagtttttgtccccattttttctcccatgtaagacatttttaatctaccttgcaatgaagaggctgttaaacacttgtaccagcaccacccagcttttccatgtctatattaagctacatattataaatatatatatgtatatatgtgtatatatacatatatatatttgttctttacacttaactctgagatgagaaaactaaggctcagagacattgacttccccagggtcaggctactagttaatggcagaactagttaatggcctggcactgagattatttattcacatgttcatcagatggtttatttattgcaacaggaaacaaacaaaaatctctagcagcttatactccagtagggtgggacagaaaatgagataaatatgtaaagcatatggcatgtcagattatgataagtgctgttgattaaaataaagcagggaaagagaataggaaatgctaggctaggttgaggggttgtaatttaaaataacatagtcagagaagtcatgaaggaaaaatacctgagacaggttgttttgcacagatttatggaaaaagtgtcccaggcagaaggaatgcaagtacaaaggccctgaggcaggagtggcggaggcctgtgtggctggcgtgtaatcagcaagggaggaggaggagcagctgaggtcagagactacgagatcatgaagggcaattcacaggtaattcgtgggtaattgtggggactttaacatttattttgcacactataggaagtctagagggtttaaggcagaggtatgacgtgacttttttttttttaaagccaccgtgagtgctctgttgaagatggcatatttaggttggtgagagatgcagcaggaataccacttaggaagctattgcctcctagttcaatacttttggcttttgaacgtaactacttttaataataatacaaaaaaagctttaggcctttatagaccttctcaaatgccatattttcatagttttgtaaggttttctatccctctgttttgagaatttaaatagcccttttaaatgacacattagcttggctattatcaaaaattcaaaagatggcaagtgttggtgaggactctcactgttggtgggattgtaaattggtacagccattatggaaaacagtgtggaggtttgtaaaaaaatttacaacaagactattatatcattcaacaattctacttcttcatatctaaaggcaatgaaatcactatctcagagatattcatactctcacgttcattgaggcactattcacaacatacaagatacaatgtccatcagtggatgcatggattaaaacctgcggtatatatacacaatggaatacgattcagtcttaagaaagaaggaaatcctgtcgttggcaacagtattgattaacctggagaacattatgctaaatgaaataagccaggcatagaaaaacaaatagtgcgcgatctcacttgtatgtggaatgtttagaaaagtcgaactcatcaaagcagagagtacaatgatggttaccaggggctggagagatgttggtcgaagggtacaaagtttcaattggacctgaagaataagttctggagatcttggtgactatagttaataataatacattgtacacttgaaaattgctaagagagtagattttaaatgttctcaccacataacagtgttaagtgtgtaaggtgataggtatgttacttagcataatttacttattccacagtgtgtatatatatcaatacatcacgttttacaccataaaattgtgtttgtcaattaaaaagtaaatttataaaaagtgacactagcaaaacacagatacacgtccttcctagagagtatttaggtattactattgctttacttgcaggtcaatattacctgcatttttagatagaatggtttgatttaaaccactcagaatcatgttgaaagtgtgcattggatctcatacaaaatgggtcacttcatgagagttgaagttgagaagcacttcagattgtacttctggtatacttggaatggagcacagggcaaaggaacattgtaatgtgatttagaatatgaaatcagtgcttgaaataagactataatgtatcgatgaagtacatcagcatttgcgtctatctcttaactcttttacctccacagaccactgggatagaatgtcagatattggttatcggccacatttgggcttcagtcagtgaatttgaagacaggtcagtagaaattctccaaactgtagcacatagagaaaaactattgttatggaatgaacagatcgtcagtgattgggagagaatggcaggtggtgtaatgtatgtgcaattggagtgtcaccagaagcccagacagatactgggacagaaaatgtatttgaggaaataatgaccataaatttgatgaaaaattgtaggggtgtagttaagatgaatgccaaatctagatggttaaaggcaggggtcaaatcaagaccatggtacaaaagattttgggtggggagaaagatgggtataaaacgtgaagacccatcttactcaaagaccgcccctgtttcatttccccactccgaattccttttagaacaaatgggttttggtgacagtgtgttcagatggaatactcacagacttggactcacacctgggttcaaatcccagctctacctaatctaactagttctgggtccatggcaaatcactatagtctgcatcctaggatcatcatttgttcaatggagatagtgatatctctttggcaaggcaggtctaaatggtgtagaatatgtacgttttatagggtggtgatgcgcacatcatagctaggcccttaacagatagtagcttcttctcccaccaaaccagttctttttgtggttatctggtgtcaccgttcacccacttagctataaaccagattaagaaaattacactttttacaaagggcgtgaagaactatggaaatgataggatcatctttgcatgttagaatgattgctccagcctgagtgtgaagaatggcatgagggtgtgagacaagatttgaagaaaccagattgaagtctctcgctacagcccacacacctcttcatacccttcccaaacaaacaacagtattctcctttttcacaaaagagcttgattttcctatttaaaccacagcctcaactattaccagaagaaaaaaaaagaccaaataaaaattatctgggtccccttttctcaagagcagagagggcacactctttaatgggttagagatgggggctggaccaggtggtagtcttgtgtatggagtccagtggacagagctgagagtccctctactgacagtccctggattcatcaccaccacatttctaagaaatctgattattacctccccatcagagagagacactcctcgtggtacagctgtgatcatatcattcctttgctggggaaatcttggtcactagaaagattcctgcactccttagtctgacatgtaaggttctgcagaacctaatttcaatctactctcctagccttttttaaatgaacactactactagggccgggcgcagtgggctcacacctgtaatgccagtactttgggaggatcacctgaggtcaggagttcaagaccagcctggccagcatggcaaaacccatctctactataaatacaaaaataagctggccgtggtggcgcatgcctgtaatcccagctactccagaggctgagggagtagaatcgcttgaacccagaggcagaggttgcaatgagccgagatcgcatcactgcactccaacctgggtgacggagtgagactccatctcaagaataaataaataaatacatgcatacaacttctcacccaacctgtgttgaggccttgtcatctcatcccttactctaaccactgcacaccctcccatgtattcagttgaaaccctactcttccttgaagtctctgtgactttcctcagtccttccccctcaacccttctttgtgcctttgtttatgggataaggtttatcgccttgcattatgattagagattgaatggattacccatctctgcctgtgctctaagctttttgatgatagggcctggtcttggattacttggggcctagtctcaaatataagccctgaatataaatacttgttagatgaatcacgttctttacattgtcgatagaagtgggaaaaattctttttattcataaatttaatttgcccagagttgcggaagaactaattttaaaagtttaggtttgaatagaggagcaaaaagtcatagagagggacttaaagaggaagtctcaagggaacttctgaaaacttctttgggctttagctgttgatgggccgatgttctttatggtgccagctctcgttttgatgtagatgtctgacgagcctagttttctgggtactcgttggatgagtgacactcggagcctcagagaggagggatgcagggtgcaggtgctaggtgaagggaactagtgtttactgaccatctaccgggtgccaagccatgctgaaaggcagagatttccaagggaggaaaatggttgggagataggaaagtgacagaggaagtattctatccatgccagaaagacgtaaggtgtaaatgactgtgtggcatgccataggaaaaaatgggaagtgtgaaattcctcagattcactgcacagtaacttggggaagagctcatgatgctagtcaagttatttcttagcctctggacctcatggttcctgttatgagatttggctaagctagtggcagggaaccacggcttctagtgttttcttcaccccatttctacagcaggtgactgttcaggtgactataggggaggggtcacatgtgatgaaaacactgagtatctcaaaccagctgtcttgcctaggcctcagttttgaatgtggtagatgaaaggtttaactttccactaatagccctcccagctctgctgttccttctgggatgaaatggagtgatccaggctgatctgctgatgttttactgcttgtcaagaatgctaagaagagggtccccttgtggctgcagattgctttggggacctttcatgaagatttcttcatctgggacctctttcccacatccatatgtcctacattttctcttaggattgagctagagctgagatcattctactatattaatcaacacctactgcagtgtcatggtcattggctcattggaattccatagatctcctacccactctagtagggaaaagcaaattgcagaaaccttagaaaagtcagtgcccatgaacagacacatttaggaaatagaaaattactaaaggatgcctcttcggcaaactgggtgccatatgtgtgcatatatgagtatatatatatgtttgtttgtttgtttgtttgtttgttttttgtttttgttaaggctttctttactttgccccaggccagctggtgtgcatatttgtcaggtcctgttagagctctacagctcattctcagcctgcctgatctcagccttgctctcaggtcctcaggaggagtttgattcttctggaccgtggtgctactggctatttaatcctttatcgtcaccatgtccagctagcaaccacttgccttccagcagctgggagaactgtgctggtccagggagctggttttgagaagcctgggcttccacgagcagaggtcattctgtctagagatccatggctcaccagtccatccctggggagcagctgtggctccactgtccttcagagatacagacacagtgaggcacattctgaggagagcagatagtgagtagatcctaaaatgtgttgaatgaggagcagatgaaggagcttggattctgcttggtgacgacgaggcccgtggagttaccagagttgtcttcaagaggtcagagtgttggcaggttgtcataaggaagaggggctaaatttgtcccttgtgacctcaagggagagaattagagtgaaggaagaaacataccaggggtttgattcagtgtaggaatagctttcaagctctcattagatctgtgaaggggaatgggctacttcaagaggcagagggtaatttgagctttgactgaacacttgtttgctgtaatatgaaaggggttatgaagatttccagggcattgaggctagatgagaaggaaggtcccttccaaccttggaattctgattcttgacccctcttggtaaatacatacctggtactcttcagagaatattcccggggttaaggctgaaaaatagcaatgtgtataaagaacctggagctgcattaatcacagtgcagaggtacagtggagtgtacacgtgcatatgagcacattttaaattagggaaggggctgaaaagaaaaattaatcaaattaaagcagcattaggaatgatgtggacagaaggtaattagttgccatcaaatactgaaaatatcaatcaaccgctaattgctatatggtttcttttattagcagaaggtattttcaaattttgtagatttcaatcaagagtagggataaggaaggtgtcttgttgcattatttaacatgatgtagattttcagaaaagtaaagagcacagaagataaattgaaatgtttacattttttgccacgtattcatcttccttgttcctagcatcgtagagctgaaatctgtctttgaatcccccctcccctgctctcttctttgctggatagctgaccagaagagacttactccaggccaccaagatggtgtctgggaatgtgtgtccgtggccagggtctggctgtctctcgtccactgagctacctttctagagttgagctcaggatatttctggtctctgcctatgttccaccttctgatcaaggacctacagctatccagctgtagccggaattgagggtccttttgttgccctggtcagaggtttcatcaaggtgcgcccttttgcctttgaagaggccagggagccgtggagaggagcaccttggaaatgcgctgcatgtggtttgctgtttctgtgcccctgactctacgtgtactttattgatatccagtaaatgcccagtacagaaaatgcacctctaatagggtgctccataaaattatgctcccttcccgagatccacgtgaactgcatgtcatttatcaggtgccactgaatctatgtaatgaataatttgatcccacagcaccatccttcaaaccctgtgtctgcacggggaggctgttaattcagcttgcttgcaggcatccgtagtggtccacagagaccagcttctgacgttgtttccagggaggtatagcagaaaggacgtcggctttgaattccaggccttccttcatgggaatccagagtctgccttggttctatctatgtctttgggcaagtggcctaacctctctgaatctctgttttctcatccttaagttggggctagtagcatcttccttgtagggttatcaccggattccacatatacagatatcagtgtgtggctcacagcaggcatttggtggatacaaactcatttattcctttcccttaacttcctttttcttcatactgtttcctagaaaacgatactcagttacttgctgtttgtagggaaaattttatttactcactgatcacaattgtaatgtcacagttaaagttgaggagaagaaaaaaagacgaaaaaagatcttgattctctttatcatttccttccacagagccatcagatcattctatgaccaagtgagatgttataaataatttagttctactcattttttacatgacagattaaggcttcagacatcctgctgtgtgactcagagacacacactcacctgcccttggttgagactaggtgtctttgcaggttttgggtgacaaagacctggctggtgatactgagcaggagatggtgagaaggtcaatatatgaagacgcattaagcttttgcaaagctgtgggttcagaagtagccattagagagggatcatctgagttgggtgataaccaaagagttttatgcttgagaaatggagaaactggctcaggaattctgtaggcagcgtccagagaggctgctatgaggctgcagtatggtacgtttcatctgaggactgggggccggctctgaggctgtaccacagcatgctgtgattctcagagatcagggtgaccagaggagcagctctgacctcgagtggactgagaggggatttagagggtgtgcctgcgcatgtggggagggcagaggtggtgcaggcagggagcctaagagaacagagtggacacgaacgcttactgagtacctcatagatgaaatcccctcagtgactgtgaataatattctctttactcctagtttatagatgagaaaaaaaagggttagagagtacagagaatttgcctgaggccacacagtaagtgtttcagcacgtaagtctgatggaaatatgccccattcaacacttctgaatccacgtctataatctaggaatttggaagaggaaagggagaggtgaaatgggagctctttttctttctgtgtttgactctgcattccccgtcctccccatataatcagtgaatttccactttcgaagcctcaatggatgggctgaattctccataaactggcattcttctttttaggaatccctccattatgaactacactacattgataaagatgctctgtgaaaatttcaaagtgttacagtttaattcagcagattttttccacccgaggagcctcatacgtgcaaggtgcaatgcatgctgtgctatgtgacagaatacagtgtccagggaggtgggccccatgttcagagttctctgcagagagggggttacagggaagccagcaggcattccatagggtagactatgtacgtgcctgagttaagggggtttggacatgctttggggttttaagaagagagctttgtatctgattgacattctggaaagacttaagggagaaggttataccggaaatggcactgggtggatgggcagggtttcctcaggtggagatgggggtgtaggaagtgaagtatgcacacagtcaggagggtggccataggacaaaggttcaggttggctgatggtggggtatggatgttagaacttcaacaactgccctcattttgtgggttataaaagtaatgcatgctcattacagaaaatatggaaaatatatgaaaatacaaaagaaaaccagaggcaaccattattccaatattttattgtattttcttccagactatctgtcagtctgtataaacatttttgaaaaacttcttttgacagttggaatacatacttcttatagaaatttggaataaactgaagagcaaaaagaagaacataaaaatcacctgtaatcttagtcagtaagattcttaagactgtttaagattcttgcatcttacctatttgtgggtttgttgttgttgtggttttaattgagatggagttttgctctcgttgcccaggctggagtataatggcgtgattttggctcactgcaacctccgcctcccaggttcaagcatttctcctgcctcagcctcccaagtagctgggattaccagtatgtgccaccacgcctggctaatttttgtatttttagtagagatagggtttcaccgtgttggccaggcgagtctcgaactcttgacctcaggtgattccccccaccttggcctcccaaagtgctgggattacaggcatcagccaccgcacccagcctgttctgtagttttaaagaaggaagatgacaggtttgaaagtgcatgagatggagactgactggaagggatgagaaaggcggcaaggagggagctgaggcgggcggacagggaggagggctgcagtgagggagctgaggcgggcggacagggaggaggctgctgtcaccgtctagctgggaaaagaaagtacataaaatttgagagactggaaacggtttcatttgagatgagtaagagggaagcacagaggggactcccagcttttctgtgaaggatctaggaaaatggtgatgctgtgaaaacagagacagaagatattggcttggtagtcagcttggtggtagctgtattgaatttcacgtgtcagggagccccccaggtggggatccccagcaagagttggaaatgcctgtcttttttaagctttctcaggtgggtggttaggggtttgacatctcgatttaagtcattctcagatggatgatatgtggtttgaactatatagaaagaggctgctctaagaatgtgaaaagggtcgggtgcagtggctcacgcctgtaatcccaacactttgggaggctgaggtgggcagattacctgaggtcaggagttcaagaccagcctggtcaacatggtgaaaccccgtctctactcagaatacaaaaattagccgggcgtggtggcgggcgcctatagtcccaactacttgggaggctgaggcaggagaattgcttgagcctgggaggcagaggttgcagtgatccaagattgcatcactgcactccagcctgggtgacagagcgagactttgtctcaaaataaaataaaaataaaaataaaaataaaagggtaaacaggaaagcgtgaagtgtatactttacagcaagctaaaacaggcaaagccagtttgttactttgaacagtcagcagctgtgacggcactggggaaagtgtacagtctcagggtggaatggctgtgccactcctcctatccagcctaactttctaggatcccaggggtggaggctgccctggaaattgttgtgtacgtggctgtgttctgagtgaagtctaaaagcaggggaaagagctggaagagagggagcatttggataagacactgaaggaacatgcggtaactgcacatgttctaatgggagcccagcctccctgttggtttccactctgacaagacagactgctcttcctaccccatctgttgttggagggtttgttattcagtggtacccttagtaggcagaggtggagagtggggcattctagttaacaggagtgtgctagttagcaagagaatggagtgtactagttagtagaacttgccctagccaatttatgtagtgaacccataggacatgtcagatctggaaaactgcctttcatgagtgcggaagatgtagtggtcggcctcttaggtatttttagagaatcacatttgaacaatcacaatcacagatctttaccagtcaggtcaaaatttgcagtgtcaatgtgtttggaaaagggctttatgaaaatttgaactttctttaaggttcttcctgaagatttcatatgagaacccaaatcttaagggaaactaaaatctcataataaaaaatctcatagacacagatattcatgagtaatgacagattaaaattgtgagtagaaatgcaggaatcttaaggtaattctaaataaaaacaatccagtaggactattggaaaattcttaccaagtaatgattttgtaatgattgtgtcaaaaatgtaaatttgattcagtgacacagttgtaattttgatatgttctttaagtctcttaggtgcttaagtcatgatgtaagtttgaatatttttttccttcaatttaaaactttatttctacggaatgtagatgtccttcagaagttcctaggggaggtggtggtggtgacaggtaaattcattgtgtctatgacttccaaaggccagttttcagaccactgtcatcagtatcaccttaggttaaatattttgtaaggaacaattcagatatatcccggaagaggtaccttttatgctttagtccaggccctctgggttttacctgtttcttgttgtagccactgctgcagcagggaaccctggaaactctaatcaccttcgtgtaggtacaacttgaaagtgcttctctcttcttgccttctgcccaaggtgacacacccatgtgtgtgcaactgtgaaaatgagcctgcaaactcaaattctaaagaatatgaataatgcaaagaaaggaggcaacaatatgaagaaatgaaatataaattgactcgagttaattttttataacaaacaaaagcattttaaaatgtgtgtttaggatgttcaaagaggtcagtgaagaaataataaactatgacagaaaataggcaaaataaaagaactaaatataaaacttggaataaaaaatagctactgaaataattccatacctggaactcttagattgaacccagttgatgaggaacttagttaatgttttagtgaatagttctgatgcacatagagcaggaaaaagaagaatgtatctatcaattaatcagcagttaaatgacacagaggataagttgagatgtgtcaactgacatgtaaagggagttctggagaaatagaattgcgagaatagtggagaagcaatatttgagaatataatagctgaagactttttagaaatgaagatgtgaatcatcatattcaaagtatattttaagccctaagcaagataaataaaaatgaatgacatctagatttataataaaccccagaatattaagaataatgaaaaaatattaataactgtagaaagaaaagacattgcctacaaagaaatgaccatcagactgacagcaggcttatgagtgccaatgatcgtgagaagacaatggagtaacatcttcaaagtattgatgaaatgtatacccagctaaacttacattcgatagtatagacataatagaaatatttcagatataaaaagacttaagagattttataactcatagacagttactataaaacccttttaaagatatatttcagtaagatgaagaattaaaggagagacctgaagcataagaaacagtaattagttaaacaatgattaaaatgttgatcactgaagcaattttaaaaaaataaccctctgtgtgtgtgttagaagaaaataaaaaaggcaaatctttacactgcggtaatgagatagagattgttcagtgtggcgggttttgagtttgggagaaggttagaaatactaactttagacttggtttggaaaacatagtgaagtgggtatgtaacaattgtaagggtaaacactagaagaacagatttttttttcgttttgcctccaaattggccaagggtcaaaggcagtcagaaaagactaataggagagagaaaatgagggaaaagaaattaaaggaagaggatggtaagtagaaaacacaaaatgaggttatggaaagaagtttaaatagccagagtaaatatattaaaattactaattagaggaagagattatcaaattggctaagaaccaaaatcctgttatatgctgcttacaagaaatgcacctaaaataaagacacatggaaaggttaaaaaagaagactgggaaaacatacgcctggtaaatgaatacaaaaaaggtaatgtaggtatcttaatattagaaaaaataattttaagaacaaaagactttaatagcattaaaaatactaaacaataacaaaaggaatagtagcaagaggataataagacttgtgtatgctaatagcatagcctaaactgtgtaaaagaaaaactgacagaactaaaagagaaatcaaaaaattcacaatcacaggaggaaattttaattgaatctctaagaatcagatgtctcaatttgccagaaaattaaacagatatagatgatttacataacaaattgataagcttgtccataaatgtctgtaaaaccctgtacctaagaaacacatagagagaaattttatgcttttcaagcacacatagaatagttacaaaaattcaccaggttgtaggtgacaaaataagtctgaacaaatttcaaaataatgaagaccacattctctaacatgatgcaatcaaatcggaaataaaattgtgaaggtagtataacaggccatatgtttgaaagcaaaaatgtatacttttaagtaattcatggattaagaaggaaatgaaatggaaattacatcagaagagaatggcaatgaaagtactacatatctatacgtgagatgtatctagaacaaaccttagaggttaaaaacatgtattagaaaagaacacttgaaaataaataagctaataattcatatcaagaaggtaggaaatgagcagactaacagaccaaaaagtaaactgcaaaacaagataatagtaaagaaagagcagaaatagaaaacagaaaggaaagatgataaagaggatcagtgaaacccaaggtttgctctgcaacgaaaacctctaaaaagagagatataaaaatatgaatacatgacaatgaaacaaagcatcccctaatgattctcttccttctctccaaagtccaggtgcttcaggaaattttattgtaacttcacggaacaaataattttttttctaatgcggtgttacataggagagaaaataagaaaggctagccaaccaattttctgaggccagtataaccttgataccaattctggacaaggacattataagaaaataaagttataataaatcttcataaggaacgtaaatgacaaaatctgaaataaaatagcacaggtagttcagtgttaaaatgctctatgagtaggtaagatttactgaaagatgatttagaaaaatctgttaatgtaatatactaccttaagagattaaaggagggagaacatatgatcatctcagaagaaagcatgcattgttaatattcagaactcatgcatgataaaaagcttttcaaagtaagaatggaaggaaactttctcaacctgataaaggatatcttgcaaaaacctacagtaaatctcatatttattggatccttcccactaatattaagatgagacaaggattcctagcattgtcattattcagcattgtatggaaggtcctaggccaatgcaatacaatgagataaaggcaggagaataagaatgggagagggagacagaaaactcatttgtacagaatataactttctgtataggaaatcaatgagaaggtggagtcaaaccattagaactaatagaattctctactctttctggctgtatggaaggtatactaaaatcagggtgtttttatacaccagcactaagtaatcaaaaagtatagtagaaaaaacagtatttataacagcaccacaaatcatggggtacatagaactatatgtaatacaaatatttaagatctttattttcttgcgatggagtctcactcgctcactcaagctagagtgcagtggtggaatctcagctcgctgcaacctctgcctcctgagttcaagcgattctcctgcctcagcctcctgagtagctgggactacaggtgcacgccaccacacctggctaatttttgtattttttagtagagatggggttttactatgttggccaggctggtcttgaactcctgacatcaggtgatctggctgcctcggccttccagaatgctgagattgcaggcgtgagccaccatgtctggccaaatgcttaagatctttatggagaaaattataattataacatggtattgaaggacatccaagaagacttgaataagtggagagctatgttattgttttcatagtagtaaaataaaaccttgcgtaagtcctcattctaccacatgttaactaaccctctagctgatagtacaaacactcactgcgggattttatttataagggctctagaataaaatatgagttattcacactaaaatcacctgttaagtaatattctgaactagttaatgcaggttttcattgtgttgtggttggtctcataactaggttgagtttttctcctctgctaagaggaaacaatactgaagttgtttttcttgtggcatttgtattataaaaacttggtgtgggggtggagcgcaaagctccagcccactgaatgtctgccagttaagatgatgttgggttaggttacatctggctactgtccggggaaaatcacttttatagagatgggcttccaggtggttttaaaatttatctttctattgacatttgtaggtcaattatatatgttgactaaatttacaaataaacttgtgtgtccaaaccaaattactaatatgacaaaatatttccaaattcatctaagttcaataaaattctatttaaaaattttaaaggatatgttatggaatttgacaagctgatattaaagctgaatagtaataggccaagagtaacaaagaaaaatttgaagaagtataaggtaagaagacttactctactaggtattttgactcattaaaactagcctgattacaaccgcctgatcttttcctacacgtctgctccatccacaaggttccccacttaagccagtaatcttcgagtcagccataaccctctctttctctcaaactctgtgtcaaatctgtcaggaaatccttttggctctatcttcaaaatatatccagattctaatcatgacccatgacttcctccaccaccacttggtctaaaccaccattatctctcacttggattacagccatagtttcttaaccattcactgcatctgtgcttggttcactctagtctattctcaaccgaggacagccagagtgattttgtaaaacataagttttatcatttcctctcccgctcaaaactccaatgtggctacccattttactcagagtaaaatccgtagtccttaaccatcccacaaggtcctacactatctggcttatctgatctttgtcctgctacttcctccttgtttattccactcaagccacactggcttccttcctgccccttagaaatagcaggcacattcttgttgcccctgtaggactgctttctctaccccttgctggggatatctgaatgggtgagtgcctcactgcctccatggctttgtttgcagtcaccttcccttggaggctcaccctatttaaaattgtgctttcccagcccacctgatctctctgacctgctctgcttttcttttcattttttatagctcttgttaccttcaaactatgtcatctacctaggatttttggtgtttttaatctttttcccactagagtatacacactaaacagggtaggatcttgtttgctttgttcactcatttatcctgggtgcttagagcacttcctggcatatagtaggcactgaaaaaatatttgttgaataaatgatgaaaaaacagtataggattggtgcaggaatagacaaatgaatggagcgtaacagaaagcccagaaacgggactacttacaacgatgtcatataaaggtaacattggagataagtgggagaaataatggattatttaataacaatttatttgggattcttggttatgaatatggaaaaaagtaaactgaatccccacctcaccccctacataaaaattatttccatatggtctaacaacctaaaattaagcttaaaattttaaagcttctgaaaatataggatattatctttatctttatatatggatggacttcttatacaaggtacagaaaacataaatgataaaggaaaagatagagaaatttaagaacattcaaatttaaaacatctgtatgacaatagacataagtgaagggaaaagcaaatcagatatgaggtaatatctgtaatcatataactggcaaaaaatagcattcaaaacataaaaattgcaacaaaccaagaaaaatagaagaacccaatagaaaaatgaacagaggcactttataaacgagtgtacgtgagtggcccatatactatgtgaagagatgctcaacctcagtggtgattagctatgtatatgacataatttttttttttttaagatggagttttgctctgttgccaggctggagtgcagtggtgcaatctcggcttattgcaacctctgcctcccaggttcaagcaattcttctgcctcagcctcatgagtagctgggactacaggcatgtaccaccatgcccagctaatttttgtgtttttaggagagacggggtttcaccatattggccaggatggcctcgatgtcttgaccttgtgatccacctgccttggcctcccaaagtgccgggattacaggcatgagccaccacccctggctcgaaatatgattttaagcccatccaattggcaaatatttatatactttgtaacaccaaatgcttgcaagggtgtggcacaacagagatcctcctacactgcttataggacgattgtacctggcaaactccttttgcctacttgtccctgtagcagtgatcccagagtgcccaggcaatagctgtatcttataactcaatggagtcttgctatattcccagataaaagtgtactgttttggggactaggacctctaactctacagagccaagagtgtgggaacaaaagctacaaagtctcccaatgggtccctgagatagtaaatgaagtcaatcctgtttctctcctttgctttccaaacacgtgtattattcatttggggaacatggtgtgtccctacctttggagtgtttgattcagtgtcctggagtccggcacccacctgcacagtttgttcactgaactggtgctgtggctgtgccttggggctattccagtgctttttcaggacggcagttcctggtgacgtgcagtaaaataaaacaggtggaaaccagctgtgggctcactgctgcattttccttgctgcaaagtgagttgcttggtctgatggatgttatttaggggacagaagttggccaagaccctgaaggcaggaaagtcaaacacgtgccaagaatacatgtatgtgagtgtaagaacacatcactggccctttcagcatggaaggggcccggtgtaatcctttgccaccttatggtgggttggtcctctcaaggagtggtgctgtgtgaggcacttggtgacagtctctgttgctggccatttggacatttggtggtggcagtagctaggtggaccttggtgagcgggtgtgcatgctgttgggccatgtgtaacctatctctgccattgtggccagttcgttcctgcatccattacgcaggtactagggtagccagtgaagacactggctggcatcccctggctgggcccctttccatgctttgtggatgagtgcctctttcatggtagatgccctctggctggcattatcatgtggtaaagagatcttcatgctgcatactcactcccacatgtccacctatgtctctctaccccagatttcctaattcttcctcttccagtctttgtgtttctggcctctgactaggcagccaagccacttgctgctgcccttgagtccacagctgtcctgaacttgggctattcttccctctctgaaggaaccagttgggaggatttttcccttacccctgtctttcctggccactctagagtaaggctgcagtggagctgccctgcatttccagcctgcacccatataacaaaccaaccattcaacaccccaccccccgcacccccatcccccaaatcggcctttctctctgcccccagctggttttacaggatcgccacacagccgtaggtgcgaagtgagggagggagttggtgcagcctggtgggtgctgggggagtctggcttcctattcgtgcagctcacgcgtgccctctggtcctgcttgtgcatgattcccgatgtacaacttcctctttatgatagactgtggctgtagccccttgaccttataatctggtgggtctgatgggacttaccttttgatgggaaatttcagccacatcatcccctagtgctccatggctgccatggtgtgcactgtgcagtgtgcttcattatcacccatgtcatgatcttgaagtgctttttcccattaaactaggcttcttggtgaaatggtcgattctgggactggggtaggaaatgtgcaaggtgagtctgggacatcctgtcaaaccagagagcaaagaagctatgagacaactgaggagaaggagccaatttgaagagggtctcactggccaaagatatgactgctgaagcttacatgagagcagtcattgaaacgatcaaatatgtttaaatgaatatgtttgtgatgatgtttaaaaaactcttcgattagcctgggagatagcaagttcgtcatcttgaagacactatgtaaatggatgaagcaagcatttatcttccctgtcccatgtgaattgtaccactgagtaacaaagtagtagctgaggggaagcttttcattataaggtatgaaaatgaagtgatagaattagaagatcactattttgcaactctccaggaattaatacatctaggcattgagcacccatcaatgctaactagacatgaaagagacaactagacattttgtgctttctaatcaaagaccatccatagccccacctctagtcttgccagaggatcaagtctgagtctgatgaagcctctggatccaattgtcaacttgcagaaagttgtcctctgaggacggttgtgtgaattgaattgcaccatgagaacacagtcctcagaatccacagtgtgagaaactgaacaggtcaagtagactgtgatcttcaagggataaggtcaaaggaaaagaatggagacaatgtgttgattaaaatgacttaaagacagccggatgtggtggctcacgcctgtaatcccagcactttgggaggcggaggggggcagatcacctgaggtcaggagttcgagaccagcctggccaacatggcgaaaccccatctctactaaaaacacagaattagccgggcatggtagtacgcgcttgtaatctcagctactagggagggtgcggcagaagaattgcttgaacccgggaggtggaggttgcagtgagccgagattgcgccactgaactccagcctgggtgacagagggagactccatctcaaaaaaaaaaaaagaacttaaagacgtatcaaatttaaaaaaatgagcaagactataatgtcaggggtggacacttagatgataaagtgtaagaaacataggaagtgattactgtgaaagtcagataacggttgctttttgggctataaggtttctgttgggattggagtgtagcacacagggaggcatgtctagggtagatggcaaacttctgattcttgacccaggtggtggttgtaagggtgtttgcctaataacagtgcattgaaatatatgtttgttttgtgtggtttttttgcatcagttttgttttataacaaaaggctaaaaataagtatttaaagaaaatagtgcatactatattttatttgctgatattcataatgatcaccagattattgaaatttatgagtaattttgctataaataagcctgttttctttgtttaaacacacacacacacattttcacactcacaccttcaaagccacataatagaatgtttagcttaaacctgcagccgctagttgaaatgttgcttcatggagttttatcctcctaacaacctgtgtcctaagtcacattcctctccagaaatgtggacattgaccatattccagtccctgagacgctgtttcagccacacgtggcaccccagacccttgcccacctgcatcctggtcattcatcctcctcctcatggggtcatttcttgatccctattaagcattaaaaggggattaaatatctctctacttgcagctaatgttttgcttggtttggccaagaacattttaagttttaaaaacctggggctattggagtgggaccatgggcaaaggtcaggacaggctagctactaaaatggcctgccacggaccttgtacgtgaaggttgaaggattctggtgctctctggtgccatcgctgttagtcgttgtgcagcacagaaatattttattcaacaaactctgcagactcctgaactttaggggtgggctgccttctgcctggtgctctgcacagatcctggagctctcgtggtcatttatgtgcagtgaagctgctccactcacctacagcttgtccttttccagagaatccctatcatcctcccctcatcccaaggaatgcaacaaaggaaaattaatagtgaatgcttttgccggagacctgtggatacttaatttttatagatactcaataaatatttatttatattcactagcagcaagcaattcacttgtaaactggtatagtggcgggtaacataagcataagcagattcttatgttatttctttgaatattttgcttttctttaaaaatgtaaattttttattcttaaagtaataggaatttattacagaaaaatttgaagaatgaaaaaatattcctaaattgtcaccactgtaatacagtagtggttattatcactttagtatacttagtatattttcttccagtctaattttggtgtgaaaatctttagtagttataataaaagtgcatgtaattgtgttttttcctttttactttagccttaggtaattatgatatcacaaacatatttccatgttgcaatattatcacaaaataattttttactgcattaaattttattatttggccttatatttttattttaacctatttttgattaacacattttagcaaatagaatatctttgtataatatataactttattcaaattactttttgggttttgttgctttggatttttagagtagaatattaaagagtgtcaagaatttcagtaaacttctaatttatctttcagctctgtcgtcaaatctggtaaatcgagtgagtgtaggagtgggaggtgtatagtgtatattaatttgccaactgttgttccactcaggatctcagttatacgtaacttcataaagccatataaaatttgagtgaggcagtaatcttttttacatctagaagtgggccatagaacaccaattgtactggacagtttagaaacttatggtacaaaatgaaggttctgtatttggagcccaaggaagtgcatggcaacatttgcgacgtgcgtgagtgtgtgtgctcttgggagatgggttgtgattttcatcagatgttcaaagagatcctgtggccactggtatacacacaatgtttgctagttgaatggagtgctacttttgtgagtttgtttattgttgtcattctctccctgcctcccttccaaacccttctcctgcgttcattatatccagaaataaaactcagaaaaatttacttttgggtaagcagtgatttatcacatgcaagtttatagtgattaaaaaaatgaaaactaaacacatatgtgacattgttaattggaaatatgcatgaatttatgttgattttggaagttttcacattaaaatgggtaacttagtgctatactttggtaaaatatttttttaaaaatatgtgaccagggagtggatcattcagtaaattttctattgattcaagttatgaattggatgtggaaatatgaaaatagttacccccttactgtgttatttggaaatgtgtagatttactaactcctttaaatttgaggccttctaagtttttgcacagctaaagcaaagagatattctatgcaaataattgtaaataaaattatttaccaatgttaagaactctccttctttaaaagataaaatcttagtcatttttggttatcaaatgacaggagcaactttttttttttcttcatgtaacaggtgtatgtggatgtgcaatgaccactttgttttgaataatcagtatcctttttttttcttttttcttttttaaggaatgggatgtttctggggagctgaaaggaaattctgggtcttgaaaggagtgtattcaactcaagttggttttgcaggaggctatacttcaaatcctacttataaagaagtctgctcaggtaggaagaatttgctttattgtattactaggagaaacaagggagggcttgtcactactgttgggtgacaggctctttaaaatggaaatatgtttttttaaaaatgtttcttcaatctttattatttgtatatatatacttgtgagcttctcactttatatgtttagaagatgataatcttcctgtggagtgcaccatttagcttttgctgtggaacaaccactctaaaacatggtggcttaaaacagtcattttattagcttgtaattctgatgatcagcagttgaggctgggctcagctttatggttcttctgttagcctcacctgggatttgctcatgtggctaaggtcaacctgtgggttgcctgggggctagtcagcctaggctgctttactctttggcctggcagttggtgctggctgctggttagcactaactgccaggtggggtaatggggatgatggaccatatgtcttcagcacactggcctgagctaattcacatggtggtggatgcagagaacctaagagcagcaagagaggatgaggcccattctctgtttgtgttacgttcacttttataccattggccaaagcaagtcatatgcgctagctagaccagagccaatatgggatggctccccaaaggcaaggatataggaggtatcaagaatcgggaccattatttcaacaatctaccgcatgagacagacatttcagatactggttgtgttttctgtaaggaaaaacactgaaagccgtgctataatgcagggatcagcaaactattgacttgactcataggccaaatcccacttgctgcctagcaaactattgacttgacttataggccaaatcccacttgctgcctatctatataagtaaatttttgttgaagcacagctattctcattgttattattatatattatctatgagtgttttcatgctacagttacaagagttgagtgcttgcaaccaactatgtggtctgcaaagcctaaaatatttaccgttgggtgctttacaggaaaaaaatttgctgacctctattctaggctaacagggtaggcagatgccctcatggcaaattctgtctcgaataccagattacctctctggacttgtttctgacctaaaggatttcctttcctttcctgccagctcagatagcatttgaaatgtttttctaaaaaaaattatattcaccattttaagaggtcttaatagggagggagtatctggagttatagtccactattattgatgaaaatggggtgtaaaatgtaaacagttttatctttctaaaataaagtcttaaataagtgtggtttgtggaggatgcgctcagccctccaagggcaccatgaatgatggaggggaaaagctggagtttgggagcttggtgaatagtgagcatgttgatgtgtttgctacaatatgaattctattttgaaataaaaattgagctgtacaacaatgaaaatattataaaaatgtgcatgttcttattttttcttgctctagagaaggattgaaatattctgattcgtatggagaatgtggtgtaacaaacaaatattttaatggttatcctatttttttttaacttctgtttcaaaattaaacgcttatgcatagctataaatagactcaaatgaatcctggagatcacccaggtgtatcctctcaagtcttaggaatggaaatgagtagattccttcctgtaattccagacgtgacttaatggcctaagagaaaaaggttgctaagaaaacctccaagtatctattgctttatacctattatcctcaagcagcaaaatgttaacaatcagttagaatattgtgattccttgtttgctcgaacccttttcagttcagctgtttaccttaataacaacatgataattgccatgtgttaaactcatgctatatgccagacactgtaataagcactttttctgtctttgcttttctctaagcagttccatgaagtatgtcagcttctatcttttacagagggagtgtagaggctcagagaggataaataacttacctaaggtcatacctagcaggaatccctccctcattagctctcagctcaaagtctatgccattgaccatggtgtaagtctcccagctgtcatcatatcccagccattctccattcatccctttgcactttcttccaccaagtcacaaattctctttcatatatgtccctctggtatatttttaattatattagtgtgcttttaaatgattaaggagaatgccaaggaaattcttttgtctttcttatgtttagaaggaaaaagggccaagccagttcatgcaaacagctggtatgttagaggcctctagcaagtggtaaagtatggaaaccacagagactggtaaagaactcgattggatatgaacactacctgctaagttaacagtagcattgggaagcatggttgtcatggaaacttgttcctgattggaaagggatagttatagggtcttacccatacacagaaggagagacgatttctttccctaggcttttttgttgttgttgttctgatcataaaagggaaaaacaaaaaggcagagaggagctatgatagaaaggtccctctggcacagaagtggtacagccttcagatccctgggaataacagggaaggagaacaaataaggtccctcgctagagtaattatggtaactagctaattaaagatttttgaccaaggagaggggtgggggagacataaagcaggttacactggcgggcctcccctctgaagcctctggtgctcaaagccttgctgaacaagtcagccctggagtggtctgacttaagagaaggaaaataaacaaacaaacaaacaaaaaccccaaggctctggtaagatgcatagtaattgctgaggtccattgtgggagaaatactagtctgtactctagtatctgcttgcaattaagtttgtaaaactttgatcacaatccgtgaatattttgtaaagatttttacttttattttgtcaagaaaagaagcatagagacctggattgtgtgcagattccttctctcataaagcggtatgcttgagcttaaggtaccatgtggtttcttggggcagatgccagaaatataggaggaggggttaacagaatccacagggccagctttaccaccgctctgtgcaacctcttatgtgatgacgcacatcagagcttccacaagcattatctcagcacacaggtgggtgaacacaggccaaggaaccatcggctcaagtttgctacccctgctgtgccagtgggtctgcacagcctcaacaggggagaagtgagcgagagagtgtggatgtgagtgtagaagcagtgtgtgtccagagagggtgtggattcatatccgaatggtatttctatgtggaaattgataggccagtgactctgaaccccaaatcggagttgtgactaggcatatagaaaagataacatggcttctcatagtagctgagagaggaggtgtgcccatcgtgggctcactaatggggctgttcatggtgggcagtctccattgcttggtgccacttgcacccgacatgcgtagagaatacaagggggcggtctcttaggaatttagaataaagtcgcccattgagagtggcagtataaaatcagcctgctctgaatcacagtggagatggacagtcacttggaagagagattggtttctgtgtctgtaggatttcagagtaacctagtggaatgccctgactgtgtaaaaggagcataggtcctcagtaggaggttggtgagctagaacagcctgggagaggggaggtcctggccactctcttgggtgttctgggcagacccacagagcctgataccctggcacttttaagttgtatcactaacctcgtgttctgatccatactctgtaaaactttctaatcttttgtcctcctgtggggattatttacagaaagaaaatgcaatgaaatcaggttagtcaggcagacagttctaattcttatttagaattcaataaaatgcctctctgagatatatatctcagtctattgtgagtttagtctgcacaggtcattctctccaaattgagttaacctcgggctgagttatatgacaaaaacagagttttggtcggacctccatgatcttccaaggcttcagttgcctcctgcatttccctggagatttcctatcccttgcatgtgcccataatttcatttaaacctgttttaaaagtgtatgtaacttttaagtaacctataatcttcccttcctcaggttcattaagcactgaaccaatagcgcacaggctgagaaacttacctcacccagatgttttgggcctgaattctaacccctctgaaagccacccaccaccagcttctgcaccaggcacccagtcttggctgggacacagggtagcatctctcatggccagcagacctctgttgggccatgttctgatgcatttctgatctgtctctaagagatgtgctgagaagtaattcatgtcttagtggccactgttttgtacctaaaatgatgtccaaagagtcatccatccatttctgtttcctacaagctcagcatctggctggcactagggaacccagaacgtggactggaatagccatgaggagcctaacttgtatataggccttacttgaataaattaaatatgccacttactggaaaggtgccacatgtaaagcattgcaccaggtcctaggggaaggttggttttgatgtaaagaatactagttcctgtcttccagaattttctctatagtcaaatgaaagcttgatctttcacatttgttttaagaagttgggctgacactggttttctctttacacatgcacacacacacacacaccctcaaacagttgttatgcaaaccaactgattaactggcatgctgttgctttactacattgattttagaagtaattgagctattcagattcctgaatactctgatagagaattattcttacattttgtaataacgactgtacagatgaaaatatgaaaagacattctgcaatggataagcattctgggttaatttcagtgcattagcctaatatacaaataccccatttctggcaagaaaacccaggatgttcattcactgggtaatatcttttcatattttgcttacagatgttcagaacaattccatgtttattagtctattcaaaagcttttagaaatctgcacagccaagtggcactgaatccagaagcatgaaaggagctgcacaacttttcctcgtaagatttacacaagcagcacgggaaatctgaggcccagacatttccttatcaacagaatactccggtggattttcaagcaggctgttcagcagaggtttcgagcaggagcccaggtgtgggaagagcggagtgtgggagtcctcgtgtgaccctctgggggtggtgatggaactgactgtatggtctgcaaaacctaaaatatttactgtcaggtgcttatgtgtcctgtcctgagcccgtttcctctcttgtaaaatggggcaatgctgcttgatgaaaccagtcaagttgtggttggattcttatatgtaataaacctgcacattgtgcacatataccctaaaacttaaagtatgataaaaataaaaaaaattgttgcaaatctgagtatttgagaaaatctgggatacacactttctagctcttgggctcgttaaagatgaacatgatggatcatgaagcattgcttggcagggctggggccagcttgtggtaagtatgcctggcacagcacacggaacccgttttcttctcttcttcatctgtgttcttaggaggtcaggtcatgtcacccccttttccaaatgcgtgtgatttttttccttgatgcttgagaactctaactgagcaaggaataataatttccccactaatgtaagacaactcagtatacttttttttttttaagtttgacttaatttctgaagtgtttgggtggaagcgcatgtctatgtatcttacatgagatgaatgatcccattcttcagagtagggatgagttctcttattaacagattttatcaagcaatgtaaaactcattctaaattccttgaagactgcattaaatctctttttagtgcatagtcagtcttattgtactcatttcaatgtcagtcaaggtaaattactaagttattgacatactcctgaaaatgcaagaattctggtgttcagttcttgctacaagcaatttgatcgctttttattcctcttattttaggcgtaaaattggaccttaaacttgtagcaggcaggataaaaacgcttatctctctcaaaccaagaggcagaaagcaggcttcaagagcagagacccttgactcatacccttaggaccaaagatatctgctcacccaaccatcttccccacacccacatccaagcagctatgcaagacagattagttcagtgaatggacccattgcctgaagaaaaagtataggtaatgagaaaacagctggttttgtttattgtaaacctcaatcaccagaaatagcaagcttggcttctctaccatcggcacccctctgaagggttgacatggtggggggggggggacataggtcatggggacgtcaaggcatttgagacctagaagggccttaaccatcttccaatacaacagctttcaaactgggtgaccatggaaccctcaggctttcagaagggttctgcaggagctccagaggtaatgatgtttgaactcggtaagattcaagctgcttggagaggccattcacagctttcagctgtattatatgttgatgtcctgactaataaccttattttgaaaagttattaagaatgttgggaaacctccaagactgctttctttgtcgagtaagggaactgaggctgagagagatgaagtgatttgagagattttattagaagggttgaaaatgtgcttgtcttctcagatcacagtgtgactagaacacccaaaagaagttcgaatcgtacacccattctgctcctctcagtgaggtggacagtcaaggattcagagtaggggtggctttggagtgggaaatgttaagatgtgaagagatcatagttttgtcatttggttcctgtttatgatttctgttaggctggattttttcaccagtattgagtcctggggtttcctgatagatagttcttgtgtctgctagatgctttaagtcctgtctgcgatggccagtagcagagctaagggtgtgacagtaaagagcgcctgcaggagcccaggacttaggactaagaaaggaagtcattgaactggggagtggtatgcttgctccctcacctccctccctttcaagcttctgcaaattggcttcctggcctgggctggggactgcctgggcctgcagaatcagggcaagtggactgcaaattgatttgtccacgaagcatgggctgcagaccttacatataataagctggtacgcacctgctccagtttacagtatacaagggtgatggcattgcaataagtaaaacatgcactcagccagtgctattgaattcagagcaatttttcaccatcacataggtccttcatccaccggttctaaaatttgagtgactctatgggggttctctggcagtatctaggcgaaatcatgtggtctctcatactcacgtaggtatgaaccctgtatgctgataggtagttcaaagttgaaaccaaagagacgtgcacattttgctagaggtatcccaagtttgcccagttatttaaatccagcattagacatcagagagggtgaggattttctatagcttcaaataactgaaggctggcaagcagcaaaacatagggccccacaatcctgctgtcctcgaatggtaaaaagaggcatttagtgcctttccttccccttcaggccattggctaaagactccaataatgtcagggtctgttctttgtcattgaagggcaaggggtgagtgaattggatggtttatggactctctaaagactattgcatgtgctacgtgttcttcatatgaccttgatattttaatattctatagttggtttggctgttcaactcacgtctctccttgaacagcttaaatcactgctgaggaacaggtgcagcggtcaaaggtcaacagactgacagactttaagtagttaaatgtgtcaatatttcagcaattttggtggtaaaattcaaatagggcatttaagtagaaaacaaatggaaaggaacaataataaaaacatccttttacccattcaacactagaaataggttattctttcattgttttaggattatattctcaaagacttagaagggagattaagaggaatttgatatagcaagcagtttttaaaacataattgcaaaagcagttgatgaatgtgcccacactgatgttttcaaatcacatctaatggagccataatgtaatatgagaaaataaccttatgggggtcagggggttgagcttctccaggaattttatgggatatgctgggtcttaattacttcataatgactgacaatttttagagccttagaataaaggtttcttttttttttctaagttacattaaaaataaatatctgggtcaattactggcccatccatctgccaagtgaaaattgcaacaagacagaaaaacacggttgctcgtcatgggagtgaagcacccagacgtgagcggagcggcttgggaagaggtcactgttgtttcctggggccgtgcctccgatctgccggggactcctcagcctgggagttatttacaaaccaccgaggcccctcagctgcgggagaagctttgcttaataaatcctggcctctgaggcgtggaattgtgaagtctctcagggaatgccgagggacagaactaatttcagcgtcttcgttctttgagaatgggaggtagcatcacgtctctgactggagcgttctgatgagggtgaccacctacccacaacgtgttttgaactcttttatttatagttgttgccttcctctttctttcttgacgtttcctcttcctcctgcttcccctctcttctcttttgcttcttctttccttgagttaaggataagttgttttttccactctggtttattgttataaggcttaaaagaagtcacagaaactggtgacttagcacataatacccatcttaggtttagaagagcaattgaaaacataatgttctcaatgggtattacaatagtagtttcttgccatgaccactttgtaatccacaactcattctacctactaatctctgtcacagtcccatgagatagagcagcatcagtgctgccccttacacaggtgccaggggtcagagacacttgcacagttagtcagtgtgccacctggctcattagaggttttgacaatctccgctggtgggattgaaaataaaacagggtttatgtttaagactgtctccttctaagccttcactcatttccagcaaatgcattttcacatgtctttcgtgagcattttaggataatttaaaaatattaagctatgctagagctgtgccaaagttttgaaaatggcttataaaaaataatctagagatctggaagcgtttagatggatgtgatctacagaaacacgggatttccttttctttagccggatggactttacaggtcatctgttccggtgatttgtttgaaacttttattaggcattacaatcttttcttcaggcaaaaattttgcacagaagtctattaaaacagtgtgcaagatgctgtgattgggagagggggcttcccccagcactgtcctcagtattctggccctagagtgctgcctcaaaacctaccaggagcttagtctgtaaagcagttgaggactagggccaagttaactttgggctgaaacacgcagtaaaatgagaaggccttccacacctcgctcatcactagcccactgcaaggctgcactttgcatgctcatggaaactcgcaggattattgaggaggctgtgcagagggaaggggccttttaattctctgcctccttagaggtgcaccctggcgggccaggagccccaggcagagatgtttctgtacaggtcccaggttttgcagcaaggtcccagagcatcccgttctcccagtgaaattccgttttcaatttcagcctgattccctgagtgaatttaatgtaaagctgtcccttccccctcggtcccggcaggtaaggagctgctggcgactgtcacaccagtgcccctgtcagcagacctgcttggctctggaaggatgggttgacaaaaagccataggtacctgaacttgtgtgtctttgtgcacaagaaaaaataatctgtcaccttgtttaaggcgtgttcggttgcgtttgatagtttgaaaatgctctggggaacaatcatctgtctggttttgagagtcaggtcgtaaaatggtgaaatcacatactgggggctggagtggggcggtgggcagtgtgggggcattgggaggctgctggttttttttttaaaaaacaagttttaattttttcatctaataaactgttttttgtttaaagagcagttttaggttcacagcaaaactgagcagaatgtaaagagaattcccatctatcccatccccccaccatgcccgctatcaacatccccacctgagtggtgcatttgttacaccccaggaaccacactgacacgtcctcagcagccatagtttgcgttgagttcactcttgatgttctgacatgtataatgagtgacctgtgtccaccatgaagttattgtacagagtaatttcactgccctaaaattctctgtgctcagcctattcagcccatcctccccccccaacccctggcaactgctgatcttttcggagtcttcatgtgtttgcctttttcagaatgtcattgagttgaaatcacacagcctatgtccttttcggattggcttctttcagtaatatgcacttaagtttccaccctgtcttttcacggcttggtaggtcatttctttttagcactgaataatattccatggcctggatgtaccccagtttgcttgtctattcccctgccgaagaatatcttggatgtctccaagttttgacaattacggatgaagctgctgtcaacataggaaactggttttaaacgttcagtagagattaatgcaagaactctggagtgggggaggcctggaggcctgggttgaaatgaagttctaccagagaggatttctgctagctgatatcaggcaactgggggcttcatccatcaaaagcacttaacattgaaacttacttttcttttctgagccacataagtaagaagaattcagacggcacctctgtctaggtgggtggctggtgaaaacttccaacagtacttttctctctccagagtgtaagagttcagatttgcatgtgtccattcttccctttctgtggggcagagatacatgtatttctctgtccccccgaggcgaagctatagtctctgaccccctgagtttcagcccagtgggagtgtttcttgtaagatttctcagtttgggaggaccttgggcttcatctcctgccctccttctcctgccccaaatggctaccaaggtgggtccagaagaaactctcagaggtctgtagtttgtttatcttctaggctttttatacatttctttccttcataatagctcagtgaaaaatgttaaaatattttaaaaatatattgtacccagcattttagttatatcaggcaggaagattgcttcagatgttgatgtgccctttcttggccagggcattgcaaggcagggttagtgctcgtagacaaacaaggattttttaggaggtgatgacaccatttccatcaggggtggccaggaatgggcacgtacagacagaagcattcaagtgacttgagaggatccttaggcagcctggaagtaagaggaagatgacaggccctctccgtctccacaaaaaacagtgtaattaaatgtggaatacccttacccccggaacatttgacctcagagaccttgggtctcaatgcattggacactgacagcccatgtattctactctgtgtgtgtccataaaccttcttcatttagtttatttattttttgagatggagtttcgctcttgttgcccaggctggagtgcaatggcgtgacctcggctcactgcaacccccgcctccctggctcaagcgattctcctgcctcagcctctggaggagctgggattataggcacgcaccaccgcgcccaagtagttttttgtatttttagtagagatggggtttcatcacgttggccaggctggtctcaaactcctgatcccaggtgattcatttactttcaattaacggcacctcaatggcctcccatttgactatagatgttaaataagtacagttgtctctccgtgtttggactaactgctcaaggctttgatgagcagcagagtctcatttagaaggagacttgccttggttcaagaattcactctcttacctaggatgtaattctatttttctgacaggacatgcttgatgggactgatgtctccagccaggtcagcgcagcagagaggtgaacaccagcatgtcttgttaagaagcaggagatgagttcatgagatttccacacacacacgttgatggcctttacatatgagcttggagatagaaaataatagctaataggttttagtcgtttccaagtgcatggcataattctaaattctttacatgtgaccacttcttctattttcataacagctgggggatagggagggggtaggctagtgtccctgtttttaaaatgaacaaatccaggcataggcagattatctgacttgtgtaaacccccataattagtaagcggcagagccagaatggacgcagggacagtctatgtctagagtcgttgttttgaactcctatgctgtgtctctctcaaagagaacaagaaagtacaagtcactacaatgaaaagaactccattgtcagtgagacatacaacacccttccaaagtgagaaagacaaaacacccagctaagactcactggctaattggaaagcaggacctgttattatgtaaaggctcctgtcctactaggtgagattttccttgagggtagggactatgtcttttcatctccctattcttgtgacacctggagcaggccttgctctcaataggctcctgatcaatgccgagttgtcacatcccctcatgcgttaaataaggccgtgtctgaggatcccactggaaagtcttggaagactctgggactcttgtaagccctgcacggtgcttcctgattatatgaggagttggagaatatcatgagaaaagtccaaagtctctcctaagttctgaactatagctcccttctcccacgtggcaactcttccctgatggtttaaagagcagaggtcttggcaaaaccaggctttccctcagattgttcagcagagggctgccagttatctaagacctttttaagaagcagatagacagcgaggtgcggaggctcatgcctgtaatcccagcactttgggaggccaaggcgggcagatcgcttgaggtcaggagtttgagaccagcctggccaacatgtcgaaaccctgtatgtactaaaaatacaaaaactagccgggtgtggtggtgcaagtctgtaatcccagctacttgggaggctgaggcaggagaatcacttgaacctggaaggtggaggttgccgtgagctgagatcttgccactgcactccagcttgggtgacagagactctgtcaaaggaaaaaaaaaaaaaagaggcagatatatatgttcatctgttgcctttgaccttgtcaaatctattgaagttctcaatgccctgaaaacaaatggacttagatctatggccactctctggcaaaactgagggaattttaaactctagcatcttttgggctgtagcaaggtgacaaaattaagtttctggagtgccccagaggctaaataaatgcaattttgtcatttctggagtgttctgtaaatatcgagcctataaaacagaatgcagttacaagaagagttaattcacaggttggtgaaaggaacactgctcataattagagtcaggtggtaaaggacatacttcctggtgaagcaggtgtgtagggacccgtgacattctcccatctggagttgtctcctcctctctccctgctcctgtggctgggggtgggattcctaagtcactgtccctccctttccccattcccatttcttctgagtacttactaggtgcaaaacatttttctggacatttgggaaagctcagaaaataatatgttgatattcccctccaggaaggtagaccgtcctgggaaacccaggactagggtttcctggggaaacaagggaaagcagtccaggcgtgtgggggagagattcagggtgctttccaccctctcccggacctcagcttccctgcacctggctttgcttttgtaggctggggctgctgctcctctcggcttcttccatggcagtcggtgccacccagctcgctggtgttcctgactcgggctctgcccgcctcaccccctctgtaggctctccctggtgggtgttctgctgttcacagtcctgatttggcacaggccctctgaggacctcaacacagacgctccagagaagaggcctggacctgcgtcactgagaatgcatcagagggagcagttccgggaaagagaaaacaaccaagtcatttcggttggacgggacataaacactgcaagacaaaattgatgcacaataatgatatgatctgtcagaagaagtggcaaagaaagggaagaaatgagcggctgtgtgtgggcgagccattgatgcaggaggctctccttgccatttggtccagttgcagcagaataaaaaaagctccacttctggttgagggatctcacatgacaagtatgcaagagctgtttaataccaccacgcctggccagtgacaggggcacggcatcctggttagtaatgaaagtggagtgagaaagctgcaggagcctgagatggatggaacagggaaggagcaaagtttccacagaggagacagaggaggaggaagcgggggacagaataccccacgactctagcggcacacgtacacaagcgaggcagcacgcagagttgacaggcacagatggactggtcacgtagcctggagttagggcaacagatggacaagtcattgcataaattggctacccagggaccacaaatgcctgctaggaaatccaaggacgtatcatgttgacccagtgacaacatacctgggcagaggtagacacaggtgcccctgatgtgaaagggaaatgaacagcagtttgcattggtgggggggaataaaaagcaaacgagattaataaggaaaggaaggaaattacattgtgtgcgtgtgtgtgtgcttaatgtcttttgtaagaggacttacctttaattcatctttgtaagacctgactttaattatgtcacttctgaatgttgtaatcgtatgactttcagagcagtgggagaggaaaataacatttggatatttgatagatattcaaaatatagctgaaataaattttctaaacactgaatctttagtctaagcacaaagtgaaaaacaataactttcatggaaatagttacttgtaaaatgttgttcagctttcagaatgaagtataaaatacaagatggagttgtcatttaaaaaccaaatagtactaaactaaaacaaaagtaattcttgctagatatatttaggttgctgtaatagtgtacccaaaaaaaaactatagtctgctgtgatggtattgattacctttttatttatggtaaaaatggatgaattgtcatgtctttaagttgctatttactcaatattttaatatacatttagtatatacatttgtgttaattcttttttaaagctttaaaaattaatcacgtaatctttgaaagtcactatgctagggaccggatacagtggtgaacaggataaaattgtttctgtcttcatgaagggtatataatctgttacttaaaaaaaaaaaaaaaagactataaggccagatgtggtggctcatgtctgtgatcccagcattttgggaggctgagatgggaggattgcttgaggccaggagtttgagaccaggctgggcaagaaagcaaggcattcgtttctacaaaaccttttttttaaggactttaatttttagagcaattttaggtttaagcagaaaaagtaagcaggaagtacacagagttccaatgttaccgcctgccacacatacatccattttcttggctattaacatcttagtgtagtacatttgttatcactgatgggccaatactgatatgttattattaactaaagtccatagtttacattcgggttcccttttggtggtgtacattctgtaggtttgacaattgtataatacgtgtatctaccattatagaatcatgcagaatagttcactccctaaagattccctgcgctccacctgttcatctctccaccctcacaaacccctggcaatcactagctttttacctttgatagttccgccttttccagaatgtcaagcagctgtgtgattcgagaatgggtggaagcatccagtaaatagcatgtttagataggtctttttcacttagcagtatgtatttaacggtactccatgtctttctggggcttgatggcttatgtctttttatcactgagtaataatccactgtttggaggtaccataggttattttatctattcagctcttgaaataattgcagttgcttccagtttttggcaattatgaacaaagctgctattaacgtttgtgtacaggtttttatgtgcacataagtttttaactcatttggacaaatatttaagaatgtgattgctggatcatgtggttagcctatgtttagctttgccataaattgtcaaactgtcttccaaagtgactgtaccattttgctaccagcagtgagtgggagttcctgttactttacatccttgccagcatttggtgttgttggtgttttggattttggcaattctgataggtgtatagtggtatctccttattgttttaatttgcaattctttaatgacatatgatgtggagtatgttttcttatgcttatttgctatttttatatcttcttggtgaggtggctattcagatcttttgcccattttttatttgggttgttgttttcttattgatgagatttaagattgttttggcctttatcagatatgtgacttgagaatgtgtcctcccagtctgtggcttgccttttcattctctgaaaaatttctttccccaggcatccattatttgtgaactgtgtgggttgggcactggtggaccagagtagttctgggaaggtgaattgcaggcctccacagccaggctctgttagtctcaatattctcccagaaagtcaggttggactgttgcatgcccgaatgttggcactcacacctttcttgttcacttgcttctattgaccttgttactgggttgtacctatggttttggcctctcattttttgccgtgttggtcattttgtgcttctgatgactttagtagctgactctggccctggtcccttgacttcctgcaagttctgttacctgactgtggccatccaccctcccacatgggtgctgattgtcttgtttgtgtaccggcttggcctttgccagtgacagtttatcctgaccccagcccgaggcctagtgtctagaaaaattatcatattttcagtggttgattataaaaccagcattaggttgggtgtttctcagtttaatggctaaactcaaaatctttattgctgtcacccccaaacgaagttgccttgctgactttcccatttcttccctactggcctcaccattctcccagtaactcagactgtctgtcacagggccatctttgatttatccttcatcacctgtagacagtcagtagccttgttctcagagtgcttcagtgcttaccattcattctattaaaggacttgagttctaccatgataggaaaaaagactacatcattccaggaaggtatgtgtgcacgttcagacaataggttaatgccatatgcatttttctgaaaaccctgtatctccctatatggcagcctctaagagcctttgtggtaccaaaaccgggaatcattctttggctttgtttttaaacactgaaatccttcttcagtcttctctcttttttattctcactgccaccgatgtgaaactggccctggcttcatggctggccccttgaggcttcgtgctggactcaacaccttgggtctttctgaagggaagcctgctggggacaggaatagggaaagagctgagtaggacaataaggtggagagaaccagaaagcctttcaacccatctttagagtgagatcttcacagtgtgatttcgttattgtatttgaagtgaatgctagaatagctgatgcttttagaaatcaaatatagatacagaacacattacaaaactaagatttggtcattttaaaagctttgttatttgctttttcatcctctcctttcctcctattcactcaagtaaataatgatgtgaccacagttttctttacttaaaaatattttttttcacaggcttcagatctgtgtgtctacttgtcatgaaaagtatattttaccttaataagctaatgatttatttcaacagaggaagcagagccttccaagtttatatgagattgattactccaaagctttgactagagacctgttcttgtagaagccagtctttttgtgaaagtcaggtgaattttagattgccttctcaaactctacctgtgtgtcataaagtcactgctatcattgttttcccctcatttccagtagcttatgagaactccagctattagcatgtagcatttaacctcctatactattaggtcgtttctttgattgcccagaacaatcttatcattggatgaaactattataaattatatgcacatagttttaaatgattgcaagatatatttgattctaggtcttttcagaagtttagcattgaatctttttcaaaattttctctttttgcaacatttccagctatatttcaacttgtttatcagaacgatggctgcctgggctaaagccagtgctgccaggcaaagctgctcccagtggagcccaggtgggtgcaacagggagctggctgtcgggaagggctgagctgcttggagagcaggagtgagcaggtgggcatgatgagggagatgctgggggtcccaaggtgaggaaggaaaagagcaaatggccttctggtgcacgtggtcattaaggtgagatgactagtgagaagccttgagtcttgatgaatgggcgagggagacaatcctttatatcaagtcccaggaactaacttgagagcccaatgcggagggcactggaaagtcagttaaacagttagatagtcccacctgctgaggagatggaagcaagggccaaatcgcagggtgggggtcaggttggcctagagccctctatgcgatgagaagcttgaaacccatctctcagtatgtgcagccactggagctggggtacagctggggtcttggtgagtcctaagtgactgttcagattaggtcacaacagactgaggtatttgtctttaattcaggaagcaagagcattgagagctcttgttcacattttacctgcagctgattcaatatcctgtctgactcttcaggtggtgttttaccaaattatgtcctggaagaggccagtccatattccagaagttagaccagatgctaatatgctctgcagctggctggaggagggctgggtcatataccacgtgatggggagagaagagggaggcagaggacacagtccagcctggagcagacatggagtcaaaggctgatcttggctcttggaagatcctggggggagattgaggtaggacaggtgtgtcacaggggcttctgggcagcattcagctctggggtgctcacaaagtgtggtggctgctggaaatagtgacctatgcctctcattagagtatttcagctgaaagggcctttggaatcttctcttctcccagggtaggaaatagaaactcaacaaaggtgatgactcagcattgtcaggcagctagcccatagcagggactagaccagaaccctggccttttcacttttcagagttcttttagaaacagttgaattgggctgtaagtgatctatattaaagtacatattttaaagtgaacagtatacgttttgacataggtagacactgtaaagccctcaccacagtcaagataatgagcagatccattccccaaaaaaagttacctcgcatgccttcatcattcctccccctgccttcctcaccccgcagccctggtgcccaggcaacctctgatctgcttcctgtcatgacaggtgtgtttgcattttgtagaatttttttctggaatcacacagatttctttttgtgcctggcttctttgattccacctgttttgagatgcatccatgttctcggatcagcagttcactcctttttcctgctgaatgatattctcttgtatggatgaagcatccttttccctgctgatgaacagtcaggttgttttcagtttggggctgttacaaataatgctgccatcaatattcatgtaccagtgtttgtgtgggtgtgtcatttcatttctcttacattaatacctagaaatggaatgaccaggacctgtggtaggtttatgtttaactttttaagaaatttccaaactgttttctggagtagttgtaccattttatattcccatcagcagtgtacgagggttccagtttcttcacttgctcattagcagttggtatggccagtctttttacttctagtgattgtaacaggtgtgtagccgtatcctactgtgtttttcacttgcattttcctgacgaccgaattatattattttgtcatgaacttacttgccatgtgtatgtctttcataaattgtctgttcaaatctcttatgtatgctttttattgggttattttctcattgtaattttgacagctcttgatatattctggaaacaagtcctttatcagacataatgatttgcaaatattttatctgagtctgtggcttgtcttagcattctcttaacagtgttttttgaaaagcagaacttctaaattttgatgagatccagtctatcggtttttttttttatggatgaaacttttgtgtcatatctaagaactatttgtctaacacaaatattttctcttattttttcagaaattgtatagtttaagatgtacatttaagtctgcaatccattttgattaatttttatatatagtgcaagtcatttgacacgtgtgtaatatagcaaaaggcacatattggatctgtggattaaggtcactttacccaccgatggtgacagaagtcttctaccagtactgtcatattaaaatgcaaaggtcaatcatacattatatatgtacatcactcaataaacccctaaagtacattgcccagttttcataatacatttaatgaaagaataataaggtcattaagggcaatcagtgttttgttatattcctgattatattcttgattatagtttgttgcatttctcgaacgaacatggatggagcaagaagtattcctcttccccctttaatgcgaaccaacatagtctcagactccagtttaaaaccttgtcaacagcagtgattgcacattgtttaccccacccgctcccggttgtagtaattatggtactttagatttcctggagaggacacagtgcttaatcatgtaattatgtctctggacggctatcccaaacaatgtggagcacgggctctgccgttcatgacaacagccaagagagaagtttgtttgggttcttattgtgcagacacagtgggaggggaggctgcagtggctggggagagcaactcgtggagggaaggagttgattttggaaagacaaaatggggttgtgtagggatatgtggctttttttcttcccccagttcttgtccttataattattccaggagtaggagtccttagcaccactgcattgactgtggtatatggctcagtctccacaccacagttatctagggctggggcaagtggatttgtcccggggaattactatgggtcctagtatttagccttccattgtgcttctagcccagaagtgtgcttgctttacaaaagtcaggagagagatacaggaaggagcaccggagttggagtctgacagtcccccacacctgctgggggatcaggaatgagtcacttagtctctcccgacaccaatttcgctatctgccagaaggggaagagtatccttctggtgtacccaagtggattcagtgagaggacatgctctccatgtacataatgggccaaaggtcatgcattttttcattttatgtggaaaaaatgacttgcacgtgttcgtttgggaggcaccatgaaaactggctttaccttctctagggaccttccctaaccccatcccagaccctgaggcggggttgccacattcattccccttgcatatttccctcattgcatgtcctgcgtcacaatgatggctttgctccctgctgtgagagcaggaatttcttcagggccaagacctgtaatttttatttataactctagtgccatttcataagcatttgatgaataaacaactaaatgaatacatatgaagatgagcagagcagtcctggtgttgaaggaattcataacctggtggaggagatggacacgtgtgtgaataattgcagcacaccgttctagctataacaagcagtttattcacttttaaacaaaatgggaacgcttctttctcatctaataaaattgcttctgtgggcactccagacatttgggtagaaagtatgttgctgaaaaatgatttctaagaagagtagaggagatatggggagactacactcttttattccagccattactcatctgcaggctttcactttccatggcacctgaacttctactcccgaggttagggtggggcattcattacatattttcacagcaccatccttctcttttctgacactaatgatttgtttcccatctgcctcttctctccctatcatctagactagcgcctagcacatagtaagacctcaataagttgctgctaattgactaactatacaatcaaacaagttcacaccataaagactttcttaaaaaataaccctggcttcagaaattttctgaagaggggaacgagttctttccccatcatgggatttgaatatgggcctgtggccccaggtttcttttgagcagggctacagtctgattttcttaatagaacacattacaccattaaatggatctccacacacctggaggagctaacctattgaagagaatgctttcctgttatcctcctggaattcaggtacaatttaacttcttgccattaaaacacaacttgatagtggtaaccttttcccacctcttgggacgcttatttttagttttctggagaagatgcagattggaacacaatgactacagatagataaggcatagcccgcaaacccatttgcaggtgcgctgtgtttccttgcacagtcgtttgtctccaggtttgaatgcttctccaacgcctttattggcagttgaaaatagagttctagccaatgtcgatggattgttaccacaaaatgcaatttgctgctgcacgttgtgctcagataatgggcaagagtagaattcatccaaacaattgtgctccaacaattgtgttcaaagaaatgataccacagagtgagccattctcagttttctgaatcatttaagtggtttcattgtaactcatccctttgtcaactattcttcagtgggaaaataaaggcttaaaggaatttcttttcttcaagaaacagaacttatagcagaatcagaaatatgtcatgatatataggcctacttatggaagaaacaacccgtgttaccactgattactcgatcacttctgtagggctgaggcaacactgttaattctttgaattttctggctgcaccaggcataggtttgtgtgaacaacagggaagtgttacctacagagagccggcagggcagagtgtcaaatgcgtgggattcagaggcagaaaatttggacatcagctttgctgctaccgcttactctctcttttggttttttgttgttgttgttgtttgtttgtttttttgttttttgagacagagtctggctctctctcccagcctggagtgcagtgacttgatctcggctcactgcaagctccacctcccggggttcacgccattcccctgcctcagcctcctgagtagctgggaccacatgtgagtgccaccacgcccggctaatgttttgtatttttagtagagacggggtttcaccgtgttagccaggatggtctcgatctcctgacctcgtgatctgcccacctcagcctcccaaagtgctgggattacaggcgtgagccatcgtgcctggcctgctaccgcttactctctctgtgaccgtggaaaaatgatctcatctaccttgaagggtttgttatgagtgtcaaagaagataatgtgcaatggatagcatggtttaaacagtgaaggaaaaaagttttgtagttgctatagaatgaatgttttcttgtatgaactgaaaaacttgagtcaagtttcacatgggagctttggtctttccttaatggaatattatcagaaaaatgtgttttatatatctgtctttgaaagttttacttatataccggattctgttacaaataataaaataaagttctgcttattggtagctatttctgtttcaagttaatgcacagagccacaaaatgccatacaaaagaaaggcaacatgatgtcctttggctgaaggcttcatttctattcgttttccatagaaattatgtgtgtctgcttttgaagaagcatactgaaaaaaaaaaaaaaaactatcctctactaggtgccttatttgtgtaatagaaattctaatccaagtttagtaatacaaagaaagagagttttgcagatggaagactgccagcttgacagcagtcatgcccaggatgctcataaggactgctagaggagggaggtcaccaggagccagcacagggccactgaaaccacgtcagagcagctggagttccacacgttggtgaggggtgaaggagaggggaattaagtgttatccaggtggatgtacctgaggttctgtgatttcataagcattcataacgagtattgacacaatattcatcattagctcattcacatcagaccctatgaagaatttaggaaagctgtgattccaagatcttcgggcttttcttcaaaagaagagagttatgaagccaggctgaaggcactgcagggtggaatttgtgctgcaggggagaggcacccggacacaatgggagccaggcgccttccccacagcttggctttgccacggcagaaatgctgagctgacaggaagctcattttgttcctggaagagggctttattttatttcaaaccctcagctgcctggtgcacatttttgttctggcaataaataactttaagctcatgtttgagttctttcttcttttttttttttttaatattccatagaagaaaaataaaagtttttatatgaataatttttaagactcagtaagaagtaaacaaacagctttttaaaagtgggcaaaacatttgaaaagacatgtcactatatcaatgatacacagatggcatatagcatccagtttacaggaagcaaggggaatagagaaatgctttctgtgatacctaccatggggaagcaagcaggcaaacccagaatttgggatacactaaggacagctgatgtggcttcttaaatatatgagtgtgttttttaaaaaaggggagagggccttctcaattatgtaacatttagagtacatgaccaaatacgatgtgaggactaagggatggaaattgactaggggaaaaataactttaaaaaacttttttagggtgacaataatcaggggaacttgaatatggagtgggaatccacttgaggcatggattactatgcatcttatatgcaagaaacacctgcccgtaaattcaattaaaaattgttttatctctacaaaaaattccgatttatcagacagtcaatttgcattacaaagggcactgtttcttttataaaatagtttgctgtagaattccattaaatgatttatgtaatttccatgggtagtcttttttttttttttttggagatggacttttgctcttgtcgcccaggctggagtacagtggcgcgatcttggctcaccgcaacctcggcctcctgggttcaagtgactctcttgcctcagcctctcaagtagctgggattataggcacgtgctaccacgcccagctaattttgtatttttagtaaagacagagttggtcaggctggtctcgaactctcaacctaaggtgacccgcacacctcgacctcccaaagtgctgggattacaggcgtgagccactgtgcccggccaggtactcttttttaaaaatcctccaatttagcccctttctttcttcagtctcttctattctccaaccatggatgctggctcccttcatgcctccaaaactttatgaaagcttatttcctctatctggagttattcccttcactttgttctttgtaaaagcttattatattagtcaatattctccaggaaaacagaagcaataggatgatctattgatgagttgatcgatctagaggttaatgtattataaagaattggctcaggattggctcatatgattatggaggctggtgagttccaagatctaagctggagaacaagagagctgatggcatagttccagtccaaatgccagcagcctttagatccaggaagagctgatgttttagttagagttcaaaggcaggaaaaaaatcagtgtctcagctcaatccttcaagccggaggagtcctttctactcaagtgttttgttctattcaggccttcaacttactgggtgaggaccatccacatcaaggagggctgtccgctttaccgggtctacggattcaaatgctaatgtcatccagaaacaccctcacagggacacccagaataatatttagccaaatgtcttggcacagtcaagttgacacataaaattaaccctcactcttactcgcgctttaagactaccctcaaacgaattctacaggaaagcgtccaaatgtcgatactatgtagatttatgtgtttattttttttattctacgctgtacatttcttgagggagagaaatttttgtcacattcatctttcaatcactagacactagcctaggacctggcataaaacaggtatcaagtaaatatctcttaagtgaatgaatgaatggatgaataacagcatctgtagcaaatttaggagaaactgcacaagttagaaggtatcatgttttaatattctaaatttaaatatgactagtaagagggtggcttttaagactggtataagcaatcatgaagagtgatggtttgtgaaaaagtagaccgtgtaacagcagcaaaataaagttagtaagataattctgaaaacaaaagctattcacatgcatatttgagactacagatatgataaaattagcattcagtaggaactatttgaattttgttttagtctaagttatagtgagttgttcaatctgttagcatttaagtcgattagcatttaaaataaaaatggtattcttccaacttattctaccctaccttaaaacctgctccccagaattccacattattttacctgctccttctagtagcatccatatcttgaaataacacatttatacctctattccttactttattcacttagacattagttacttctaccccctagtagttgtgcaactatggataagttatctgattttgctgtgctgtaatttcatcttttgtaaaatggggaaaatagttttctatcccacaatattcttttaggattaaatgaattactgttcataaagtacttggtatgtaataagagtcatgtaagttttataatcatgagaacagtgataattattaatatcacaattatcagtgatagaaagttagctttcttatgcaacctcccaccatctcacttcttctcattctttctctataattgtatcaaaacttttcagtaaatcaacactgtttaccttatgctatgtttatgttatgttattgtggctctgtgaatgtgttctcaactgaagtcgataaatacactgttagggctacttttcaggcaacacaaactattccaattacttcaagcagaacctgagaaagagaattggaggcttacattatgatcctcgagccaacagtgggatttggcaccttcctatctgcggatgaggcagcagctatcctaagaggtctacctgagcctagagagaggcagctgctttataggaggtgaggataggagagagttgtaccctgcaggggcctggtgaaggaagcctctgggaaccaggaagggagaagccccttcttcctcatgtgtccctccggcgccctctactgacaggggttagcatcaaggcatctggcaaaggacgcaatttacaaggcccagtgctattatcacagagcagagaaagaagggtaggtttggagcagagttaataactggaactcctgttacattcaaacttctaacatgctagtgtagttaaattccagacagtatgtaaaaggcttgggtatgtacggtgggccaggggagcaggtccattgttttcaaatatttgaaaaacagctgcctgagggagggaagacatcattagtatgtgtttctcagagggaccaagaccagggacagttatgggaaagcagatgttggcatcccatgagggttttggatgcttcactccaaatgtcaccattatcctgacactaagagtgatgaagctgaggctagggtgatcctcagtcattttgcggaagttcagctgggataggaggcagaagtgggtgattcccaaggtccattccaatctggagaagttatggacttttcagacatacctgtgttacctaaagtgagttgtgctgtatatatagaggtcagcctacccatttatttatgtatccatgtgttatccatatgcctgattatccatctctctacccatccatccatgtatctactcatccgcccatttatccatgtatccactcatccatctgtacacccacccactcacccatccaccatcatccattcagccatctgtccatccactcatctaaccattcatccatccatctacccatccacccactcacctgttcaaccaagcaaccatccatctacccacccattcagccaaccaaccatctatccgtccatccaaccattcgtctatcttcttttgagttgctttaaaactcagtaaagttatttcactcaattaaactaatattatttggaacagtgtttattggttggcttccaaggactatatatgatattaatattggaattaatcaaggacatgacgtgcaaatgcattattttcatcagtttagatatgagaataattcttatttgctgcctttcatattccaggtgtccttttttctgaaaatttctcataatgtgccaaagaagataagagtaatgtgagcaaagttactgaataaaaccacatatgaccaaagcattgaaatgagaaaacagaacatgttttcatccccgtgattgcaagataattccatacgatcaagtttgaagtttcagaaatcttaaggaacagctctctaagcagaagagcttaaatgattatctgggtcttctatgactccccgtgttttatttccttagtccaagccttgtgtaagggttcacagtatgattttactattttgtagatgcatcttcttttctgacacatgggaattttaaagaattggagttgtgaaacagaaatgaaagcacaagaagcatttcctctgtacagcctctttattgttcattggtgaaataagtagcaaagagtccaattctctttctcaggttctgcttgaagtaattggaacagtcatagtaaaaagcaagagatggaactaggattcacacctgagtctgtgcccttcaccactatgcactggcatctcccaatggattaggaaatgtgtaagtacaaggagatgccatgagaaacttgcagtcggtcgactctgtcacttataagctgtgtgacacaaaacaggaaacctcagtacaatccatgaaaaaagcagggcccagagattaacatggattcctcaacatcacacagacaaagagttgcacatctagggttggaaatgacgcctcttgacccacaatctggaactcgtttgtttttaacctacttttttagttttgttccatagaaaatcattaattgctcatgaaaagtgaaatcgcactgctaaaaacctgtcctctggtactgggggtttaagttccttctgttgctccaacactggctggtgtttacacactggtgcctgggcaggcctctcgctccgtgtctgggcttcctggtggtcactgcagcggtcgttactgtgggggaaacaggcgacacatgtagggtgacctccgtggtggtggctactctgtttctttatagacaagttacctttctctaatcagcagtccacagcagtggctccctgactgtgcctcctggagcagctgtttggggctcagtggccgagcacatggtcgcagtaagtgcacgccacccagcgagagttggttaatcatatataatccacccaacagtgggctgccttgtaattgttacagggccctttcagtttcttgcaatttcctttgtctcagcagttttggttgcatcctgaaaactgtcaggctttcttgtttctgtaaggacctgacaattccggcctcacaatgcagcttaaattggaccagctgctgcctcaatggagcagtctgcccatctccaaggcattaagcccaaaattatttcgaaaattgaagcctttgacttgctctggattaatgtgattaagcagggcttgctttaatttgtagccatctcgtcctttattaataacatctcatcatttggagcagcatgcgtgtctgcaagacaacagaaagttaggttgattgcagtttctaagagaagtctttaatgtttcaggagcaactgatatgcagcttcaattgtgggggcagatttagatctgcttgttattcttaattttttatgtaaaactaataagcaaatgaatcctccttccctcctccactttgaccccacctccccgaggtctacatatgatttatcgttccctttaagtaataaagaaaggatctttttttcatctgaattgtgtcagctggtgaaatctggaagaaatatccttcagggttaagaaaggtagaattaaatggatttgattttttttctctgtgtaattgaatgtgtattaccattaagataattataaataatctgttagcttttctaaataagaaagtatatacctcattacttgagacctagattttaataataacagcagtggattatagtggaaggaattaggacgtgttttaaaaatgtccttaataatttttaagctcaatgacattattcttataaaatttatcctggcaaacttaagacagtaataatctaagtctcgtatctttttctccttacaataatttagctaatgaaagtacatgtccaggtatttttctgaggttaaatctgatcttccttctttattatcagagccaaagaacacagctctaggagtcagtaaccctggagctactccactttctctcaccaaagcgctgtgttttcttgggaaggtcactcaccctgtttatgcctctttccatatttctaagaataggaaattgaggaggaaactttctaaaatcccttctagttctattctgtatttccaacttctgatgtttcctacccccatttacaaagtgtgtttcactgggtctggttccaatacagtcgtcttgctttttctctgtatggagtaggtagtataagtggcaaaatgtactgatatttgggtcaaatcagattatttctggaagtcaaagagcctcaaataacccaatgtcattgtatatacttaattgcttatcatctttcttaaaaataaatggctatctaatttacggttctttggctacttattagcttataattttttgtattcagatctctttataataagtatgggaggtaatgcatatgctcattagcttgatttagcccttcaacaatgtatacatatttgaaagttcatgttgtatatcataaatatatacaatttttatttatcaataaaaacaaattaagaaaaacaactctttacataggcaataaaaatacctatgaaggaattgtaagagtagtacctgttattacagcaggggcaagttgtaaacctctttccattttttcccttcattttgcccaatattttgatatctcctgtaatgtcgatgctcgctgtcttgttaaacactttattatcacttgaggcatttatttatttattctacagatatcattttcagaaatgatttgtggtggttcttctggactgagaagagcctgggtttcacagctgggtacagcaggggtggggttgccacttggtctgagtagaaggaattctggagtaccttcgggtctctgtctgggccatctgctgcataaattcctttacaacacaagaggcagcatacttgctcttgacctggttctgtcactgtggaattggaccacctgccatcacaagtagatccagcaaatgtaccgtggctcgcacatgcacaggttgacttcttgttcatgtaacaaccaaaaacacactttggtgggtggctttcctcacgtggcaattcagggggtcatacagctttccttctgtggctctgctatctcccataaccccattgaaatctacatccagcccatcagatggacggagagcacatggagtgggcacacctatggcctgtaggccttggctcagctatggtgcacctcacgtctgctcacattcttgggagacctcacctgcatggccacactaactgtgagagaacctaggaaatggaatttttagagatgagagatagagctctacctccctgtggtgacatggtaactcctagaagaaagggcagaaatggttagtatttgtgagtacagccctttactgaacttcagaagttttagacagtcttttaaagttgatttcaaaggacctgggcatctctacattcccgtcagactaatttgacttgtggcttagtctttcaaagatttttggagctgtaagtcttactggcaccatgtaggtggtagtcaggacagttctgctagtctcattgagcatgcctagtaactggaatagatttttgccttacagtagaattgaaaaaaaattgccccgtgatggttatttttacaaaggtcatttaggtcattgattatctgggcatcatgcagttgttttcttgttgtttcctaccataatttttaccaggctctgctactaaatggctgcatgatcttgcgtatctgctggagcctctgtctcttcattagtaaaagtagggaatgtaattcttaccttgttgggtggggtgatgattaaagcgtgcattgcgtgtcttccatgtagccactcagcataactttgttaaggaaattaattaatacagagtagctgactctccagacatatgtaatgggtgaaaatagggtggagtttggacattgattttagaaacacattctcagagttttaagaaatcagcaatatcaaagctaattccctttgacaactcaactttgtctaagagataacaactccctttggcatctcatctttggggcagcgttttctgatcctacaagtttgagtttgatcgtcatcctcccaccctaccccccacacgccttctctgtatgactggtttacgtctctgactctcccgttatatcaaaaacttttttccccatatgcatccccacccctagcaaggttgaaatgcacaaaattgccatttaagtagttacaaaatggttgagtattaacagtttcatttggttgaagctaacacctagaaggcacaagatattttgtgagctattgagcaacgtctgacacctgaatgtagcgtccatgctgctcttcttttgagtcctgtgctatgtttagcatccattatgccatcactgacttcatataggccatgaatatgtatatatgtatgatgtaatcctgagtgtgcttctggagctatttcaaatatctatgactcagtgtgcattaaatgtggcaaatctgtttcttggatattctgttgaatttacctctaaagacaactaggcctgatattttccttttggaaaacatgtttttaacttacaatccattttctaaaatagttattaaagatagtgcagccttgctttttcttctttctgggccaactttgggaagttatatttttctaagaaatttttgacgtgaagtttttgcagtgtttttcttatctttttaggctttactgaatctgtagttatggcccccttttatttgtgatataatttatttgtgctttctttttttttctgatcaatttttttgccttcgtgaacctttctataaagtgttctatgcttcattaacttttgcccccctcttttagttccatccttcaaataccttcgtatagttgtcattctctttttaacttattttgttgatattttttactttttgctcctttctaataattaattcaagttatagatttctattgctgtatcccaatcgttttgatagtagcagctccattataattcattttaaagattttaacattgtaattgtgatttttcctgtttgagttatttaaagttacctttttgatagtgatgtctaatagtcttaagctagacaacttaaaaaatatttgtaaccctcatacactgctggtatgaagggaaaatcgtgtagtcactttggaaaccagtgtggcagttccttaaaaggttaaacatagggttagtctatgactcagcaattctactcttaggtatatacccaagagtcatgacaacctgtgtccatacaaaagcctgtacacaaatatttatagcagcattatttgactattcataatagccataaagtggaaacaacccaaacgcgcatcagcgtgtgaatgggtaaataaaataaggtatacacgtacaacagcgtgaactactaatgcacacaacaacatggtcgatattgaaaatgtgctacatgaaagaatccactcgcaaaaaaccatagagtgtatgattctatttatttgaaacgtccagaatagggaaagctgtagagacagaaataagacacattagtcattagcttggacgggggagatggtgggtttgggaatgatagctaaagtgtatggagtctctttttggagtgataaaaatgttttaaaattgattgtggtaatgattacccaactgtgaatatactaaaaaccactgagttatatttaaataggtggattgtatagtatgtgaatttcatctcagtaaagctggttgttaccagagaaaaaagcattttctaccaaaatcaccaataaattatgatagctctaaactacttactttaaatttgtttgtgctgattcttactctctctcacctctccctctctgccattctcctggacttttccccatcgttggaaatgtcgaataacaaagtttggattatttatcaaaaaggattgatttaatgaaaatgaatggagaaggctgacatgaacataattttccagttcccaccctcataggtaatcatctataaacccactgggatggcacagccttgacaatgcggcggtgcttactaacaagcacacccgacctagacagtatgattttgcaaaagcagaatcctgaaacaatgcaagtgcagtgaacataggagccagtacaccgcatataacacaacttagaaaaatgctatcgataagaaatggtctttcagagacgatttccggcatgtgctacaggggaaaatggtatcaaatctacacaatgaccgggttctatggagtggctcctctgtggggaattttactttattctctttgccagaaaccttgaccccaccctgtctgtgaagtagcagcctgctttgtaaaggggcgctgatcaagacgaaggctattatcgagctgggatccaaacatctgaagcttatcaccaagcacaatagtgacggcttcttagccacgtttctaattatatttttttccctgctttttagataaagggacaaagaaatacggggcttactttgcaggtttttcaggctgctctgaagtgttctttcgaaggtggagggttatagttttgtgtaatagcagtgctgggaacagggtgggttcttccagactctccccccacgtacaatagtgtgtggatggcagagatgcattgggagctgaaataattcatttgtcctttctaatgaatagtaataatttataattcgtactaatcaaaaacctttcatccacaaaagccaacaagttttataaacattctcctctcaccagcctctacagtaagtgcctgacaaaggtaggatcgtccataatttgcagaagggccaagatagagaacacagtgcagaaatcattactaatttatctgcagcttggaatttatatttggaaagtcactttgaacttattttcatcaagctattttgatcgcccagaaatataatttatactgacctccataatggatatctgccaagatgaaagctacaaaagtcattgatccagatgttttctgttatctgcaaacctagcaaagccatatttgccagcatagtcgacattgtggggacaggtgtccattctgtgtccccttggtgtccagccctattatctctgtagcctccggtgacagagcagccatagtggcactgtgcttgatgcaaagataccattaccttctcgtctgttctctgatcagtgagtggtggcgatatgagctgagcataaagcaggaagagtggggatgcccttgtattcagtatacctccagaccttatcactaccaagtgtccaacacagggctgctaagtaatcttgaaaatataccttccactcttatcagtgcaccttcttgacaccaaatctgtattcttgatcctggaattcagaattctccatcaaaaacattgaaaagcaggttacttcatcagctctcctctatatactgtgttgaggaaaagatttgcatgtaattagcctccttccacctccctccagaaaaaccccccaaatttagagaccagtcctaacccttagaaaatgcatagtgttgcagactgcttttgaagattaaagagatgaaaattccattcttaacttcaagagcttccttaaacctggtccaaaagactttcctaaaagcccagccagttcagatgataggtgcagacacatcatattgcatatattcacattacacacacacacacacacacacacacacacactctcacccttctctttgctggggaaaggtttgttgcagaagttaccattccaatacaccatgcaagatgcattcagacgttctcttagatttcagtatcacacggtggatcctgcattttgtcatataaaaattgcacatcatttttagctgccttcagaaccctcttcatatttattaggagtattgtgctcctatccagcagctaaagctgcttcgtgttgtccagttagggtgaactatagaagaaatgtcctatctactgcttttcttttttaaaaaaatttttatttccttaagttttgggggaacaggtggtatttggttacatgagtgcattctttagtggtgatttgtgagattttgttgcacccatcacccaagcactatacactgaaccgaatttgtagtattttatctctcacccccttcctcctctttccccctgagtccccaaaagtccattttgtcattcttatgcctttgcatcctcatagcttagctcccacttatgagtgagaacatacaatgtttttttttccattcctgagttactccacttagaataagtctccagtctcatccaggttgctgtgaatgccattaattgattccttttttggttgagtagtattctatctcatatatatatatatatatatatatatatatatatacacacacacacacacacacacacacacacacatatatattacagtttctttatctactcattgattgatgggcatttggattggttctgcattttgcaattgtgaattgtgctgctataaacatgcatgtgcaagtatcttttttgtattatgacttcttttcctcttggtagatagccagtagtgggattgctggatcaaatggtagttctacttttagtttgttaaggaatctccacactgttttccatagtggttgtactagtttacattcctgccactgcttttctgcttttcttgagggataattggttaattaggaaaactgactgaagagagaatgaatcattattattattacttttttttgagacagagttttactcttgttcccgggatggagtgcaatggcacaatctcggctcactgcaacctccacctcccaggttcaagcaattctcctgcctcagcctcccgaatagctgggactataggcgcccgccaccacacccggctaatttttttttggatttttactagatactggggtttcaccatgttagccaggctggactcaaactcctcacctcaagtgaaccacttgccttggcctcccaaagtgctgggattacaggcatgagccaacatgcccggcacggaatgaatcattttttgaaaaggtttacagaaacctttaaaaaagaaaacttaaataaatgtacgttattgtgccaaacattggattcatgtccattatctctcctttgacctagagtcccctccctacttggagtggctcctcatcttccttctttagcacagtgtggaggtaggagtgaagattctggagctacattatggaggtctgggttctgactccgcccctcagtggtggtgtgatggtggctgtgccatgtaacctctctgtgcctaactgtcctcatctgtaaaatggatataatgaaaatagctcttattggcttgatgggagaattagttgagttagtatatgtaaaccacttatagttgtgcctcatccagaacaagcactgtttgccactattattatcaaatgatctctagttttgcatcttcaaaatctagtgagaatttaaagacattcgtgtagcaacttgaacaaagaatttatctagattttcatgacttcctccccaatctttttttctttaaaaaaaaaaaaagctggaaaaatacacataacataaaaattactaacagccatttttaagtgtattgttcagcagtatggagcccattcccttcgtcgtgcagtcatcaccaccatccactcctcgagctctcttcatcttgtaaaaccaaaactctgtgaccattcaccaccaattctgcatccgccttctccgagcccttgacagccacccttcccaatcttacggagtagtcttgcctgcatttaatttgacagtatttttaacaactttcttttattaagctttctaaagcatttcccttattttttattttttggttttgttattttcatttgacacctaaaaatggtacctatttatggagtacagggtgatgtttccatacatgtatacaatgtgtaatgatcaaatcagagtaattagcatatccatcacctcagacgtttatcatttctttgtgttgggaaccttcaaaagctgctcttctagctgtctgaaaatatacaataaatgattgttaattatagtcagtctgtagggttctggaatactggaacttattccccccatctcaatgtattttgtacctgttaaccagtctctccctatatccccttccccccactccttccccgcctctggtaaccactctactctctacttctataagatcaactttttcagcttccacgtatgagagagaacatgcggtatttatcttcctatgcctggattgtttcagttcataaaatgtcatctaagcttatctatgttatcttaaatgacagttttgttctttttttaaaacaaaattaaatattaattttaatagaaacaaagctgtatttcttcttctgcttttatttctgtatgtgtgacatttaattaaaatttctaattagaagataaagtgcaattggcctaaaccagtttgggaacagtcacaactaattgggtaagggtacccctcagctggagggagcttcttggtgcaggcatgtcagagggagctgtggggttctgatactgtgggcactgggcaccgtgtctgccagcaggaatggtgtggcttatttaatctaagccatcctgtccattctaggatcttcttcctgtgttatggtgctcgtcattttcaacatctgaagcactcttacctctacctgtgtgtgtctaagtagttcccgtttttcaacattgatatggtttgactgtatccccacccagatctcatcttgaattcccatgtgttgtgggagggacctggtgggaggtaattgaatcatgggggcaggtctttctggtgctgttctcatgatagtgaataagtctcacgagatctcatggttataaaaaggggagtttccctgcacaagcactcctctctttgcctgctgccgccgccatccatgtaagatgtgacttgctcctccttgcctcccactgtgattttgaggcttccccagccatgtggaactgtaagtaggataaacctctttattttgtaagttgcccagtcttgggtatgtctttaccagcagcatgaaaacagactaatacaaacatccagttagatatactgtctccattaaaccagagcacttgtctgtgcccctcccatggcacctaacactttctatcctgtgttttcagtgtttgggtgagttctccaagagcaggctcagtgtatcacatgtctttggatgtctcctatcattggcttcaagccaagattgaaggctcacatgtattgaattcctggcctgtccagctgggacagagagaatgagtagagaaactaagtatcagcacactttatagttaaagcctgtgtgtacgcacatgtgtgtgcacacacgtgtataatgtaatctttatagcgtacctttttggcgtttttattataactgctgtgctgacaaggaagtcgagactcagagaggttaagcgattcgtccaaatcaaatattctagctacagtgccaatgcccttggcacagtttcccagcacttcattgttgaaacgtttggtgtgttcctgagggcatgtcttggggctcctacattaattactgaccatcatcagagatctactagtcaaggctaaaagattcccaatatcaatcaaattacagccgagtctgcatctatacgaagtcattggtagcaataatttagtagttaccattagctccaatgtttatggggagaaagcatgaaattatggaatcaaacctactgggccctgaatgacctgaattaagcaaataatttggcctcattgaggcttagttttctcatctttgaaatgtaaaacagacatcataatacatggagttcccatgaagatttaatacgcaattaatgcatatgaaagcatttcatgagctacaaaagtgttacaccaatctaaggtatcatcatcatcccacgcttacagagtaaccaggaatctcaagtcaggaaaagtccagtgcagagttcggaataacacagaacaagctacctaagtccagaagtggggcctctggtgtttgttactgagagaacccctttgagacacacaccgttctcatgcgttggacttactattagtgtcttggtctggtgaatttttgctcagggctttgtttccctcataagttaaaataacgacaggcaaaggcacgtagtctagctgaatgctctccatttttgtttcagacctggatatcctacaggtgtgaagttgccaagaataagggagacccaggggtcaaggggaccatggtagagcactagagtcaccctttcctctgtaaagtcgtccctgcgttctcaagctgtgtcactgaactctgagactacccttctccagcagtaattgcttcatcctggagttgccatttgcttgtttctctgccctcctagactgtgagctctttgaggtcgggacctgtcttaatcctgttttggctgcatcccagagagtgctcagagctcatgctagggtttagtaaatacttagtgaatgaatccctcctgtggttgtgatgttggattacgagccccatacaaaagtgaaaatgaggctggaattatagttggtttggtcaccattttgattgtactgatatttgattgaatcagactactgtttttcaggctttaaaaaaattatagtcgccctaagcggcctttttagacatttctctcttgtctcccccagtccccttccattaaatttaataccacagatatactatataccactagttactgtggccctttagaagccgtagccattttcatatgtaagatatttttgtcccccaagaaccgatttttgcccccttgaagtgacaccacccttattgagaaatcataatttatagaatcaggtggtttggtgctgtgcagatattctaaagagttcctatttgatatgtacatagtcgattataaagttcttaagcctcagttgcttgttgtgttggcatgcttttaagataaagctgttggactgattttttttggggggctgtggtgtaaaataactgatgcttttggcactgtctaggaggcaaggccaagactttcctcagaccagcaacagtgtttcagtgtgggtctgagttataaacaaatctgaagttcttagttccattttttaaaaaaaatttagactaaaaatgtacttacatttattattaatagtttagttagagccatgcttcctgagcaatcctgccacatccttcctatgtgagctatttgtaaataatgtactatccaagttgggagaatatgttaccaccatatacacttaaaaagcaactataatgtggctaatgtgcagaatgaataggcaattttcattgtctttggatgacgtgaagtagctctctggcaaaaatggtgcaagcagccacggtgtttgaagtggtgagcttcaataggagtgccatttcttttttttttttccttttttctttttgaattattttactttatcttatttttttgaaatggagtctcgctctgtcgccaggctggagtgcagtggcatgatctcggctcactgcaacctctgcctcccaggttcaagccattctcctgcctcagtctctggagtagctgggtttacaggtgcccgccaccatgcctggctaatttttgtatttttagtagagacggatttcaccatgttggccaggatggtcttgatatcttgacctcataatctgtccacctcggtctcccagagtgctgggattacaggcatgagccactgcacccagccttctttttaatttttgtgtgtacatagtaggtacatttatggggtatacgagatgataggcatattatcttgtgtatcaagatagtgggtatatatatttatggggtacatgagctgttttgatacaggatgcagtgtgtaggaatcacatcatggagaatggggtctgcatcccctcgagcatttatcctttgtgttacagacaatccatttattttcttttagttattttgaaatgtacagttaaattattgactatagtcaccctgttgtgctatcaaatggtatggagtgccttttctcatccatcgcatggagagtttagaacagtttttgaagaatatgaaaacatattggacttgatttcaaagaccccttctattatcatgctcgtagggcctctctagttgtcttttaactctgaggtggaacacagacacttttaggaaaacgtacgcttgacaacttacccagagaaacctgtctttgcttggagagccgtccatgttgttctgtttgtactaacatagatcctaaacatttgaagtcttctggcatctcattgtgaagttctgcgatgccatggttgatcattattagtatatggagttataagatttgattaccactggtaagttcccaaagtgctttgtgctttcccctttatgtctgttattgctcttaaccatcttctaagattgataggacagatattagtatgcccattttatagatgagcagcctgtggctaagagaagttaagtggcctctctagcagattatgccctcaaatgtagaaaaactcaatgtggttcttcagactccaaagtcagtgccatttacttgcccgtagtaaatgccttcagccttcttaaaagccatcgtggaggagtgagcaggtcccaagaagcactgcctggactgtgagtaggaggaggcagaagttgacttaataaaggcatggatttctagcaattaggacatcccaatagtggcatgaactactttgagaattagagagtgccctgtcttgaaatggtcatctggaggttggagtgggctaaactatatagtatgccatttggctagatgacctttcaggtcccttacaattctgagactttgttgaaaaaaaaaaatgttctgtccatttcctcctttgtggtttagccacatacatcagatgcccaagttcgtggttcctttcccagctttgcatcagaagcacccatggggctttgtgagaatgcatatgccaggcctgcccccagctctcctgtatcggaattccattggtggggtggagggggaggcgtgagagtatgtttcagagttccacaaggatttctaagttgttaaattgtgaaccactctccttgtgtagcccactgacaacaaggcacacacagacctctttttaaacttggtggtataattcagtagcatcaaggaatcatagtttctcagtgtgcaatacccttgttaatattaaaaggccatttaataaactgcattggttctcttggctgcagggataccatggtccctgcttgacagattggttttgcccatatcttatcatccctgcctgtttcgcagcagagtgggagtttggtgccagtctagaaaatgggcacaggtccttttgtacccttcttattctggaaaatccagctcaaagggttagcattgggtgcgaaggccagcctctgaaatcagcaggttggatacagaaactagggagtggctcactgctatcctagttacctacttctacgtactggttttctttgtaccagttagaaacctccagtgcacaaagaattaacggttgccattgactgctttcttgaagacttttcttgatccagtactgagctgtgtttatggcactcctctgagagcataatctctgaaggatatgtctgtataaaatatacagcagaggatcataaattctccatcgtgtctccccatggcgggccaacaacaacaaaaaattcacaattgctccaccagtattttttttctacttttcaatcaataggatgctttttaaagcttatgtttctcgtcggacactttaagtgacgaatgagacaaaagaaaaaaaaaagccaagataaaatgacagtatagacactcctcaaatcctataatgaactccacagggcatccaattttgatgtattaggattttttttttataatgagtacattgttggaaatcacattttctatccgcaggagctggagatgaaaccgagctgacatcttacctctttgtagttaattagcaagagaaaagtagtgttttgaatctcgtgtgggaaaaggggaggtattattcacccaccctcgcccctttctcccttcaaacacctggatcattctgtgtgctctttgatttggtttaacggtttggataagtctggctggcagggaaaggatgagggaggttgaagaatggttattatttaatgaaaaaaaattactgtgtctccctctcccctccatcttgcttataggataaataaactaagtcaagtctttttattttaaagatcagtttcttacctggactcggactctaggcagttcccgtggcacaagggttgtttgttgtcaccatcgttacattagtcaccgtggaatcctcagtgctcagcaccgtgcatggagcttagcaggcatttgatcagtatttattaatgaataaataaaatggtgctggcccatacagtaaagtattctagtcgcattagctgtgtctaatacctttctctgcatagtagccacatccactttaggatttgtagtgaggtttccgtagaattcagtggttagggacagagggttggagtccagtgtgcatgtgggattccatctagggactggtcattggcaggtgaatggagctggggtccatacagatgccccgtccggatgaaggataagtgagtggtgggcagatgcagcacgagggctcctccggcccatacgtctttattaacatcacatcacatgcccagtcctggggcctacagaggagagccactgtcactaagcacatacttgtaagcactgagcactcacaggttgcaccgcatgggactgatcccaagtagaataagatggggcggcagggccgggtgtggaaggaaacaccactttttgcatctcctctccctgcccttgctgaactctgcctgctccctccaccgtcggtcctcttcacagccacccggtgggggaccccaggggaggtgactcagtggaggagccctgctctgacaaagtcagtcccacagaatcgcagtggccgggctctctccctgcacagcgcctcttcctggggtccccagctcagagaagcctcctggaggaagcaagactcgaggggaccctgaaagcaggcagggcttggactgtgggtagcctgggacactgtggactggggacagcaggacctggggtgaccctgagggcagagagggcttggtgggcgagccctacaggctggggacagcaggagccggtggtgggtgtgaggggttagcctggcctggggagggtgggggaaaccaggttgctgtcataccagtgatggagggccctagtggccagccaagggctcctgtaggccccagggaaggggacagagatgacaggtgtggagaagcagcaaggaggagggcttgttggcctctggctaggcttggggttgtctccgtccctcgtgagctctgagccttggctttcctctcagtaaaatggacataggagcatttaccccaatggccaagggtggctgcaatgctgacatgagtctatggatctagaggctttgcagggcacaggacactgtctgaaggcagagtctgaggttcctgtccctataggattgcatcaggggtgcgccatccctatgatgggccagctaagcagctcccatggtggccaggtgcgtgggtaagctcatgagccactttgtggctttgcaacaacaaagatgagctactgcttccatttggattcctgctcttgctttggatgccctccccgccccacaagtcatctgccgtgaccgcttcctccgtgtgcgtctgacgtcccggtatgcgtgtgactgctcaggcgtgactgcttagcgcccaccaatgctctcctccagacatctgcatctctgagcatcttagcctgggcctcagtccagcctcccccacttgatatttgaatgattttggacgagcactgtgttttggatagcactgtggtgactgttactagggaatcatctggacagcgaagaaaggtccgacgtgtctctggttccccaacctcttcctcagctgtactgcaggtctccgtaaagggttcctttcctgtttccttcctcccctcctgcttcctccccttccctctcctccctccctttccttccccttctcttcctccttgccctctggggctcctgtgagtctcctgatgactggggcagcaggtgctgggacacaggagagcacaggctgagagctggctactcagggatctgtggcgctctagaccagtggttcacaacctttccttaacactaagaatcatcttgggccaggcatggtggctcatgcctgtaacctcaacacttcgaaaggccgaggtgggaggatcacctgaggttaggagtttgagaccagcctggccaacatggcgaaaccccatctctactaaaaatacaaaaaccacccaggcatggtggcatgcacctataatctcagctacttaggaggctgaggcagaattgcttgaacctgggaggtggaggttccagtgaaccgagattgcaccactgcactccagcctgggcaagagagtgagactcctctatctctaaataaataaataaataatttttaaaaagaatcattttgggaaacttttagacatagattccctgaccaaggacattgggaaccaagtcacagtagcagtcaaatgatactagcaacgctgccatgaagaaaggtgataccggctgagttattctgcctgtgctgggccagactgctcaaatgcctcccgtggagttttgagctaatcatcaggacagtcccctgaggtgggtgctatcagtgtccccattttgcagttaaggaagttaaagcccatagaggaagaagctttgccaaagtcacacagctgctaagtgaccagggtggcaactcgggcactctggctcccaaaccgagttcttgagctctcctctccatgctcctttggtctgggtggtgcccagccatctgtctagataggtatcctgctgactgcaatgtggcagtctatggctggtagggacgtgggggaacagtgtcaccgacctccttgcacagggctgtcattgcactgcgggctacagcagagcccagttcacactggaggggcacccactcagctgggctgttttctgaggaaccagttgtttgtcctcccctaaccttccccacagcagcacagagtccaggaaccctgagcaccgggaccagggccggcttgggaggggtgggggcgggggctttgtgcacaggtcttgcttgtgggcctcatttctgtgtctctggtatgagaaaaacctggattgaatagaaagaccttccctgaaactgggaggttgctgagagaccaaagaatgacttggacaagtccagcttggcgatagatgagtttattaggacttacatagcaggcactcctgggcggcaggacagatctagagatctctgctgctcccgtctctaaactgcctttaagctaatttcctggctctttgcctactgtgtttgggcaatgagactgcttgtcttgctacgttctcagataagttccggggcattgggttctcagggacgcctgctcctcagctgggcaccatggcctcagctccacctgacttcaaggctcaagcagtggacacacacctttaaggaacctgctgggggaccgtcgcactgcgctgcctctctcatttcccatttcttgtccccacgaagcctctccggaaggcacaggctctgctctcgttcttactccttccttctcacacagggacctggggatctacacagaccacgtgggcctagactgctggcccagtgacccttggaggcccccttggtccttctagatgagccccacctgggaccccacgcaggccgagctgctcttggttctgacggctctgctcggcctccctcccaaatctcgtctacataagacctgcttccctgctggcgaagcaccaccatttctatggagaacttggggtgtcattctcaactccagtctgagttgccatcatgttccatgatgctggcagcgtgtcccagcctgtggtcacttggcaccccctggagaggtggacttgtactctggatctgcagcccaggcagcagtgggagcctttcctccagctcagccccggtgcctctgccctctcccaggtctcatggactctggtggacaaaggttcttgtcagaggaagtcgttgacagggtgcgatgggaaacggcctctccagggaggcaagattccagcctcagctcttgctcctgtagcccctctttcggaggtgtctttctgcctggattaaacacttgctcattaaacctggcttaataagaaactagaaaagaaaaagaattagaaaaattctgattctagactgggtaatcgctttgagaaatgcgatttttcccttttgccacttcatcaaaagagtgagaatctgggcctttctagggtgtggatgaaggctgagctgcagtctccagcagaggaagctcagtgcccagaccagtagtacacacaactgagacttctagaatgaatgaagaatgaatgaatggataaattggagtgaggcacttacagagataaaattcagtttgataagaaggaggcgtccttaaatcttgtgttttctcctagagttgagtcctaatgggggcggcatccttgtacggaaacacgaaaggttaatagcaataacaatagaaacctcgtgtttgtgtatggagagccttacgcttcccaaatactttcccacagatgacctcatttaatctttgttttgtcacagagatattttattcccatctaaaaaagtaggacacccgggatcacagtcaaaaaggtattaaactctgtgttggaatgatggtttaagctacttcttgtgacttctattccaattttccccatgtcatcacggctgattagagaataattatgataatacaactgagaataatataagatgtagagacttaagtcccatgtgccaggcactaatcacccagtttgcaggtgaagaaactgtgcatagagtggttgggtagataaaggcccccccagcatgggtgtgggtcccgaggaaaggcatggctcatttgccagggagctgtggtgtggacctgctttgcctcctctcccagaccccgccaaggtcatgcacctgcccagcagcagagccaggaggccaaccctgacaatctgactcctcaccactacctgctggcatctcaccacagctcaccggctctctcttctgttcttatgtactgcgtgggccagttccctgctctcttgttcttgtcccagcagcccaacagtagcaaaatctaattatcctaacctggaagaatcaaaggtgacattttctccacggataggaagctgtgctggaggactgtaaacattggttgacttatctcggggttctctttaaaggcacctagttccatggatgacttagcttccatgtagctagatgaccccagaatgcctgattttcctggccccaggtcatgcttgtatgtctcttcttggattggatgcttcgtctaatccaaggaatggctgcctttaatcaacccctctccatttgttcatcttcctctggggctgtggggtaaggcagtggagggagatgcttagagaggacatcatccttttcattttttctttcaagatatttttgaacagcaacgttaaagcccccgtaatgctgctgtgaattgttaacaagcatgtttgcacgtcacatctatcatgctatgtgcgcgatgttatgtgaagacacggcttgaagtatttttaagatctggcctttcatctctggaagcacaagaaagtatttgcagattggtctctggaatgaaattagcctagcacgttggctggttcctgtaaagtgtgggcatttctgtaagtggttctgagtcccttaatccttttgatcatttgcactgtgtatttttacacaggttcttttactttggagaaataaagtaaagaaacttaaaggtgagtttggcaagggcatcactgtgctgtttgtcaaggcaaatgaatcttgaatttgaatggtagtagtttcttttaaacaaccaagcttctttaaacctctccacaaataacgtcagtggcagattatgtctgaaagtgtttgctggcgagtggaaatctttcctgaccccatattgctgtcatgaaagaagagcctaatcccataaaatattcttgacagcctcgtgtcagttaccacacagctgtgatttcttatctgggctacagcctgtgtgacatttgttgtcacttcatggcttcaggtttctccattcagaagctcaggtcatagtaggaggttgagcttcatccccggttgaaacctggttcgcgtatgactgaatcctcttacgtcctcactgttgtgtgaaaaaactcatagggagaccttgatttcctcatctgtttaatggggaccatatgtctctggcaaaatagttgtgagcaatgtttgtatgtctgtgttcacagtagcattgtttgcagtggtaaaaaggtagaggcaacccacatgttcgttgatggatgaatggataaacaaacaaaatacacccaatagaatattattcagccctaaaaaggaagaaaattcagacacatgcaacaacatgggtgaaccttgaggacattacgccgagttaagtaagacagtcacaaaaagacaaatagtggattccacttataggaagtccctagagaagtaaaatccacagagacaagaaagtggaaagggggttgccagggcccagtgggagcgggcaaggggagttgatatttaatgggtacggaatatcagttttgcgagatgaaaagagttctggagccggatgattagtgatgattgcaaaacattgtgaatgtacttaatctgatggtaaattttatgttatgttcattttatcaaaataggaaaaaaatcatgagcattaaatggcatcaagtagataagtggctaccatatcattgttgttcactaaatcataaagtaacagctttgaccatgtgtgggatagtaaaatatgtggtattttaatggttctatgaaacttcatcttatgagtataccacgtttgtttccctttgtttggcttgtgtatttcttataagtattctaccattgtaataatgacagagtgaattttttgtgcatgtatatatcttttctattagttgaagttatacctttgagatggatttcctggatcacttaatcaaggtaaatgagcgtctttgtggctcttgctacatacacccgtggggtttcagaaaagatttagtgattttaccctgtcactagccaagtaagggcaccatttcattgtatcctcaacagcactaagatgcttctaagcaattttattaaatatgataagagataatatgttagtgtttgaatatgcatttatttgctttcattttgatcactaaaaatgttggcattttgcatgtctcaatttacatgtatttcttcacataggaagaaatacatgtaaattgagaagaaatagcctgtttacgtcttttgcttatattttagtgtggtttcaatgtttttcatgccaaatatgtctgtcatgttgataacatattaccatttttaatattcagagatttttaatgcttatgtagttgaatcacttatttaaacatttcaaattacaaaataatatgttctactagagcaaaagtggttttacaatcacattattatacctactgtatctttttcccaaactctccactgtcattcttttcatatcttttagcataaaatctgtttagatgctaacttgaatgactatagtatttgaattaaaattatatggactagccaattaataataaaatattaatataataataacccagtataaaaggacatgccaattagagcaaagaagaaattaaaattgctaataaccatgaaatttgtgttttacttcactaataatataaattcatcctaaataaaacaatagaatcctatcttccagctatgaattgctaaggattaaaaatgttgtaatggtgactgagactggccctcaaaaacgctgccaatggaaagagaaaactgggtcaactttactgaaaagcagtttggagctaggcatcaagaaatttaaaaatgtttagaaacattgatttagaaattccatttatataactaaggcttgaggcagcttcagaagcatggaaaaatatttacatttatggataaaaatatatttcagtctaattgcccaatgacaaggaatgattgaataagtagttggacaaccatctgatggggagttatgtattcattataaatggtgttttctaaaagttttagtgacatggggaagtattcccaatatagtggtaagagagaaaagcatgctgtaatgaatgcagtggaagaaatttgtgtgtgtgtgtgtgtgtgtgtgtgcacgcgtgcatgcacacatctggtaggcacccaggaagagattgataaaatttattgatagtgcttatgtggcagtagtataggtgatttgtattttcttttttctttcttttttttttctttgagatggagtctcaccctgttgccaaggctggagtgcagtggtgcgatctcggcttactgcaacctccacctctcaggttcaagtgattctcctgcctcagcgtcccgagtagctgggattacagacacccaccaccacgcctggctaatttttgtctttttagtggagacggggttacaccatgttggccaggctggtcttgaactcctgacctcaagtgatccgcctgccttggcctcccaaagtgctgggattacaggcatccaccaccacacccagctaatttttttgttcagtagagatggggtttcaccagattggccaggctactcgaactcctgacctcaggtgatgcaccctcctcggcctctcaaagttctaggattacagtgaactgccatgcccagcttgccaaattctttactacacataaggtgactgaaaacagatagataaaaaatttatatagcctagtgatcttagtatggagggatctcttatttgccatgctctaagactataaaagaaagaaggacatgaatttcacaggtacaagcagtactgcaaatacccacccctgatccaccaaacctccaggaccaccactgagaacaggcctacttacagaggatcctgcaagtagacatatgtcaccatcattgtttaccacagagaagaattaggctgggaaaacacttaccaccctgctgggtatttaaatctgacccttgtcccagtgttaacagcacagcacgtatgtccctccttaactcactgatctcatgtgaacgagtgatcagcctgttttttacaggtttctctccctggcaccatctcactgtggtgcagctgagctcactacatatagcatggagtgatgataaaaataaattggctctttccctttgcagagtttcagttcttgagcgctatgtcagggtggatccataaggtttcctgagtgagcttagaaacctgaaaacccacgtttgttttttcatgaacttaaaacaatttattagagcacaatgtagaagtcatcgcagcaagctccctggaagagaactgtatgcttttatggaaaaagaaccagtaacagagccttgagagagactcttagctaaagtctaatcctccttccattcttccttcacagggtagagtttcagcttttgtctgttgttttttttgtgaacaaaaaacttgcaataaatggatgttgtcagtaaatttcggttgtacgttttgttttttccaagaaaaaactggccatgcagaagtcgtccgagtggtgtaccagccagaacacatgagttttgaggaactgctcaaggtcttctgggagaatcacgacccgacccaaggtagagtgatgagtgagccagtatttaattatcttactaattacagctgggataattagtgtttgagctgcatggaagagatgaaccttgaaatcacacaggagctcaagaatatgattgcagacatttattgacggaggagaggaggggctggggagaaaaagggtgagagaataaaggcacagccacattcggcgcccctgccccccttacagctgtcaggggtgggaaaattcccacagaggaagacgccagacaatagcgatccgttcacctttgattattgcattattcctccttaatgcagtcttttgtctacaaaattaaagtgtctttccagcagctccaaagattcctgatttatggtttctttatttctctgagtttagcctttctcgtcttttgacgttatcaggttggatttttttaaaaaaatgtatgtggtgataaagaagaacataaaggtaaaatgcagtattcactaggtccacaaagcttgctcatttaaatatttcatttgttctctttggaatttgttatgtggagatattaatatatttgggctataaacaatggtggttggaaattttatttgaatgcatacacaagtgaaatattccatgttggcaaatatcattgtaatattcaataatgaagcaatttcaagatcgcatcccagcagccttgcaggccctgctttgccagtgtgatgatctgatattatgcagcttatgaactgaaaagtcctatgcaatagatgtggtttttcacaaaccctcttcatttggcagtcagtctatttcaccaaagtattttctctttggtgtcagatttttgtgtagtggatatgcagtgttatttcttgatgagtgaagtttttctccaaatgtaaattgtgcttcatggtggaatcttcatatgcctgtagcagcacaggttggtgggtcctgagtgctggttctaagaaccatcccattctagggctttttgccagagggcaaaggtcagagatgaggcaagagcagcaaagtgacaaactcgagcagggtgaggcaggttcaggatccacgcagatctatcagggcagatggcggcctagaggtctgggcctaggaaggaggccgggggcacgatttccatgaccacaaagtctggtttgacatgggggaatgggtacctggtggaagagggatgaggtatggggcagggtagggaaagaaccggtaggacaagaacactctaatcagaaggttcacgtgtcaccctagcttgggatatgggacatcacttcatgtgggaaggcaggtctgtgggcctagattgctttggttctgcaggaagctctgcagtgaggatcataaatcagggtggtgacagccagtcgctccttctggtaagtcatcaatccagatggagcagacgttcagccatttgactgtcaaagtcaagggtcagaggaagatgataagagctccaaaattatcagtgaagacatgtatcagaggcccaggcaaggcctgaaggcatgtaggtgacaggtcgggtctgtgtcctttaatgtggccaactgcaatgccacgtcctgatagaatctccttaggcttaggcctggcagaattgtaaagaaggccaagtctgtcgtcaacttctctctccataccgctcttaaatgctttcatttgatcacatcttcattgattaattgggttgctaataccggcccctgaacctcggggggaatactactatgatgagggtttgggctgggagaactcacctctctgttcatcatttggccttctatgggctctgtgtttgtaatggtggcatctctggggttaaaaaagattttccagatcttcacatcataggtggtaatatggagaccaaaacaaggcaagggcatggctaaggttgtagcgtgatccagtctccccagctgaattcagagaaccactcatcaacaccagggcaaccctgactgccccaggacccctccaatctgtggtccccacccttctgcctctcttatggaccatctctttccataggtcagtggcctccccacaggtgaggaagaggtaaggaagggcaggggatgatggttagttaagggtagggcgagagatcctccgtcaggaacctctactcagctggctttgtttttcttaagctagttttttagtttctattacatgtaacagtaacaaaaatccttactaatccacccattcaatccaaacaatcttatgcccattatatttgccaggtgcccttttattttttgtttttgttttttattttattatttttttgagactgagtcttaatcctttgctcaagctggagtgcagtggcgtgatcgcgtctcactgaaccctccacctcccaggtgcaagcagttcccctgcctcagcctcctgagtagctgggattacaggtgcatgccaccatacctggctaatttttcatgtttataatagagctggggtttcaccatgttggccaggctggtcttgaacttatgacctcaagtgatccaccctccttggcctcccaaagtgctgggattgcaggcgtgagccactgcgcctagccaccaggtgtactaaatcactaaggcatctgggatacgcacgagtatccggcctcttggttaatgcacatggaaaatatattcctacaggaagaaaataattaattccaatatgctgagatcaagtgagcatacagataaatgcgcataagaccacaggctaaatgttaacatgaaatcattaaaacaagtatgtgttagcacttgaacattaaaggcaaaaaacaaacaataaccaacccttaagttcagaataactctggtatcaatggagttgatattcctggggaaccctgaaggtccaaaaacagtgacacatgtcaagtgtcatttttccaaggtcagaatttgaagcctgctcctcgaaggatggaccagaggcaggggagagccaggctacaaatgaacttggctatcactcactcaccacatctgaccacagctgcctaaatctctacttgaggtcacatggcaacctgtcacgtttcacagtaaaagttggtcttgaaaagaaagccgccactagagaagatgagggtggtgaagatatgtaagactgactgttcttactcagaaaatggacattttgaaagagagcagcaggttggatttggtggtgattctgatctgtgaggcagtagtccactccaggttcttttcagaaacaaaagtgattactaaaactactcgagcaatgctcttgcctgtgccagaattgcttatcaacaaaaagacaaaacttgtgtagaagttgaaaagtcattgacatttgatgtgaagatgcgcccaggaaacatgatttccacagaaatgtgactcaagagaaatgtattttaattagcatgttgaaagattttagtacctttttgtaaagtcattaaggacttgaaggggccttaaatttttttggttataattcactgcattttataggagaagcagtatctacagtgatatttgcaaatgtggagattcttgctgatgtcaatggtcttactgtagtagaaacagcaagaatgtaagcttagagtcccctttcagttaaatcagatcttcatggcataggctaaacagagaacattcagcatgttctttcctgcttcaaggtgctgaagcagctctcatagtatctgccctaatggacatctagatgaagtccccatgtgttttcttcctttttttttttttttttttttccggatggagtcttgctctgttgcctaggctggagtaccgtggtgtgatcttggctcactgcatcctctgcttcacaggttcaagtgattctcctgcctcagcctcctgagtagcttggattacaggcatccgccaccacacccagctaatttttgtatttttcatagagatggggtttcaccatgttggtcagcctggtctcaaactcctgacctcatgattcgcccacctcggcctccccaagtgctgggattacaggccacaaggcatgaaccactgtgcctagccttctgccattttggagggagcaaagctggtaagtgagagattggaaggtgtaggctttttaaggtataggtgaggcccgagacctgttattccacagccactagacagtgagtctgaagaggatgccactccacggattagcctaaggaggaatgacagacatgctagcatcattactcatgtggtcagtaagtggaatagtcttttcttttaatttaccaattaccacagaacctctacttttgctgaaacatttgaatcccactgtttaagccaataggttctattctggccttctttcttactcatgggatgaagatagttcctttaggcttctgaggatagactggcaggtgtacattcctggccatggggtacccagactcccactgtctccaggcaacgtggtgggtgcctgagatttaggagttttgagttctggtccctggttggccccttcccaaccacatgattttggccaggacacttacccaacctgaacctccatttttctcatctacagaaaaagggataataatgtctatactgccgacttaatggtctgatgtaggaattaaataaaatagtgtgaaaataacatgaaaatggtataggtgccatgccagtgccaggtattgttgttacgtctttttcaacacaacaatacaattccatcagattttaattttacatttattcttacatctgtgttgcccttgattctttgtctgggtaagtatttaccctccatctactaaagtgtgggttttctacccaccgagattcttgtgtctcttgcattggttggaaagagttcagcattgtttatgttgtcttctgggaccttgctggtgctgacagtggtgatgaggctggtggatccttgctcaaaagcctccttaaggcttcttctcacagagtaatctaaagaactggatcaggttcccagcatttcatggctggtctgtatcctcctaactagaatgacctgtgcatgaataacacaattcagacctcctagtcctgcgtgggactcggggcacagactgagtgcctcgagccaagccacaggtacaccaggcagagggtcttcagttttgtgtgacttcacccactaaatctgatttctcagttgcaacccatcttgctgtcctcagtcctggagcaagggagagcaatatttactaagcacctcttaggggccagtcttagcgatagatgtttcataatcctaattgcatttaaatctgaccataaccctgtgaagtaaggatcattgtctttgcttagcagaagaggagcaatgaggttccaaaagactcataatcttgcttaatgttagtggcggtatttggatgcagctctgtctaaagctcaggtctattttcttttccatacactagaggaatccaagcttcctgactaggaagacctcttctaaggatgcacatttttttttttttttttgagacatggtcttgctctgtcacctaggctggagtgcagtggcacaattggcttactgcaacttctgcctcccaagctcaagacatcctcccacctcagcctcctgagtagctaggatgacaggtgcacgccaccatgcccaacttattttttgtatttttggtagagatggatttcgccatgttgctcaggctggtctggaactcctgggctcaagcaatccacctgcctcagccttccaaagttctgggatgacagaggtggccactgcgcccagctggggtgcatatttttatggatcctccagtgataacaattgggcttttagtacatttaaaaaagcaaatatattaaaatgctaccatggatttaattatactttaaattgcatgcctatcatattcaccacttccacatcatgtacttctggaaaagggaactattgtacacataatgcattctccaggctctagatcttgcctgctgcacagttggatgcgtggagcttttgtggcaactccaagccttcccagaggactgtggtctggaaactgctccggtatactccttggggagcagtggcctttgcagaggcctctggctgagagtgctggttaaccccaatattagggttcccccacctgtgtagtttaagaattttagctggtgtgcagccacccataaagacaaaatccctgagacaccttagagctaagtatggccacatgtctaaattctgactatgggggccttagtagaagtgacagcgtgcagcttctgggtttgtggccttagaggaaggggcattctcttccacttcctcccttcccacaagttagtgtggggctgaagtggtggaccatcacgaagcccagggatggagcctgacccttgtgctgctagagctgtgagactaaggagccagagtcaccatcccaggctggatctttaggcaagaactcttgtttaaagtactgctattgtggttcattgaagccttcttattctcattttctacagcagctgaacctatgtcttgactaacacagccttcaactataagctggtgatgaactcccagttacccttctgaaagccttaattgcagtgttcccttaattaaaacgtctttaatcaaacctgttgttaagagtgtggaccctggggtcagagatgtcatggctgtgaaccagatcggcccggcactcgctgtgcggacaggcctcatttctctctatccacttgaccacgtaggtcctccagtagtctactaactggcctgtctcaccctttctcattccctgctccataatgccctgttaaaaacacaaaaccagctgtggccccctctggcttaaagcactttgccggttgcccgatttctttgggatgagatccggactctttacagtggccagtgtggcctgggattacctgattggcacttgcctttccaactttggctcataccacagttctccccagactatgccccatccatgctcactgtgcttcagttactgtcgccttcatctgttccattcctggaagacttgagctctttcttgcctcgcacactgttcctactgcttagcctgtccatagctcttggtctgccaccaacatcaggcaagactgcaagtctttggaacctcattgcttctcttctgctaagcaaagtcagtgatgcctacttcatagggttatagtcaggattaaatggaattaggattataaaacatctgccactaagactggcccctaaggggtgcttagtaaatgttgctcttccttgctccaggatcgaggagagcaagaactatgtgactggctccttctcctttaagtctcagctgaagatatcgtcctcagaaaggtcttccctgcccaccctaattaaagtagcagtcccagccctcacccccatgaacttctgtactatcattctctccttgcttcctaactcatcatgaggtaaaatcacatgtttaattgtttattgcttattctctgactcctctagaaggtgggctttgtattaaatgttttctcgttgaactagtgagtgaacctctgtttctgcatctgtaatagtttgtgccttctcagtgtcggggcgcacacgggcgcggagcctgccgtgcagagcgtggcgcctggtgcggaataagcgctggctctaatagctgtcgtgctcatgccgcctgtggaagggccgtttccatcaccagctgctgtttgtttgtcttgttctttcgtgaatcccagtatttgtctgcttgttctctatcatttttcctcagctcatgttctgattacccctgatggcttcctattcttggttcacaccctttatcctcaatcagctcctcttcacccctttccacctgcagcacagctcccagttgtcctcagaaggcttggtctggtttgccccccgtgggctgcaccgtctatgctgttgggtttcctggggccccagggccacacatcctggccttaccgtgagctggggattctgtggggctcctcagcctgtgcttggaactagagagcctgcaaggactcttctctacttggtgtccttgggctgcatgggcttccctgccagacgtgtgcagtcaccacaaagccctgctccaggcgagttttttccaggtggtcccagggaatcgggtgggataggtccactccgtgttcaggaggttggctcccgagcctctttccaggtgcactgtggagaagcaggtcccctgtgctgtctactgggaaacattcattgaagggagacaaatcctattttccttctgttccccatcaacttggcaataaaatactgtcgttcgtatatttgaacttgccagattaatatctgaacttccttgtgctgaccccttgaagttagttttttaaaataagtcaccagttttgaaggactatccttttttagaccatatacaaggaatctatcatctgcaaataattagacagtgggaatgatattgtattgctaatgagcagatgtgcagactcggattggaagaacagctgcacacatataaaatgcaaaagctacccaaacccagcattatgaattctgaaagggatttcattcttttaagaatttcagaaacagagaaaaatgaaacaaaagaatttaactgatatttttattaattgttctttcagtcacactttcccttctatcacattatcatacgtgttcatagtatctttgctgtttgcaaaagtgttatttgcacttttaaatccttctgtcatataatactataaagcttctatttaacatttttcctttgcctttctagtgttacaagggtttggtgtctgcactctgagtgacagactcttactgaaggtctttcctgagctgtgcgcaatgctaagtgctcatgtgtacgtgatcccatttgctccttaaagcaacctatgaaccttagacccattttgtagaggaacagaaaggcccagtgaggtgaagtgatttggcacaagccacttactacattgcttgacggaggtggaattcggacttcagggctaaaatcgaagcctgatgttctttctgttgggtagcacatggccccacagtgctacacaattctatcagaaagcagaaaacatgacccactggaaacagcagcacattatccgatgattttaaactctttgtgatgtccattacaattttataatcctattaaggatttgcaagatgaagaagtccaaataatcaggcttttgaaaacttttagccaggaagagtttcacatatcttagatagtaatggttaggtcatttagaatttgaataaattgctgaaatggtatgaaatcactaaaaagaaatgaagtcagaagaattactagacttcacataaaagagtactgaattaggtcacagaaaaatcagagctggtaacactggcaggaactaggatttctaggttccaggaatggcaggctgagttattcagaccaaattgcccactgaaagcagctccaaatgttgaataaaatacaactatatatataaagcatcacatcaaagggctgacagaactatgaggaattaaccaggttaaaatggaaggcaacacaggaacccagacaggtaagcagaggattagatatatctttattctgagcaaacttgttaatcccagaaaatgcgagctttgagagccttattaaggacgtagagggagtgaccgacacaattccagcacttgacccagtggacataagatgctgtaccccacacctgggggggcgccttcttctcaatcacacaaggaacatattccaggccataaaaggctcagtatgtttcaaagggattaaaatcatgtagctttttttttctcttaccataatgcaagtattcagaaaatcgtcttatgttagaaaatttaaaaatttctggccaggcattatggctcacgtctgtaataccagcgttttgggaggccaaggagggaggatcacttgaatccaggagttcaggaccagtctgggtgacatagtgaggtctccatctctacaagaaatttcaaaaaaactagctgggcatggtggcacatccctgtagtcccagctactcaggagtttgaggtgggaggggtgcttgtgcccaggaggttgaggctgcagtgagccatgattgtgccactgcacaccagcctgggcaacagagcaagagcttgcctgaaaaaaacaaatctgaatatcctagttatcaaagataaatcatgatggaaattgtaaaatactttgaatcaaatgataattaaaatactgtatgttaaaatcgatagggcataggtaaagcagttctcagagggacatatagagccttaaattcatatattagaagagaaaagaagctgagctaagcgtccatctcaagaacttagaaaatcagcaacaaattcaacccaaacagtataaaataaataatgaagggcagaaagaaatgaaatgggaagcaaacaaacagaagatcaaaaaagccaagagtcgatatttcacaatggctacaaaattgataaagctctgggaagttgttcaaggaaaaagtgagaagacacaaatatacaacattaggaataaaaagtgggatatcactacagatgtgggagattttacagaaaccaggaagatatgataagcaactttgtgtcaataaatttgaaaagttagatacattctttaaaaatatagtttaataaaactgaataaagacaccactggcttcatcagtgagttctcccaacatttaaggaagaaataattgcagtttttcataatgttttcaagagattagagagagatgcagtccatcttatgatccttgcatagtcttgataccaaaacttaactatgtaagaaaagaaaattgtaggacaatcttacttatgactatatttgcagaaatcctacgcaaactattagcaaactgaatttaatagtatataagaaaataatacatcatgaccaattttagtttcctccaacgaacacaagcttagtttagcactttagtattagcccatgtaattaaccaccttagcaggtattttaaaaacatgtatgattattgaaatagatgcttaaaaagtactgaatacaattcagtattcataaatgatttaaaaacacatataaaagatgactttcttattctgataaggagtacatgcaaaagcctatagcaagcattgtatttaataatgatgcattgagaaactacagagaatgccattgcaatttctaatcagcattggagtgggggtcctagctcatgcagtaagtcaaggaaagaatacatgtatgctgattgaaaaatccactagatacctatttatctttccccagccggacaccattcctcttctcccttgaagtggtcatgtgactgagttctggccagtggaatgaggaagaagtgacatatgctgcttccagacctggctcagaaaaacctgctgcatgatctgtgaacttctctctctatattcagtctgcctgctgaatgctaatgccaagggaaacctttgaagcaacatattgaaggtggtgaagcttctgtcagcctaggcccctgaagagttcatgaagtagaactgttaccatctcctttttattaactgctttgcatgattatgaaagaaacttctattatgtccacccactggaatttcagggtttacttatttaccaggaactggtaccttgaagtggagtgctaccaaaaaatctaaaaaaaaaaaaacaaaaaacaaacaaacaaaaaaaaacatggcattggcttagtagttaggcagctggaagatctaatattgggtcttgtttatggttggtaaacacaccaattctctccaaattgttttatgaattcagtgcaaatccaaatgagatcccaacagttttgttgttgttgtcgtcagtgttgttgtttttgtggatcttaaaagctaatctcgacatttatagggaaatgcaaaagtccaagaaaagcaaagatacttgcataagaacaagaggatgagaggacttattcttccagatatcgagtcattataaagctacagctgttaagacattgtgtatctgatgtagggacaaatgaatagagagttcagaaacagacccactcatgtcaaagtatgacaaatgacacagttggcatttcatagtactggggaaataatggcttcttaatcaatagtgataagataattttcttataggaagaaagttaattggatttctgcctcacaccatacacaaaaatcaattccaagtagattgaatacataaatgtcaaaggcaaacgtacgaaatttcaagtagataattttcatgaccttgggtttcggaagcatttcctaaacaagacacaaaagcactaaccgtaaaggaaaaatatttgacaaatttaactatatcaaaatctgacaactttggttcatcaaaaagcatcataaagaaaatgccaagaacagaaaaaaagaaaaataaaaaataacaaattgccaagaacagagagattatatttgataaaggattagtattcagaatatataaaaaatagacttaaatgtatgtgcagtatttttttttagaaaagacagactgctgagagaaaaaatgggcaaaggacttgaattgtggcaaagaaacataaaatgataattaacgttattaatcaggaaaatgcaaattaagatcaagtgagattccattacacaccaagcagactgacaaaaagtgaaaatctgacattagcagactttaatgaattggcaagcatttagagctccaggaattcttgtgcagtcatgtggttttgtaaattggtacgactactctggaaaaatagttcagcatgtacttaagttgaagacatgcaaacactatacagcaacaattctatttctaggtatgtactcaagagaaactcatgcatatgtataagagaatacatgtcaagaatgttctttacagccccaggctggtaatgttcattaagggtagaatgtataaatccattgtggtgcattcatacaatgggatattatgaagccatgaaaatgaagaaaatggaaggacctcatgatcataattgtaagtgaaagattcaaactgtagtataattgcatttatattaattttaaaaataggctgtattagtctattcccatgctgctaataaagacataccggagactgggtaatatataaagaaaaagaggtgtaatggaccccaagttccacatggctggggagccttcacaattatgaccaaaggcgaaggaggagcaaaggcacatcttattacatggcagcaggcaagagagtgtgtgtaggggaactgacctttataaaaccatcagatctcatgagacttattcactgtcatgagaacagcatgggaaagacctgccccccgtgattcagttacctcccaccaggtttttcccatgacacgtggggattattggagctacagctcaagatgagatttgggaggggacacagtcaaaccatatcacaggccaaactaaactaggtttattctgaatgtgtccgtgtgctaaagaaattattgcaaaaaccaggtgtggtacaaccagagagagggaaggcattgtcatcaatagagacacatggaagactctcaagggtacttggctgtactctctttcttgacattagtggtggtgatgtgagtattcactttataatcactaattataaatagagtaatagtagacacttaactgtgcgtatctattttatgtacctttgtacatttatgtcttatgtacttttctgtaattaaatctggaaactacaaaggtataatatgtcgattgctacttctgctaatatgaacactatccatgatggactagctttgtaaatgtgtgtgcacatgtgtgcttggtactgatttcaatgtaagcatgttgtaaatctcatatagtggggcactttggctgtaaaactttaagatttggacttgcaatgatgacctaaaaattttactattttgaacgttttctaatattttcattatttggccaaacttgggattttagaacataaacagacatggagtcccaaaagacattctaggacgcataataagtaaaaagattttctttggccaccataaatagaatttcccttttacacaaacaaaattcacactatgataacttttgacctttcatgaagaaatcaccacatcttgtcaaaataatttatgactatagaagtaatgtgtactccttactgaaaatcaggatctttcatttttctttttgcttttagatatggaataaatatgtggcacctctgttaaaaagcaacactatttcatctcccttgagatgcactgcgtgaaaaaatgcaaagaacattgtgcaggtgatagatagtgaccgtattgtgtggctgtcttccttttagaagagagccacataatatctttcatacatccctatattccaccttttttttttttacttaaattatatatatttacaaatcggaataatagtggttaagatcatggactttggagttagatggttccagatgcagcactggccttcaacaggcaaccagcctctctctgagtgtcagtttcacctttgagggagtgtcagtttcaccttggcagtgggagagggcagggatatgggtttactaatatcctccaagtatttgcagaattgggtgaataacgtagtaaagcacagtgcctggacatagtgagaactataggattgttagctactttgatgatccctctctctctctctctctctctctctctctctctctctctctctctccttcctcctcctcttctccccctccctctctcccttcctcccttttgatgaaaggagggctgtccattcatttattcagtgttttaaattaaaaatgagctgtcagttaaaatggacaggattaagttctcagataaagtgagatggttatattcatagggcttgtctcaaacacctaaggtaaaggcaaggtgcaccaggaggtgtcacctggataataagaagtgccatctttcactgtgaaggatagaggctcatccacctaggggaggacttcgggacaccatggcatgttttttcacagagaccctactttccagcagaaggtaggaggccaccccgaagcagcacctgggtgagctctcccagcaatgccagcatccctggtggtcttcctgtgccactgcagcatgcaggtagcctttggtgcagcagactgtaaggcaggatccgttttctcttagcagcagtctatagaagagaagaatgtggaggtcatgctagtaggagtcactctgttttcaaccaacatggacagtcctgctaatgagattgctcccgcaaagctccctaagatagagatagcgatttcagaccctgaggcgttgttcctgacttgtcctgatgttcactgtcagccggtaactcctgggacctcgtaaagtgatcacctagcaacaactcttagcataaacttccctttaaagttctcattttcagacacatttatcacgtctgcaatcaggatggataaaacagagttggtacccaaagatgagctgaggcttaggaggccctctgagcagaggagaagtcatcatcttatgcttcattatagatgaagcgtttctgttttcctctgcttcctctggctctgccgagagggagagaaacctcagagcagtcttagggttgtttgtccctttaaaatcttctttggagaaagtggatggagaaatctcaagcagttggtagatgtcaggaggtcagttctcatcaagaatgccccaaagcccagtcctcattaatcagtttatagagtactatggaagcattttaagcacaaggtgttgtttctgagccagtaattctctttccactcaacactgaaagtccactgcttgctttcctggtacatcaagacagccaaatagtgtcaataatttttcctcatagtttttcaaaagccaagtggagggcacagtgaactttgcaacacttgttgcatctgtgggaaagggggctctgggtcattgcttggtgattatgctcactcagggttccagaaaatactgtagctcatgggagtctgatctttccacgcatctctggtccccaccgtgacttgtcaagatacctatgtggttacacgcccaacccaccagcttcaggacccaccaggccccttgtcagaccttgtcctgcctcttcacagtcctcagaacgttccaagcttgttcttatttctgggccttgggctgggatgccccctccccagcaggtaccctacatccagaagcactttgttccattgtcctcgattattttgctgtaacttctcatgcatccattttggaaggagaaagggctttggtgtcggggccatcaaagtttaaatcgcaggatggccatttacctgctatgtgacctcaggtgggtcactgaatgtctctgatccataatttcctttttgtcaaagagggttaagaatatcttctccacagggctcatgtgaggatgaaacaagaaatgatggcaaagacctcgcacagggaagtacagtgtcaggctcgtgactactcttacccctccctccctcgtcctggttattccttgagacaagggattatgacctaattcttctgtagcctctagagtgtggaggctacagttgacacacacgaattctttctgctggagagaacatatttatttgcagaaagaggaaagacatataggagttattctatcatcaataacatttttctgtcctatctcaaaatataattttggttaattttgccctctggagaacagcattataaagcctgtttagatcaatttatgacagtcaaatatttcgtttgttttgtgattcaatgggtagacaagcagggccacttcttgtattcctagccgttcctggatgttggttctttcttctaggttttcagtctgttgagtttccagtcatctttcccagtgaagcatctttgtcatctgggcttcacgcttgagggtaccatgctcatcctcttgagaagcgggcatcagggctttgacacagatgcttcctgggttacagctgcttttgcaagcagtagcagttccttccaagtccctgaaggcaccgcactgctccgcagtccttacctttgttctaccttcacccttggcgcccacctgctgccaagacaagtcacttccttgatccagcctttgagacataggccccttccccactgatcacgtgaacttacccactccctttctgaaaccttgcattttttttaacctgcacagattttcccttaacacctctaattcttgcttatgcctgctggtctctgtttcccctgattatattaggaatgtgactagctgaaacatgctactgggtccaattcctgaatcccagtgcctggttcattttcaccacaacatggtggcctacaggggatctgtggcaaccctgcggctgtttcactctggggcactgtcacactcagatagaaactgactatcatccacccttcagctgctgagactggcagaaaatgctctttgctgactttaagttgcaggctagatgggtaggtgactttagtcataggtgcaggactcctgctatgtgccaagcaccgtgccaggaatttacacagacattgtctcatttcctcatccaccaagggagggatgatgaaaccttccatacaggtatctccttaggacccaaggaaataatatgtatcatagtgcattacatgtgacaattggagtagatcgttgtttaagtatttcatgtaaaagtatgtattcatagaacatctagtatgatccaagacctgtgataaatctacctgagttcaaagatacttgttgtaattaaaacaggcaaatcaaaacagatacatttcatgcttgtttaaagaaaatgctgtaaacagaaaattaaaacaagcacttagcaacacatcaggcacagggaccatatgaaaagtgtcaaaatgtctcagcattgtgcccagtttgagactggcactgtcgcctagtgaccgggtaaccctccctgttttctgctttcctaggtatgcgccaggggaacgaccatggcactcagtaccgctcggccatctacccgacctctgccaagcaaatggaggcagccctgagctccaaagagaactaccaaaaggtagggattgctgggctcctagcccctggcttaggccaccatgactagggccaggttctgattttagagggcagtctgctgcttttcaactggaattgtgttttatttgcacatctcttagaaatttctgtcagcctctaggagtggagccattgtgtctaatacgtgtgctaaatgaggttttaagagtaggcctgggccagggccagtggctcatgcctgtaatcccagtactttggggggccgaagcagaaggatacttgaggccaggagttcgagaccagcctgggcaacatgaagaaaccccatctctacaaaaaatacaaaaataagccaggcatggtggcctgcacctacagtcccagctacctgggagggtgaggtgggagtatcgtttgaacctgggaggtcaaggctgcagtgacctgtgattgcaccactgcacttcagcctgggtgacagagcaagaccctgtctcaatgtaaaaaaataaagagtaggcccttatgtgtttgcctttgaatcactcatctagatgaagacacagcctgttaaaataagtctttttccttctctctttatttctgtctctgtctgaaactctctctttttttcttccctctgtattagttttacagggctattgtaacaaacagtcacagcctggttagtttaaacagcagatatttattttctcacaattctggaggctggaagtccaagatcaaggtgtcggcagggctggttccttctgagtgctgtgagggaagggaaggatctgttccaggcctctctccttggcttctagatggctgtcttctccatgtttatattcacatcagcctagttttatgtgcgtgtgtttctttgtccaagcttcttgtttttaaacagtctctagtcatattggcttagtgctaaccctcatgacctcgtttaacttaattacctctgtaaagacccgttctccaaggaaggtcacattccgaggttttaggactccaacatatcttttggagggagacacgattcaacccataacactttctcataacagtaaattgaattatgataaaagtagttctcggaaatatatacatgatatcacaaaataattattttcagagttgtgtacccttttttaaaatcctccaatagagatttagttgttttaaaaacaagttgacttgctttagtttttagaactttgtgatagtacttgtattttatttatcattatattttctgatgtggatttgcatttgacagtagagctagaagctactataaagctaatctatgttagaattttgtaaaaagtcaggtatgcaacagcccccaggaatgagtgcagagacgaggaggctgtaactagagtgtccactggtgagcaagtagaaggacgggtgactcaaggtcagttcgactatgatgagcggagaggcctgagggaggcgctgacagagcccattccttccttggcccctcccacctccctcccagggtgatgtctgcttggctggtcatggtaggcagcctgtgggatggcccccagtgctctctgcccatatgtaattcatctccttgaatatgggctgcatttagcaactcacttctaatgaatgacagcagtgatgggagcactctgagactaggtcattaaaagattgtggctcgtattgtgaaaactctctgttaccgcgtgagagatggtaggggaagccagttgccacgtcatgaagcagccctgtgcagaggcttacatgacaaggacaaaagcctgccaagaactatgtgagtgagcttcgaatcccctcaaccccagtcaagccttcagatgagactgcagccctgcctgacagtttgattacagcgtcatgaaggacttcaagccagaggcacacagccaagctgtgccacagaagctgtgagataataaatgtatatactttgaagctgctaagttttagagtaatttaagtatacttgtatttccattctaaaaaccttttacctatatattctttctcttatccctttttcgtaatggcttttgtaacagtggtgggctaacctgggcatttatggtggtggttacacatgcagtctctagcatgaaattttctcaattcacatgtcatctgtgcagtttattatcaagtacctgacacttagaaagccatatgttctatttgactcaagcagacctatgaggatgagggagaccccattatccccattttccagatgctcaaagagagagcaatgaccttagaataaatgaaattaaagagaagtaagactggatgcagggagatgagttgggcagctattataggattccgggccagaagtaatggaagctttgtctaggatggtggaagtatgggtgggagggagggatatttaggaagtacaaagaccagaacttggaacttcactggaagtggagagtcaataagagggacaggtccaggtccaggtcatggctggtgattttttgtacaagtgtacagagaagcagaggcagatttgtggggaaggtaagttaagttgtgaaagtgcagagtctaaggtgcccatgacatgggcatccaaggggctgtttggaggagccatgggctgtttctgccttgcagggaggattgttaggactgctaactgggctaatgcttgtgaaacacagggcctagcacatggtaaatacctcataaacaggaacccttattattattgggagttgtcaacttatatttgctaaatgaaaccccagttgctgataagattacttgggaaaagtaatgagataaaagcagaagaggcagggcacagtgactcacgcctctaatcccagcactttgggaggctgaagtgggcggatcatgaggtcaggacttcgagaccagcctgactaacatggtgaaactcggtctctactaaaaatacaaaaattagccaggcgtggttacacgcacctgtaatccgagctactgaggaggctgaggcaggagaaatgcttgaacccaggaagcaaaggttgcactgagctgagattgcattactaaactccagcctgggcaacagagtgagactccatctcaaaaaaaaaaaaaaaaaaatgcagaagagagggcttagtacccgaggaactgattcctccacttgagcggtgggaggggaactgtccaaccaggcaggacactacactgggcaccacaggaaccaaccccaaccaagaacttaaaaagtggttcaattgtttcatcccactgtatttaattataaaggcagtatttataactactactaaaagtcacatatgataatgccatctataaactcccttatgtaatgattcgtagttctctagggtaccaagagtaataccaagcgactctggaagcatattaactgccctccagaatactgaaatatgatgatatcctggtgtttgcaatgaagattttcagttcaaggccagtgccttccgtgtgatggtgaagaggcttatcaccgaattttccagtttctatcccattgtagtttctaccctcagttttgaggggaacccacgttgattttagataaatgatatccataggaggtaaaatttaggtattatataattaattaatgagctgctataattatcctttcattatttttgtagtttttgtagaggttaatcttgtaggcagttgtgctgaccagatgttttctgggtgttctgaacccaagcacatgggaattaaatacgtgtgtgtgtgtgtgtgtgtgtgtgtgtgtctgtgtctgtctgtctgcatgtctgcatgtctatgtgtctgtttggcttttaaaagtagggtctattttttaaataaagattgggactcctgtgcctttagtatcccgatagccattgctgctcacattactgcatataaactgcttaatcaccaactcaggggacaaatgctgtcatatctcttttatggttttgcataaataaaactgaccctagattccactgggagatgagttgaaagttcagtgttttcgtaccagctaattgactgaaacccagagtttcagactagaccagtgcttcctttcagcaccactcgcctttccgccatgatgctgtggtctcttttgcactgtccagtggagggcctctggccacatgtggctgttgagcacttgaaatagtggctcactggctcagttcctcagtggctagtgtgactgaggaactgaatcttttaattaatttacatttatatttaagtggccacatgtggctggtggctaccatttagagagcatagcagttcattaaggggtgagcttgtgcgtgtgtttgcatgcccatgtgcattgtagaggggtggagcatgtcagtctggatccctggccctctgctctcactatggcttatcccaagagcgggacggccatggaacatgggacggccacggaacatgggttcctgcccatcagagtgctgcaccgggagctgctctcaccttttcctgcctggagaccacagcatgagggtcaagttttttccttttcaggaaccaaagtgtctctttgtgtaccccatcctggtgagcaatagagctaagtggacatccatgcctaggtgaccactgtgatttttatcttagcttagcttagcctgggtcccacagaaagcagagcccaagccagaggcttgtgtgtgaggattcactgagatgtgtggttccagggagcaggaataaggggcagagagactggggaggaaaagaaggaagaccccatacaagttagcccctgccactggtaactggttgtttgagatttatgaaatgactaggcattcgggagaagatgaggaagcatgtttccattgaatgccatcagtcataggttgattctgcacttctgagctgcacatgtgtgagctcagggtactgtgtgccagggcaggaggcaagagacaagaggcacatggcgttgagtgtaagattgggcaatgcaggtgcataaaagctgcacaaagtgaatgggggcccttgcagaactgggtactgtggctggcctagcaagaggcagatggggccacagggatctaaagtgatgcattagtgtcctctgggtccactgtctccaaagggtccttctcactccgatccagggaaggcagctgactgcaatggctcaggaatgatttgccacgatggagtgactttctggcacctctgatagaggtgagaaagaaaaacacagttcaattttagcagagtgcatcctgctgcagtcatatggtgatataatatgtacttttatataggttatataccataattatgtataatacgtatatctatataatatatagctatataataataatagtaatactgttagaacagcaacaacagtaccaacagagtacttactaaatgctaatcaagcagttttaagtcatgtatagatcttaggtgtttatctgtgtacatatatttgtttagctgtagatgtgtatctctctatgtctttatataaagttaaatgcattcatgtatttatgaggcccttttaagttttgaaacttgaatgaatttctgactgtttattcagttgatataactgataatacaaacattgcaaaatcagcaatttgcaatgcctgtgagaggtgatgttatcagctttgataccgtaaagaggttgatcagtgctttagcctttaccttaaaaagttatgtggtttctaatacattcacaaaatggggaaaattgccgatctaaccaactgctttattcactgagggaaggagagcagggagctgaagaggtgacccccggactgggctttcctgtgttttatatctagggtaagcttgaacaagctcctgaaaccacagaggtgtttaaggtagggagggtcatttcttaacactcctggattatggtctagaactctgtactgtagtcagaaacatttagtttgatttctaaaagtggggaaattctgcccatgactcattctgttcattttacatacactgctttcctcttcagaaggcttggtgtttctggccccatcactacattcgggacatttgtcttctttgagcgctgctgggacccctatacactaactgtaatgttgacttaggttactaatttaatagtcttcttcactagcctgctcccagtgaccccctagtacccagcttcttcagcagcttctttatatgtgaagtttggagtgacagtattgcttaccacagagcagccatttgaacataaaattagctgattttatcacagggaccaattgttgagctaattagatgtgcagtactgctgaggagccagaaaccaaaagtgattttccattgaaactgtggttttctgcaaagttggctgggttgtggataccagcctcaccagcgactgtcagagttttggctgaagaagtttgctcatttctaatcagattaaaagaggcaggaaagacttaaggaggaggatggagtcttaaggagtgaaacttgaacttcacgctgggtttgctgaccttgaacatgctggattctgcttacagaatttgacagctgcttcatatctttggtgagcaaccctaaccctaatacaactttgcataaaatggaggggggtgtttttgccttcaaggagaagacttgataatcttttcttagcctcattaaaaaaaaaattttcctcaaatctttggtggagttatttgcttatagcactaattgcaagacatcatctaatgtattattgtttttggattgtcaaatatggacaatttatctcccaagtgagcccatcatgagaaacatttcccagtatcctaaactgaatgtggcctccggtagagtgagggtggttcacgtgtaattcttccatcctgagaatgtgactccagctcatttaggaattaaatcttttcccactgagaaattatgtttcttgaaatgtgaaagacagcaaatctaaagagcattctcctggccatatgacctggctccttctgccagctcttcaagtcttcaagaaagcacaatgctttctctgggtatttctctcgcgaaaaagagagaagaaaagcagcgttttcctttgtatatattttacaatatattaagttctaataaggataaaatgtttctggagtcattgttaaattacccactgtgtttcaaatataaaacagtgttttaaaggctgtatctatccgtctctcagtgtttgtccacccttccatccatccacccacctgtccctatcatcagtatatagctacaatctttaaatatttgccataattttatcttaaacttcaactatctagcaatttattatctctcatctctgcgtttgtttataattaatacagggtcattttaaagaaaagttcccaaagtgaaaggtaaaaaaacagtatgcatgtacaaatgggttccagctagcattttcaaaaataaaggttcagttttgattatttaattttcttcctgcttagattgcagccagatatttagtgactccctaagctcttcagttaagccctgacaaattgtggtttgactggtgtgtgtgttttgttgcggggaggcggggaggaagaagacagtgtcactaccaaataacctacttggctgggcacggtggctcacgcctgtaatcccagcactttgggaagccaaggcaggtggatcataaggtcaggagatcgagactatcctggctaacaaggtgaaaccccgtctctactaaaaatacaaaaagttagtcaggcgtggtggtgggcgcctgtagtcccagctactcatgaggctgaggcaggagaatggcgtgaacctgggaggcggagcttgcagtgagctgagattgcgccactgcactccagcctgggctccgtctcaacaactagaacaacaacaacaacaacaaaaaaacctactcacctgcgctaccaatgcagtcattgctgcttttctttagcatagtttgaataccatctctatggtaatttttttttttttttttttttttttagtatcagtgacactctgagtgtaaatgacactcaaatttagggtctagaactaccctctggactccagatccccataacaaactgtctacttgttatcgccacttgtgtgtcaacgtaatgctttctaaaatgaaagtttgattattgccaccccctgtaaacaagtcccatggcttcctcctccctcctccctcccccctccccactcattgacacccttccccatcgggtcatcatttaacttgcctaactaagcaagatcctcagaagtcatccctgcctcatgcctttccctcgccttttccctccaatgaatcagattaacagattctacctccaaaagacatccccactgtgctcgcttctttcattttctctcacgttcactctcatgatttaagccaccattatctgttcctggacaactgaacttcttacctctccatgattatgaccacccgcacaggcagcagagtgatattcctcagtgtacctcgggtcatttcccttccctgtgtcagcatcttccacggcatctctactgtatgtggaatgaaatctgaactccttcgcatggtctaccaggtccttcaaagtcatgtcaccatcttcccatgagacatctgtaacttctaatcagagagcctaattatcacagtatatctaagatgtagcctataattcttaaagttcagaacctttgaataaggctcaagaactttccagagaactggggactcactatgagaaccacagggactcaggaaatcttactgttgtgcagtgaacctcataaaggatggttttatacttctttgtatttcaaagttgatcccttcatggactcactgttgccacagagagaccaaattcagaggctgtggacatgctgcctggttgaggctatgctgtatattaaaaggaaggattaaccatcttgttcttgaccctaaaccctatcctgcaaactctcttgacaccgaagttgctattatgatcgtacaacattatttggtaggattaagtcagtgggtgatagatgaaactgccttcctctcactactttgccaaatctctgacttttttgtccctgtgttaatatcctatagctactataacaaattaccacaaactggatggcttaaaagcaacagggatttattctctcatggttccagagggcagaagcccaaagtcaatttccctggacccaaatcagggtactagctgggctctgctcccccaggggctccagggaagaatccctccccggatcttccagcgtctggtgggtgccaccatgcatggcctgtggctgcatcactcaagtctctgcctctgtggccacctgcctcatcctcttctgggcatctgatctcgtcctgcatctctctaataaggacactgacagttgcatttagggcccacccaaacaatcaagaatactcccgcatctcaaccccccttatttagttacatctgtgaaatctgtgccatataaaataacattcacaggttttaggggattggaacatggacattttggggagaccatttttcagatgaccacaggccccataatctggtctccaacctgccagtgtcatgtgtccaccccaaaatgggagactgaaattgggggctcttcctcgggctgcttaggagaggtgggcgttgttcactaggtgggagcgcatctggcttgccctgaaccccagaacacactcaggtttcccagcgagatgggatttgatttcctctctcgggggtctttatctagttttgaagagaggtgaaaatttgcaaaagtttatcccctttcatacatctctaccttcaaaacagacccaattttactgctatactacttctgaaataaagtggcataccaaaaataacagtagaaaaaaataaatcctaagagctagaaggatatttgggagagaaaaaaatgtgtgtgtgtgtgtgtgtgtgtgtgtgtgtgtgtgtgatcaaaaagcatttggatgtttggcaagagtggtctagcactctcttagtcacttactctctttgagccctgacttaatttctctgataccaatttttaaatgatctaagtgtggataacaaaatttcccaataggttcattataagaattaaatgtgatatacacacacacacacacacacacaagctggcatgcagtagtgacccaatatacattattgaagctgagccccttcagttttatgatccagaaaatagttttaattataccaacccaaatgagagaaatttaatatactcaatgaatatttagccatgctataaccatgataatataactgaaccagataattccccagcaagaggtatatacagatcctttgtgttttcttttcaacatctataggctgaaaatggctttttctccttattctcccgtcccatgttcctcagtaaattaattaccttatcaaatattaattatgtacagattcattgccagacttgcattacagttgctttaaacaaagctatctgaggcaaagtcttgtgaagtttgtggtaataaactgtcccacatacagtcacagaagctcacatgtgacaaatgctcttttctgcagagaatctcctaggaactcgtctcccattttctacattaagtaagcttataggaggcttccattcacctgtgtgtccccagtgcctggtgctgtgcttggtacctagtgattgtcaacaaatatctgttgacctgaactgaagtgatacagcatataaagaagcccgttttgttgccccttgttatggaccgaatatctgtgtccccccaaattcatatgttgaagcctctacccccagtgtgatggtgtttggacatggggcctttgggaggtgatcagggttagatgaggtcctgagctggagctcccgtgatgggactgctgtccttatacgaagagacaccagggagcaggctcttgagcactctattgctgtgtttcttgctgcacacagaagtcatgtgaacacaaatagaactgcctgcaagccctgagaagaggacttggaataaacctaccttgccagaaccttgatcttggacttctcagcccccagaactgtaagaaatagaagcctgttattgaagccacgtagtctgttactttgttatggcagcccgagctgacaagagagccctgttttgtgtgctgcactccatggagcgggggcagagcactggcttggaggagaacaactggctggagccctggctctgcctgtagtgaccgtgaccttggagaggtctctatggcccattcttcttttgtaaaatggggaaattaagaacagtggaatgttgtacggcttttcggtgctttctcctgtattttgctgggtaaacttcacagtcacacacaggctagggcaggatctgttctctgacttgcctatgaggaaactgaagctcagaagtgttcattcacattcccaacatgacccccatagtaaatgtagagagctagagtcatttgacactgaattccataagcttttcacccatgctgtgtggcgatacatgctaatctttcaggcattttacgaatacagtcatccttcggtatccaatggggattgcttccaggaccctctgaagataccaaaatctgatgatgcttaatcccttatataaaatgacatttacatataacctatgcacatcctcttgtgtactttaaataatctctagattacttatacctaatacaatgcacatactattaatatattaaaatagttatgctgtattcttaaaatttgtattgttgtattgtttttattcatttatttataataattttgatctgtggttggatgaatccaagcacgcagaatgcaaggatacggagggccgactgtatcagggtttaatgggtgactgcagaggtaaggctgtctacagtgacttcatcctgcctttctagagatcctcaaatttccaaccatagttacaatataggatcagcatatcttcctttctgtcatgaattgagaaaatgtcatggttatctgtttctttgttcccagggaaatgggtaagttgcatgctagaagcatcccttctcggtctgttgtattctctatgctgcaatgtttaaaacccatctgagtaccgaaagactgttgttttcaccaacactgaaacatcatttatttgcattggaaaaccctaaatagacatgggtaaatgtcagttgatatgttatggtttggggattacatagctcttcgtctttaaaaaattttttttatctgtgcttttgtttaaagcatgaagttatgatttaaaatgcccatggaaaaaccctgaataattcattgacttaccttagtcaaaaagaaaaatcccccctccccaccgtatgcctagcaatagggataaaattcttcttagtccctttctgtagctttgaggttaaaattacgggtgttattatgaactctaaataagaacctgtgaaataaatattttaaaagtgcccatttctgggaggcaggcacccatatttctgtgtatgcagccacgtagacagctagatcttaggcataatggtttagttgcatgtgggtgattattttcatttccacttattactgtgtgctagactccctgtgtatgagtacagattgccctttcttgcactgtatttagaaatctctgtattacccttgggcatttgttcattaatagggggtggggaaaggaaaagcttgtaataatgggctttacatattaaactgtgtgcatccgcatttgggccaaatggaaaatctggtttgtatgactgccctctgctggctgtaggcctttgctgcagtggcaggatatgagtccctgggtggagcccctgtgcagatgccggtatcagtcttttattcacttgcactgagttccatccaagtacatcagaaacagcctaagattctacctactgcccaggttgatggtggaagacagcattcttgtgaggatcaaggagacatttttgattttagtagaagtacagtagaagtatagacacaaaataatcctggccaacatagggtgatgtttgaatgaatgaattcacatttctccacgggccacactcctactcatctttcagtggcaacaggggaatgtttagtggctcccatatgtgatgtccagaccccttgtggaatgcaagatgattttacggtgtatccagatgaatcttttaaatctcagttatgtgtttataatatatattaagaaaactgcagagaatgtttgaagcccacaatttcctgaaggtgatggctgaggtgaagagcaggaaatggaacctacacacacagctgcattccttgcagagatgcctcttccgcaagtctttgggcggagaaaaaccacagggaggtccccgatgacttgggcagcagtggctctgtacttgctttgtgtatgaccttgggttgttgacctgtctaagcctaggttttcttatttgctaaacaggataatagtggctacttcttaggcagttataaggatgatatggtgtatatgtaaagtgtctgtcacagaacaggggcctgggcaatgccagatgcttctttttcagctccccatcccccaggacgcttctcagagccggcccccctccatgttcgcatcacgcttggcttgcatctcgtttcctctgacccttatgagagtttccacgtttcttctccaccccaccccccccacgctgagtgggaccttcccttgctttgcatctgtggcaacattccatgagcacttcacacaaggcaggcactctgtgaatgtcaggtgaattaaacccaagtgcaaaatacttgtaagcagcattttcccattctccaacacattcagagaatttcacctatcagattaggacagggcctatacgtttttctccccctacccgccattcgtgtggtctgataacagcagcagcattaagttcccgtccattggctgcaagcagggaggaaaaaaggccccagcgcctactgcctgctttcctgcctgcgttaatatcatctcttatcttaccaactaacatataggggtgtgtgtgtgtgtgtgtatttatgtgtgtgtgtgtgtgtgtgtgtgtgtctgggtatatatacacacacatttatattcgttaatttccgtggaaaagaaagggatggcagcagaaacattttaaacacagcatttcagctagggtagggtctactttaaagacaacaaaagggcctttgttgttctggcaggtagatggataagcctggccctggttcagcctctataaagtggctccggagtgataggatcagagaaactaccgggggcgggggggaggtgcagggacgcttttatttctgtggcgccaagagtgaagcagggtttgccgtttcctacaggggcagtgcgtttgcgtttcaaattcccgttgattgtgtcgcagcccgcgtggtcccgagctccccggcctgcgcctgcacggccgcgggacgcccgcttgcatttccgccaccgaggcaatgttcatttaacgcttccagagatcagagctttcatgtttgccacgaaagccagagagccgggagcacctcaggagcggagatgaaaggccatttgtgtttgtgcatgtgtatttagcgcttaaagggcaggaaaaagaaagaaaatagatggtcccgctttgcacttacttcaaaatgtgccttactccctctggtgggaccatttaactccagcgcgccacccctcccccgctctggccgctcccgtctgccccgctgcctcggcccacgtgatggctgttcgggccccgccgagccatcttcccgttgctatggcagccggcgcggcgagcccgcccattggctgcaagcgaggaggaataaaaggctctcgtgtccttaggtctagtgccctgcgccatggccccgtgcaggtagaggcctgggcatggtgcgttgcaggacgggccgggcgcagggaccgccccccgcaccgtgcgccccacccagctgtccagaaacggtcagggtcaatgtcatcagcttctccatggaatgggaagcaggtgaaggacaaaagcaaggctcataagggaaagtgagccaccttttccttcacccttaacacctcccagctctgtttttttttttttttttttttttgtagtgtttgaatttgaaatccggccctgtgaccctttctactcacagacactgcacgtgaggcctgagcctaagtttagctgtcagattccatttaccttggccatgccccgtggctccaaagccgcgaggacagcactccattgcgacgtctactcccgagcctgaatgtttcgaaaattatcttcgtcttgctgggttcgctgctgaactggggaggcgattggaattaccatctggcctcagagctgcgggtgactcttgtcctgaccccgtggcctagtgaacagatgaccccggcgcctgatcttgtacctggtcaaacaggtgtggagaagtcttggaggggaactgcagctacctgcctcgggctctcttcggctggcgacttgggttccctgctgagtgagaaagagagccagccacacccagagccttcaatccccagagggagggcacccactgcgatttggctgtggttggtcacctgccttccccaacataggaccagtcagcagatttgggagtgcagaaagcactttcacaaacattctctcctctgcttctcataaggagcctgggaggctgtcactctaatcgctgccctccaggagaagcagctggtaacttgagaccacatgatacgtacatgggggagcccaggatgcacactcccgctccctgattccaagctctgtgcatgctctttccattctgtcactgggccaggtagattccctctggacatgtcacaccctcacagatttataaatagggaatgggctctaggaggaagatcgctcctccctttcttctcattccgtatcttgccaatatcacattaaaagaatatgtcactagtgtttaatttgtcaagatcaggggctaatggttgaggattttttgtggttccttctgctggcagaaacacatttgcaaacacaaaatcttttaataaaatagcaagatttagtaagaaagaaaaatactgtgagaaaaaaataggacctgattggaggaacattattatgccagagacacttggttgacttaaacactaatatattatttttatacatattcacacaaagggtgctgtgtggtttcaggaatccacagagcctaacacccaagcacatgtgatagaaaaaaaaaattttaatccttttttttttttcattttcatttctgtttggcttctttacaaagtcgtcattgaaaattgctgtatggttatttttccctcttgtgttacagaccaaactcagtgtctgatgtacagtggaataagtgaggaaagagacaatattgggcaaaccagtgaaattaggctcttgtttacatgagtagcccttactgagattcagctttttgttgctctgtgtagccttttgatgtagattccagagttgtaacttacatgataaattacaagtctgtatttattcatacattagagataggttatttttacctttgtgtgtgtgtatacacatttgcttggaatcggtgaatttctaggccacattgaggcaattgaacgctctttataagcagttaattgtctagacccaacgtttgctgcaaacacagtctggggcaaaatgggaattaacatttttacaaagacaggcatagaaattctaatccagcgaattgtttcctttctctggtagcagggctgagtcctacctggccacaaggctgccattcacctgtgtagcccagaaaacaatggtaaagaccaccagagataagaccagctaatccatgccttgtaatagtcaggtttcgcaattcacatcacctgtctgcaaaggtaaactcacaaacccctcctgagatatgtgtacagtcaaatgggatcactgctgtcgctaggccagcagctctagaagcctatgttacttttttttttttttctgagacggagtctcactctgtcacccaggctggagtgcagtggtgcgatctcggctcactgcaagctccacctcgtgggttcacgccattctcctgcctcagcctcccgagtagctgggactacaggcgcccgccaccacgcctggctaattttttttatttttagtagagacggcatttcactgtgttagccaggatgatctggatctcctgacctcgtgatccaccagcctcggcctcccaaagtgctgggattacaggcgtgagccaccacgcccggccaagcctatgtcgcttttaagatgaatccaaaaagactgtgtgctactaggctacagaaagcagcattaagtctgatatacatcaatccatgttcaagcagattcctctctgtctctggaagttggttaatttttctggtcctgatattggatattgtcacattttccttgatagtgtcatccggtgaatgatttttcatcttgaaccttatactcctcctctctcggcagctggtgcttccctgttcttcctcagccatgctggggctcactgcagcctcctctgctcaactcgcctgggtgcagccatcttcaagaaaacattattaaagcaatattattagtatgcagcaaggtgccttctttctgctaaatcagtttgtaaagtggtcctcacaaatgcacacattctttgttatgacagcagggcttcgtgtttctgatgcaagactaataagacttggaagtagggaggtaaactgggtggcccaggaaagcaggggttaggggagttgatagaagatatgagaaatgaacctaaggggtgatcaaagagcagccaaagaaaaaaatatccttaagtgggagaaaaaggcaaataggacgtgtgaggaattaggcaggagtaggaaagaaaactgtgaaccactgtatgcacacttgtgtgaaagaggaacctaggaaagtgagccccgagaaagcaatactagcagaaagcaaaaggtgctcaagaatcattgtgttgtttatgttgagtgaaataaggcaggcacagaaagaaaaataccgcatgatctcacttatatgtggaatctgaagaagttgaaatcctaaagcagggaatagaaaggccagaggccagggtggagtggggaagggaggaggagttgttggtcaaagggtgcagagtttcagatccacaggaggaatagggtttgagatctgttgcacagcagggtgactgtagtcaataatgtagtgtatatttcagaataactaagagcacatttaacacgtctcaccataaaaaaacaataggtaagtgaagggttggctttgctaactggcttcatttgattattctacattgtatgcatatattaaaacatcatgcactccataaagatatacagttaggatttgtcaatcaaaaataataataaaaaatttaaagaagaattgtatagaaagaaaaacctttcaggattgagaaaactctgtgaagaagtcacatagaaattctccaagaagtgccacctgtgtactgaaagcccctttaatggacttttgtggtgctttggtgattcatacaacttcagacaaataatttcctaacctgcaaaactgagctagcaacccttgccctgatcactctctttgggggtgtttttgaggctctagggagctgatgtgcgggcaaaggttataatccagaaaatgctctacaaatttaagtaaggttttggcagaattgggttgtggggagcaagtgccaggccagtttccagtccttgccaaactgcattttctaagtgatgaaagatctggcattttattcttttccattttttaattcactgggtttgttcccttgttcttatgaaccttgactgcagagataagttgacagtggctgacagatgaaaattttcattgatctcctctctggtccctgcctttcctagccccttggctttggaatgaaaactgtaagtcagggacacccacgaagcgatgatgttggagttgcagtttgtaaaactcttacgttaccatctctttatctgagcatggagacaggccctttctgtaacttttctggctaaataacttttcttcagaaggcaactcatgtttgaaattagacttgaccttgtttcatgagtttccaaaacttatgattcaggtccacattggctgcttttgaattggatctatttagatgtcaacatgtacagcacaagtacaatgaattcagtgtctgtcctgttcttcgtggtcaggatttttgtgtttgttttattccctgttaagcaaggggttttctttctttcttttttttttttttttttttttttttctgagacggaatctcgttctgtcgcccaggctggagtgcagtgatgcgatcttggctcactgcaagctccgcctcccaggttcacgccattctcctgcctcagcctcccgactaggtggggctacaggtgcctgccaccacgcccggctaattttttgtatttttagtagagatggggtttcaccgtgttagccaggctggtctcaatctcctgacctcgtgatccccccgcctcggcctcccaaagtgctgggattacaggcgtgagccaccacgcccggcagcaaggggttttcaatacaggctgtctgatgactaacgagagggaacataaggaccctatggtctgcccttctaggctgttctcaggccctaccccacccaggcctctgctctccctcttcttaaaatcttcatggatccccaaggcagctgccctagctgccttgtgtgtgtctacaatgatagagctatcagcactgccatttcctggcccgtgtggtatgagaatatgagtagccaataatgctgtcacagcctgggaaagagacggcaaaggagaagaggcagccgcttgagaccacggagccacagccgcccattcccagcagagctcggagaccacagtgacacacctgcccattcccagcagagcttggtgccattctcaggtctcccaagctgaccccaggtgtccgtgcttttatgggttaataccaccagggtattgaactagattttgacaatcaaaaaaaaaatgtatatccgaattccacgtatggtggcaagtctatgagccatcaaattaggagttattatctatctatctatctgagacaaagttttcctctgtcacccaggctggagtgcagtggcgtgatcttggctcactgcaaccttcgcctcccggcttcaagtgattctcgtccttcagcctccagaatagctgggattttaggcatgtgccaccacgcccagctagtttttgtatttttggtagagacagggcctcgccatgttggccaggcttgttttgagttcctggcctcaagtgatccgcctgcctcagcctcccaaagtgctgggattccaggcatgagccactgtgtcccgccagattggaagttattatacccactttataaagtggcgaggatggcatgttttgattcaattcaaaaggtatttaccaagtacctccgtattcaagggaggggatgtggaagcaacctatatacaaacttaaaacctgcaaaggcatcagcaaagagcatctcacatcagcttctctgttcacttggtccctacttgtcttcacagaaagaacagttcttgtgtggtaatcaaaatggtatttctttgagaaaaaagatgcccctgataagaaagacaacaaatacgttgatgtggaaacagcctccaacatgaagtaagatttccaactgatcagatccttaatttagatgccaagtgagaggttgactatttgtagggctctgtggattccagactcccactcagacctactgaattagggtccttaggggtggggccaggaaatatgaaatgtttaaaactcctgtattaggcagttctcgcgttgccataaatacctgagactgagtaatttataaagaaaagagatttaattggctcatgattctgcaggctttacaggaagcctgctggcatctgctcggctcctagggaggcctcaggaagtttctgatcatggaggaaggtgaagggggaacaggcacatcacatggtgaaagcaggagcaagggagagagagttggggggaggtgccacacgttttgaaagaccagatctcctgtgcacttagagtgaaagccgacttatcaccaaagaatggtccaagccattcatgaagcatctgccttcatgatccaaacaccttccactaggccccacctccaggactggagatgacatttcaacatgagatttgggcagggacatatatttaaaccatatcaactctctaagtgattttcatacagcgctgggcttggacatctcaaggtagtggattagtacttagtcttgggcatcagacaaacttaggtacctgtttgagcctggataggtaacttaacctctcagcctgtttcctaatctataaaatgtagctaatcatatgaacctcggaggttgatggtgtgacgtaagtgagatgacatgtgccaagctcccgactcgcaatgttctgtctgcagctgtatccgcaatgggcatgaatgggcagatgatttgcccaaggcgtgtgaacattaaacagtcagctgttgatgaggaaggcatggctcgggacagtgccagctaagatacatctagaaccccattttccatcagtgcatttcctcctgtgacataagctgtgcctcttgtgtgctaggctcccagcccaaggttaggggctttggggaagcttaactgtgaggtcctcatctaggagcgtctttccactgccgtctaagctgtgtgtgtcagctgggttcaaagagttaaaaatatctggttagtaatcagctgtgcaaaagcaacacttttcattcttaagttctgttcttcagtgtgttgagatttttccgctcatttgtttccatgggtctcacaagcatggccttgagcagcagttctcagactttttgacctcgggacctctttgcacccaaaaattattgaggaccccaatgagcttttgtttgatatttaccagattaaaaattaaaactgagaaattaaaaaaacccgaacacacattcattccatcagccatcgagtgttgatgtcatcacactccgtgtagcttccagaaaacttcacctgcacccatgagagaataagagtgaacagggaaatatatcttagcatgatgataagaataattttgaccttgtggatcctggaaaagattctggagttccccgggggcctctgagccgcacggaactgctgatcttgattgcacaggttacccaaccctgttcgtctgcctcacagagaagcacagaagtcaaatctgaggccgttgtatcactgagcagcacagctggggcagggtcttagggaaggcctccgagtccagcgcagttccctggccttacagacgaggaacctgagccccaaagaggtaaagcaatgctcccaagctcacacagcgtgggtgccaagctcagttaataacccagagcttctgcccagtgggcttgcccctgcatcccagttgagtgacttagggaccaggctccggtgaaagacagcttggttccaatcccagctctgccactgtgtgacttcgggcaagtgtcttaacttctctggcctgagcgttctcatacataaaatgtgaataataaaaaatagctgcttcataggcttgctgggaaaattaaatgagataacgtgtggaaaggaactggcatcttgcataagcattacacacacacacacacacacacacacacacacagacacacacacacacacacacattttagcttcccagctaattcttagagggatacatttgtaatattttagcagtcactacttctagaaatcatgaccagcttttctccatctcttggtctcaattgttccttttcccagcaaccttcaggcttgctcagcagcatcgcaggggaaagggattccagaatccatggtgagaacaccgtctctatctgccttcacaacagactgaaggcagagctaagatcggatgtaattagtttacatgtcagacccaacaatccatgctgtacgtcatgcaggagtgatcagtgttttcagggtggaatgcaatctcataatgaagcggtgaatagtagtattgcagttgaataacctgcagcatgatgtatggtgattagaatttgtttctggcatatggttttctttttcttgtttttcccccaaagtggaatgtctgcttctgtagcaccgtccatttgcaaactgcgttccccaaccactctttaattgtctcctacatcagttcatgggagagcttagtgagggtaggtaacccagtgctccttattcaacaaatgtaaatgtagcgctttacatttgtaaagggtgctggggggtccctggtgacctgcacacacaagtcaatagatttctgctgaaaaaattttaatattaaaacatcatacataaatttgaagacttcatatgcaaacagcaacaaaaccaaaaaataacaaaggacagagattttaaaataatctcttataaataactagttttatctacccaaacaaagaaaataatcagcactccgtatgctacctcagatcctgttcagacatatgtgggtatcaataatgaatgaatcaattgattcatcctcagtcttgctgagtgtctttctgggagataccacttgtggctcttgtttacccaaagatcactttgaagatagaacattctgtagtcccagatagcatcttcttgcctggaactgacataagatccatatctctaagccacaggactggagcttctccctcttgctaaggaagttgcatgtatcacccaaaagatactggctttgaggtgagaagacctggattctcatatcgtcctttgtactaacagcagtgtgatcgaggcaagtgccttgactctctggtcttccttcaccccatctgtacggtgatctctcagcagctgttcacctctaatggtggactatagagtggtggctgaatccctccaccatcaggcaatcaaagccagccatttccaccgaggcaggtggatcacaaggtcaggagttgaagaccagcctggccaagatggtgaaaccccgtctctactaaaaatacaaaaattagacaggcgtggtggtgggctcctgaagtcccagctactggggaggctgaggcaggagaatcgcttgaacctgggaggcggagattgcatcaatccgagattgcgccactgacactccagcctgggtgacagagggagactccgtctcaaaaaaaaaaaaaaaaaaaaaaaaaaaaagccagccatttccaatggccttgacataaggattatgttgcattaagtaaggatcattaaggatctgaatgagctaactaccatgagtttgaatgaatctagagcttgatctcaggtttgcatgtcagggatagcttcgttcaccaacacattctccattactgtgtgaggtggtgtacaagacctcaggttcactcttgggcctgggaatgactacagtggacatatttattcttccttagtgtgtcaggtgtctatcacagcataacaaactaccccaatcatggtggtttaagacaaaaataattgttcttgtgattctgtgggttggctgcattgttctgtcgattttgcctggactcattcatgggacagcattcggtttggcgggtcacctggaggcagggctcagttgggaagatggggctgtctggatctctctctctttccatggtctttccccctcaaggttagcctggcctgggttggctctagagatggtgacgccatgctgaaccccaattccaagagcttatcaagcctctgcttcctatgctgatgttccttggctaaaacaagtcatatgttcaagcccaaagttaatgtgaggatggggactgcccctcttagtgtagataccaggaggtgtgatttgtcgaggctgttagtgtaatggtcttcccaccttagcctcagtttccatgtcggttagatgggaataggttactaagcatgtaaggagggccagcctgagtttgaggtattttccatgtcacatccatttctaactgagtgtgtgatcataggattcacattcctcatgaatgaagaagtcttgtaccaagcgatccaagggtccaccattatcaccacctgacttcagcacacacatacacagacacacacttctgtttcatcttccacacaatgtaaaaatcaaatatgattggaagaatcttcaaagtggtagaggactataccaatgggatatattattacaaataataattatgaagaattctaatgtattttccaaaaacttatgagatgctaaacatctctgttacatattgcacatttaaaaataattacattatgagaagtgcgttattcgggtttctgtttcttttctggtgttttaagctcactctaaaaaggcctggcaaatcaagatgtgtttgcatgaaactaaaggcactaggaggagactaaaaggtcaaatctaccttttaggagcagcctgcattccaaatggaggcatttcagcttactcaagtctttatttagtctaaccacttggcaacctactttatttagtttaatctcctggcaacctactctaaccacttggaaacctacagcctacctacagaatcatagttcagccatccattcctaccttcctagtgtttttgtttatttgcttggctcattgtattgtgtttatgtgtacatgtttgtgagggcagctcaactgtgacctcttgtgcagtgttccaaatttacaaagttccctaaggataccaggccatccctggccctcttttctcttatatatgggcaaaggctgagtgacttggggtcctgacctcagtaaatgcagtcttatcctcacccattgctttgcttattcactgaacctagtcctgaaaatatgggagtatagattcagaatcagctctcacctctgtgtggatgactttgcgctcagcatgcatttcatagccctgctcatggcttataaggtcctctctaacatggctgctggttccccactctcctaagtgtaaacaccctcccccactctagggactgtgcatcccatcctgcatccactgcaccctagccttcataactcacatgctgatatggaaataaacgaagaccaccaaatggaaacaagcaaagcctcttgaatcagagcttgctacatccagagggccagccactagcccttgcgttcggcagagactgaaaggcaagcggaagagagaaagctccagagtggaaaagagggaaagcttcaagtatgtcctgattggaggctgttggcctggggaagttgcagacaggctaacaagatgcggggaatcttgtgtaatagattaggggtacctatttagctttcttgggttagtcctagaatttcaagccaggacaaaagttagggaaactgtcagggaaattaatcaagtccttgccatttggggctgattgctaaaggggttgttgtttggcttcctgaactggtgactctaaacagtaggttggctccctgggctggttgctgcaggttgtgggtgaaggttctgtttttatatagtcagactagtgtccatttgtatcttcagcctctcaccattcccccaactgaaggtgctgctgttacttgttccctgtcctcacagaccctctttccacaccccatcattctggctgaagccccctccaatgtgttttcacagcacctgcactttgatcacaacacatgtcccctttattttagtcattactggttcgttttcccttttggtccaaacactccttgagggcaggggttctgtcttgttcatcactgtatcttccctagtcccttgcaccgtgtctggctccagtcagcttatagtaaataccgattaaacaaatgattgatgaataccaaatacagcctgataaatctccctctttccactccctggtctgcatttctccctgccttacggatatctgcaactggatattccacttgcatctcaaaattatcatgtctaaaaccaaacatttgatctttctcccaagccattccttcttgtgatgtcctgatttgtaaagtcccaccatgctcacaaacactctgccttgccccctgcagctatcagtgggtccccatcatcttcatctcttgcatttctgtcccatttctttttattcccacctcagcctttgttctggtttggactctgacctcagcctgccgcctggtcactgggttccagtctcagtcaccctctcgaatccatcctccacgccatcccaaagttccactttgcttatgcttctgtcttatgggaaacccttctgtggcctcgcatgtctcagcctagccttcagagctctcaaccgtatgaaataatcccgtccatagtgttcattactccttgccacacacttgacttttcaatcccgttaccctagttgtttctaggacatggcagttcctcccctcctttctgctgcctttaccacctccgcagcttaaacaatgactgaacattcccttgtctccagtggcagttatagatactacgctgtgctgtagtgatcgatgcagatgtcttctttcccttactgaactaagctcattgaaacatccaccctagctggtctttgccatttatagagtaggcacatggtaaatatctgttgagtaaatgaatgatgcagctggtcattgcatctagaataaccctcacgttaaggtgggttcatccttagatggatttgggattgatgaattcaaacgtgcagttaagagtttgcttgtaaatcctgagaccatatagacagagtagcagcataattgtgtgtctgaaccatcagtgtttactcagcccttccttttgtagttctagtaaattgctttgtatttgaatccgtgctagggccttctccgcggagatttttttttcttgaggcctacaccagcagcatggccaaatgcctatttcccaacttatatccagaaattattgcctttttttttttttttttttttttttggacagagtcttgctcttgctctgtcgcccaggctggagtgcagtggcgtgatctcggctcactgcaacctctgcctcctgtgttcaagcagttctcctgcctcagccttccaagtagccgggactacaagcgtgcgccaccatgcccggctaatttttgtatttttagtagagacggggtttcaccgtgttggccaggatggtcttgatctcttgacctcgtgatccgcctgcctcggcctcccaaagtgctgggattacaggtgtgagccaccatgcctggccctggcttttctttagtagaagttcagttcatactaccaaggcatctaaaatatttatctccttactcattaaaactcggcagttacacgtcatactggaaagagggataggttggcagaattggggatcaacaggtatctgggatctgcagggtcttggcaggagaaggcttgggggggacaaggcacatgagtgtgcataacgatctcatagaccagcatggtgggaaagagggaaacagcctccctgttgctcacgagatctaaaaaagcctgccagcttggtattttggtccctggatttatgtatctgatgaagataaaacattcagagcatgccagccccgtgtagaacaccagcctaagagaatggaataaaaagaatgccgacaaaatttgaataatcatatgcgatacatctattcattctaaaacatgattagataatgcaaattatacatgataatcataaattaaaacaattacaaataagacagaatacatttattgtttaaattgttgaagtttatatttagaaattgctctgggtagcatcaacattgactctgctggaggattcacctttgctgtcatagatgcaaaccaaccatttcaaacagttttaatggcaatctgtgcttccaatgcagtgaactgggtttctgctccgccgtgctcttccccattctctgtggttttatcatcctcggcctgcacacgtaccgttgcctttgcctagaatatcttttccttttttgtttattcttcagggtttaatgaaaaccctgactcttctgtgaggccaccccacttccctttggtattgcttttctcctctgcttccgcatggcatcttgcacatttgctaacgtgcactcatgaccttgaacgtcccttgagcacaggtctctgttcccctctgggagcctcccctggctcatgcctcaatgatgaggaagaccctgtctgagttgcttttgtggccttcgtcccctctgtgcctagtacggggcctggcgctcctcgattggaaagcaagaaatatttatttaatgaaatgtcactaacacaagctgaggctcttttaggtctaagaaaacggccatctccccgttgctgttttggcccctctagtcctgtgtccttgatgtctgtgaacggccactcctgagttctgtctgtgaggctcactgctgctagcatgttggagcccaagggcattgaggggccttcccctgtcacccccttttgttacagacacacattccagagaggtgaaccctcgctgaaggttacagtttgccttccagctaccgctgaagcttgtggcttggttaaacaggcctccctgagtagaaatgatggactcttctgagttgagagacctcggattgtacttgaaactttccattctccagctgggccatttggggcacttcctgttcttgtgtgaaatcattagccacaatctggagacctacgagtggaatttggtctgcagtcttcgtttctttctttaaagtttgaattctgatgcttctcacaaagacacctgctttgcagatagctctggtccccaccgtccatccccgcagttactgcatctttgagaaactttctgttttatactcacagcgcttcacagcttgcactagccatgttccaagtcttcggccgctgcatgcagccagcagttagagtgcgggactggacagcgccggccggatgcttctgccttcgctcattgacggttcttgctggcttccgaaggcatttagatctgacactgtggatgaaaaggccctataaagcccttcctactctgacatccagtgaatctactattaagatggattttagagttaagtgagtccaggacgaccatcgatgtctcaccgaattggaactcactggtcagcagccgtaatgtttgaattggaaccagaaaatagctctcaaatttgcagagtcagctttgccgggcttcaggctgagtgggctcatagctggttggccctgtatctctggcctgggcaccgtggctccttgccaaggccggcaacccttgatggtggcagcacggagcagaccgagcccccagccgacttacccccgaggcctcgcgcctcccccttcacagcattgcgccttccctcttccagttcccagggtcgcttcaggctgtcccagccctctgcctagtcagctgtcagggaggggaagtggcaagtccaaggccgccagagggcttcctactgcctgccctgcctgtggcatttcttaaggtgacaaagagtgtgtttttaaaccaccctccagaactcttactccccatgaattctctgcagctgctcccccagaattgactggaaagagaacctcgtttaagctgcctatgcagcagaatgctgtgagtcagacgacgtcctgccaagtgcaacctgagatgcttcagtggaagcttgttcctcggtggtgacaccttgtctccacgctcatccattcgagtgaaaattcatctctttccctcccaaaaacatcatgtaatgaatgatggttgtttttgctctgaaggagacttttttttttttttttttttttttttttagacggagtctcgctctgttgccgggctggaatgcagtggcgtgatcttggctcactgcaacctctgcctcttgggttcaagcgattctcctgctccagcctcccaggcatctgggaccacaggcatgcgccaccacgcctagctaatttttgtatttttggtagagatggggtttcaccatgttgaccaggatggtctcggtctcttgacctcatgatccacccgcttcagcctcccaaagtgctgggattataggcgtgagccactgtgcccggccgaaagtgacttatatttgcatagattatctctgtaaaaagtgaaaggtttctgtgaacgtctggtacttataaaatatctttgtagggcaggatgggagatgattaaactacttcctcatttagacagtgccacctgtaagaagacttgtggtgtggattcaaagatggttatccacagtgagatgaatagaaggcagtacttctcaaactttcatgttcaccgaagtcacctggggatcttggtaaaatgcagattcggatacagcaggtctggatgaacccagactgcttttcctaataaactcccagaagaggcgcaggttttaaggctatgaggtgcttctctggaccctggctgtccgacggccacatttaatgagaagagaacccagctgtgtggttgttgactgcgatgaggatcgcactgacttagaaagttatgactttaatgttccttagtcgaatcactaagatttctatataaaacagcagaaaatatgggagtttggagaagagagaaatgagctggatgaaatagcttcctagctcctgattgatcattgggcatcagctattttgtgtgctggtgccgatgagcaggggaacacgtcgtgaacagagttgtgtcatagctggacgagaaggagatgttgtagggttcagttcgtgtagtgaatttttcctgaatccttaaattctcatatataaaaacatatagatatgaagacattacaataatatagaaaagactgtgtatgtatgtgtgtatgtgtaccctatgagaaatgtttttgctggtatgcgaaggggaaaatctagtgtttggaaagagttctccactgtgctttgggactacaagttcagcttggggcagggcagcagagttgaagaggaggcagggagggcagaatgaagccatcgtccctgtgcagcatatcgggtgttacttttatgttggtgaaagaatgatccgaggagccagcttatcagtgtggagaagattgcagctgcaatttgctggttagtctctgttcttttaacgctttcctgaagtgccattttgtctcggtaaaatgctccctgaaaatactcaaatatttttagttgtagagtacaaatcagattgagctgcacatttccctggtgagcaaaagtgatgagtttgtgttcattaactcgaggccatctggtgcagacacgctgccgtctgtgaatcaaacgtgcatcaaactccagggatcagaacgcgtgccagagccagtgttttggagagtcaacaacaaccgggggagaaagaggccctggctatatttttcttttaaaaaatcggctctgtcttgcaacatatcagagcatcccgtgctgcccagctgatgagcccacttgcaatctctccattgcccatctgaactgtctttgcggtgtgctctgaactgtttttgaggtgtgtctctgtggttgaagtcatcttgcctgataccatcttcgtttgggtagggggagaggtggagagagcattccagtccctttctctgcatttttctgtaaccacaggcctgagccacagacaggcgtgtgcacacacacacattctcactgtgagacaaagaattgtgaggcaaagcaatgctcaaggtagttgacatgttgcagaacattcttgggagaactgccttctgcaaataaccaatttcttgaggagacagtgcttcttgcagtcttgccaataaaaagccactcagcagcagctagctttctgtttagcgcactcaccaaaatatatatacatgaaagaaattgctacgctgatctggtactgaagaccaccagggccgtccgtggcgtgtacggaggagggacctgggagggtctgggagtctccttggaggttcctcccacttcggcatccgtgagtcctgtatttggtaccggaggcccggaggcccgtgtatctgtgttagcagttggtcccctgcagagcacgacacctgacgtttctgtaacgagatgcaattttctgggtagcctctgtaccgtctttctagctatgccttttcctttaggtacccaagcatgttcactggaagaagagaacacagactgggctgcagacggagggaagatgagtatagggactctccttgtctgtccctgtacctgcccactgccacctgtctacgtcctgagatacccagcagaggacagggttccacttggaaaattcttttgaatctcacacaagacagtaataaacatagagggagaaataacaagacattttaccatgtcttgtgtcatgtaggaaactttacatttcagaaaatatgaagacaaaaagatgaaggaaagggctttaaggatacaaaggaccttattatggaaggaaagcagtgttgtcaagagagctaaaatgaacttttctttttccagtgggttaacttttaaaagtgcatgttatttagtgccctgcattgcagtgtatcttattataaccttaccagccccagctccttcactgttttcagtgtttgctaatatggtaatcatgaaatagcactttatttttgaatctttggttagcattagagtttaagtttatcatttgctttttgtttgtaagccctgaatgaaggtttacttgcacttaggaaagcccactgtccagtatgtagacaagttagctcactgaaggtcttactaagccattagttgaattacaatgcatctgctacagcctggatctctaaattgatggaatccacattgttggcaagattcaagggtagcacacaccctgaacacacaaatgcgaggacacaacagcaagaatgagtaagcgagagaatcaggtgagtttctaaggagctttctggaggaacagaactttgttttactttttgattatgcaatttatgtttatagtggaaaacaggtaagacaataatagtacctttgctaatcatattttaaaacattttggtatgtatgcttctattcctttctctatgggaataaataccttaaacaatagaatcagtatattcgtgaaatatcggtcagtaaaatcagattagaatgattacaaatgcatcggtgaaggtattatcagtgaaaatatttgtaacctgcattttcgctgcatattcatttcatgaatatcttttcataccagttatgtaatatgtgtgtgtgtgtgtgtatatatatatatatatatatatatataccagttatataataaaatgttattttattgttatcactatgtagtctcattgaatggatataccatagcttatttaacggctttagtgttgtttgacatttgggttgcttccaacatttcctgctcataaatgctgccgtgatgagcatacttacagctgaatcttttcttgcatccatggttagttccctagaataagttcccagaagaggaatggctacatatatgcatgtgcaaactttatggcttttgatttgtgtcagtagcataatgtattttcttcactggcatttagcatacttttaacctgtggtagcccataactctttactgtgtcagggccgggttccgtgcacctcctttatcagcctacaacactacgatgcccccagcctttccagtgccgcctcttcctgcccagcccagttcctggcccagaggccatggcagtttgcatggaagtgctgagtattgtttcatgtttgcaaagagaggacagctgtggatgaatggagaggaaataggagaaagtcattgtcagagactcgggatttttgatggaagctttatcgccgatagatatgacatttgccgagtaggccatcacttctttgattgtcactttccaaaccaaagcaaatgaagtcatcaaaaagaacgatgtgtcggagggcatttcaaaattctggagatttctgagacacgtgtaaggaacagaaaacctggcttgggtggcatgctgtgtcaaaggaaaagaactgcagtgaggttggaggagtgggctcacctgatggatgcatttcttcagtacatacatggcaggggaaggcctgtccctctgtggggtcaggcagtcagggtggctcttttaaagtggtagcttctgaatgtcctggctgctgggatcctagtagctttcctgggtgcccttggaaagcagaggattggtggtggtcctgggtgagggtctgcagatgcaggtggtggccaggggtctagccaggaagatatgccatatcagggaggcccagccctcaggggactgaggtttagagtggagacttggagattccttggaggtctagagataaggagtgactttgttccataggcaccgggctcctggagtctgagccataggaaactggtattcagtactagagctaggattgaggaaggggtctgttcacaaggaattcagtagcagcccaggtcctacgtggtaccacagtcagagtggaaccagcagcccagactgctgtgccatcgacctgaaggcccttcatgtatctggggagctgggactaagtggtctgtgctgtgagggttgggcagccacagcaccaggggtctggacattcactgctggtaacggtagttggcagccttctttcttgtcttttctctagatcaagcttagaacattctatgttgttttccgtatggttactcagtggcacagatcttacaggaaaggcagaccttgaaaaaagtttgttttcttctttttgttgtaaaaaaagacagatacagaaagcaatattaagcaaatgtgtggctttgtgattttatgtaagccaaacaaccttgttactgcataactttgctagtccccctaagagcctctcctccatctgccccaccccagttacagctttacagctcctcacccttcccaattcttgtaacagccacttccatgcatttctttacggatttgtcacccaggtgtgtgctgtggactgaatgctatgtcccactcaaattcctttgttgaaattttcacccacaaggtgatgggattagtaggtgatgatgatgacctttgaaaggtgatttggttgtgagagtggagccctgataaataggatgagtgccgttgtaaagagacccttggcccattctgctgtgtgaggacactgtaagaaaggaggcagtccctcaccagacatagaatctaccttgattctggacttcctagcctccagaactgtgagaaataaattcgtgttgttcataagccacccagtccatggtatgttgttacggcagcccgaacagatcaacacagcgtgcacgttccttgctgctgtttttgagccttgcccattaaaaaaaaaaaaaaaaaaaaatatatgtgtctttgaagtctcctttaaaacacgcagcttgccctctcttccttcttttttcctgtgggtttttaatctgcagatccccataagctggcatgcttcagcagttcctctgtcttttgtatttcctgaacattggcagctgcatccagaggtgtggaccagacccaagtctatctctttaacaaagtagtgatgcttttcatcggcaaacctacaccatgtggtttttgctccttttcacgttaacagccaatgatgcttaaggcacaaatccattgctttactgagagttgcaaaatcgtattatttcaactctatgaatttgttttcatttattaattgggataattttctaagaaggagcttccatgtcattttccatttgggtactcagtggcacaggtcttacaggaaagtcagaataaatgcttaatgctttctctcgacccacttttcagacattgacttggtttcctgtcttccttaagactgaaccaattaggtcgttttcaataatattatgaactcatggatttacacacatttgatgggtttcagtccattgcaattactatctttattgaaactcttattttcctatctttgaccagccggagctccttcacattggctctggggtccttttaccatgacttcaggagctttcctatcttctttaccatctggtataggctcacgttgtctatttcctgccccagacctggattccaccatttctccaagaaatctgctttcttttaatcagaaaaaagtatttcaagaccagctggggcagcatggatgcttattgctattggtttggtcattatttctagttttttcagtggacacaccatacaatgtgtagtgcgtatgttggggagggaggggtgttatcaaatactgtgagttcaaactgatatttcagactcaaattcagaactgtatagttttcactcaactacttttatattgcatttgtatctcctttcttccaaaccaagaatcttggtacttttttttgaaatggagttttactcttgttgtccaggctagagtgcagtggtgctatcttggctcactgcaacctctgcttcctgggtccaagcaattctcttgcctcagtctcctgagtagctgggattacaggtgtgcaccaccatgcccagctaatttttgtattattatcattagtggagacggggtttcaccatgttggccaggctggtctcaaattcctgcccccgggtgatctgtccaccttggcctcccaaagtgctgggattgcaggtgtgagccaccatgcctggcgatgtgagccaccactcctggcaaatcttggttcttaaagatacagaattagaatatcccgtaattattacaatagtcccaataacaataataagagcgctataccatcagtgatgattactgaaaacagttaaacattttttaatccctctattctcttgtttccccccaatttttgtggctatgtcatatttgcattatcagatcatataacctaggggtccccaacccccggttctggcctatggcctgttaggaacctggttgcacagaaggaggtgagctggcattaccacctcagctccgcctcctgtcagatcagcggcagcattagattctttttttttttttttttttttttttttttttttttttttttttttgagacggagtctcgctctgtcgcccaggctggagtgcagtggcgggatctcggctcactgcaagctccgcctcccgggttcacgccattctcctgcctcagcctcccaagtagctgggactacaggcgcccgccactacgcccggctaattttttgtatttttagtagagacggggtttcaccgttttagccgggatggtctcgatctcctgacctcgtgatccgcccgcctcggcctcccaaagtgctgggattacaggcgtgagccaccagcattagattcttataggagcaggaaccctattgtgaactgcacgtgtgagggatctaggttgtacactccttatgagaatataactgacgcctgatgatctgaagtgaaacagtttgatcccaaaaacattcccttatccccccatcccgatccccaccccaggtctatggaaaaattgtccatggattgatagtgtgaagcatgtgatgtgctttttcaacgtgtagttttgatttcttttaatttcagggaagttgtcttcagttatgtactttaacagtgttctgtccccttgacttgcttttctttatcaggagcagactcctcttctccattgattggatcttctttgcccatcctcagtatttgtctctttctctgagttccttcttaccttttttcttttcttcttgattttaaaaaaagataccttttgcacctcccatttcctttacacagcttttgttttatatactggtttttatgttccttctagtttagttttcatctctgacattatgttttaatattatttcaggtcttatatcactttttaaaggcctttagttcattttaaagtaatatgctgcatattttatagttttttggtccatctttttggcatgcattcattatctgtagggattttcctctccttctccacctcctcctcttcctccttctcctcctcttcgttttctttctaatccttcttcagctttgtatgaaatttgaccagagtatttactgccacagagaggctccttcttttcactccttccactgctgccaccaagcttttgtcccccaagaggaggatggtctcagatggaggatggtctcagatggaggacgatctcagatggaggatggtctcagatggaggacggtctcagacagaggcccttttgcaaagtttgccttttctcgtgaacagtggtcttgagtttgagggaggaggagtaggtcatgtggactttctaaccttacagcactgttccatcttctgttgcatcccacagtgttaaaactgtgcagctggccctctgagatgtcctgtttctgttcccctcctccacttttacctggccaacctccttcctttatctctgttatttctatctgctcaattttgattccactcccagcagtgaggccctggacatgttcattgagagtccctggggacagtgcagctccagcctcttcacccaggcctcgtaacacaggcccttgcgtgtgctgctgctgctggagtgagccaagctgcttgagtgagccaagctgctctcagtgttagccactgttgtcaaaatggctgtctgtgtcttccagggaatgcttgttggatattttggtgttttgtgcccaggtccaccagatgccctattgcttccctctgttttctctagcagagatgcccccttcctcaaaaaagaacaaaaaacaaacaaaaaacatgccttgtggttgttggtggtttcattcatggacttgtaatttggagttcttggggataccttgtcacctagttttgttgtaaatgttgtctgtgagttgttgcttatgcatttagtgcatctgtgtgatttttctgggagacattggaaggatctcattgtagctgccatcatcccagagccccccagcaagattttaagctgatgggagacagggccccttgccgaacgtctgacggcacttcacatattgttctgtgtgcaacatggattcgataaatgtttgtagcatacacgaaactgtctaactctgggtttgaactccagccccaaagcaggcacaattctgggcttttggtattacatcctttttgcagtttatttggaagatattcatttgggcgacagggatgtactgtctgggtcagatctgggaggagtccaccctctagtgggggagagtggctctctgctgcctgtgtatggagataatgagtttcaaatgtggaactggctttggagttcatgcctgccactccaaaaaggcaagaccagagtggaacatacttgggcaagcctgtgactcccagtacctttatctcttaaagggatttatacagcagtcacttgtctgcttctttgcctaggtccctaattaaagcagttttcaacccgataaacagcctcaccttggctgatagagttggacaactccttggtggcccgtttccatgccctctcaggctctgcagctccagggttaagttcctgccttcagcagggccacccactgaaacatttaatgaggagaggagtattgtttcttggagacataattaccagagacacttaatgccacctttcccaagataacaggccttttgaaatgcagtgtgttggggaagatttagccaagctcagtgactgccttagcagttatgagtcatattaataatgcctacatctgcctccaccaaaaggctctagggtctgtctccgaagtttattaaactcttccttgggagacttgtgcttgggacttagggttctaagtcttttctttcattatttttggctgtaactcacttttacgtggttgtggccctgggcaaaattttgaaataggtaacttccctttgcattctcccagtactataagactcatacgtcctgggttttaggggtgcaagccagtccttgcattttaccaggattcttgaaggctgcaaactcgggatgtaaacacaagccattactgggagagcatacttgagacattggaggcctcttaagatgcttgccttctcaggagctcctgtctcccaaaaacacaacacaacaaagcaaaacacagaaagcacttctaatgaaagacttttatttaaatgtaaggaggcacctacttaaagtaactcttaagaaaatcacttaataaatatatatgacttttgtaatgtaaaaaatgtcttcctaacttatttgttttaaaatttcaactttttgacatcgtactgtcatcctttaaagttttgtgggttttcttagttttgaactttttcttccttaccgttgtcttccccctcatttcctggaaagggaaatcgtttccttctcatgatctgcgaggcttccttccctcctctctcttgtcgttgtttcattttgttttcgtcttttggccccaaggaagcagacgaagaatcctggagtgagagagacccgggttcccattccaactttgccctcacttgctgtgagactttggcaagttcgttggcttgtctgagcctcagttttcctccttgtaaaatggatataaaaatctctgcaccactgagttgcagcagtattaatgtcatactttatacagcatgcctagtgcctgccccagtgcagatgctcaggaaatatcgtccttacttaggagcactcctgtcaatgaaaacaggacctcttgccaaagagaaatattttgtgattagtgcttgctcctgtccctgcccccatgagcaagtgtcctccctttctcctcctgcattgttgaggacacgtttcttgatacaaatttaactacagccactaaatcagaaattcccacccaaagtcataccataagcaaaaaaaaaaaaaaaaaaaaagtgggcttgtatatttaaggctgtgggtggtggaactgggcatgggaggggaggccactgagacatctctttgctccatcccctttctgagtttcctaggcctccactgttttctctccaagcagtccccctagagtccagggtccacagggagacccgttgtccctgctcccccaccaatttctcccaagagaaaggaggtctcagatgaggacccttttgcaaattgttgctctggaggctgaaaaatcaagctcgagctgcctgctggtcctgatttccttcctggccgttagtccctgcctttttcctctttgtcggttttcaaacgcaactgcccgcgccaccgggagctgcccctgacttcctccttccctcctggccccagctctcctgctcttgttcctgcccctgcctccctccctaatacactcaactgcttaaatgtcatttgtgaaacaacagaaggacgtgctgtttttgcagcatcttggggaacaatttttttgattcatttggtgttaagaacactcataagaaatgtattcagtgaccctcgccagcctcagtcactggtgtggttcccatttggtggttggtgagcaaaacattttccccccagaaatgtccactcttctagcactttcagcctttctccgtaggttcctttgtcttcaggtccttgggtacttgaagccctgcagttgctagttcattttccagctgggagagcgatcctgatccagctccttctcaggcctttgaaccaagttctttggcaactggccagggagggaatatggccatgtcaggcgtgcttttccggcccatgagataaaaggaatggctggaaacactattccttccgtgactcacagggccaacctggcatgtgcaaggaacccgtcagactgggtggggacctcccgtccaaatttacctgcgcagacacagcacctcttggaggagctaggaagtgggagttcccttagcacgtgatccatatcttccctccaggccctaccgtgcctgtcttgtagcatgacgatgtatattctcaccttagtagtccccttagcctgtaaagctctttagggcaggatctacatctgcgtaaccttcagggcccccagtgctgagaactgtgcctcacaggtcctaaatgtttactgaaaggaagaacacacaggggtgggtggatcacttgaacccaggagtttgagaccaacctgggcaaccaagcaagatgcagtcaccacacacacacacacacacacacacacacacacacacacactagctggttgttgtggtgcgcacccacctgtagtcccagctactcaggaggctgaggtgggaggatgacttgagtctgggaggttgaggctgcagtgagcttgatggcaccactgcagtccagcctgggctacaaagtaagaccctgtaacaacaaaacaacaaaacaaaaaacaaaagaagaacacatgtatttacctaactgagggtgggagtaggggtcagagagaactgtttcctttctctagaccttaccctgttctctgccagagaaaacggtccacacacacttaaacgattatttaaaaacctagagaccctttgctcattactcaaggtccagatgagcaattatgctatgaattagaattggaattagctgcttgttctggccagaacacctgattgcaatatagtaactgaattgtccctgcccgtatgagttattcagtcatttcggactgtggtgctttggatttggttagactgtcatccatgaacacccagatagaattgttgctgttttgcagaatcatcaacacaggctcctggggcgtcaaaggtgtcacagcaccctgactgcaagagtagattgggagatgctgttgtgtctcgaaatcatccttggcgaatctccatcacacttggccattttatcttcctgttcactttcagtgcccaaggaagagaattgtgggaccaatagcaaaaccttccccacttgccttccagccatggtgagaatttggaggaaatgaaaaatagcctaattctcatacaccaaaaaatatcaagagttcctgttctaatgagttgtttttacattccacttgacaggaggctgacgatttgtggtttgcagtgtgagtgaccttcttgaaaagcattgtgtatcttcattgactttgaacagaccttaactgctgggtgaatttgggcacagttcattccctcggcagatgggcgtgccagatatcacgtgtactgtcttgggcctgtaatccaaatgcacagtagatattaccaccctccgactttgttttgggaaatccccggatgtagaaacattggagttgtcaatttcatgtgcgtgggtctttccctaaactgtgaatccttcctccccaaaatatcattcattaattgatcttaaaaatcagctgggagttaggctccttatttaacactgccatttgcacctctcgcttatataacacatttgatattctctttatctgctttgtccccacctttgaatatctcatggaggctgagctttgccaaacagacagataggaagcaaaattagaagcttttctctgtgctgacttctaagggccttcctggttttctgtgaagcaaccaaaaaaaaaaaaaaaaaaaaaagtcgagactggaagaagcaaactttcagctaattatcatcttttttcccctctgagctcagagtactgttcttaatttcctgaccagcttgtacccctcccccgctccctccgagcatctgtggtggtttccaatggagccgcattcctgctgctctgaacttccaacataccataccagttggtttgccaaacagtgaactgccagccatctgccatccaaagtcagaatttacattgtttcatcttaaaataacgcctccggaatagcaagccactctatgcatcaggttttaaaattgacaatcagccagaattaaaagcaaataccaaatgggtataaaaaaagaacgttgttgggggaagggactagcatttgatggagagtttatttttcagcatttttacctgattctcccccaaaatagccatgccatttaattttatctgcaacagcaggaactacttatagactgagaacattaactttttacttgcctgactctagatggaagagcagttgtcccggtttcagggagaagggatcacctcctaatcccagcctatagggaagggagatttgtctttgcctcctctcatcaggcctcctggtgctcaggtgagaaagtgaaggcactcggaggtagaacaccctggccaaggtcacatgctgggtaagggaggaacgatgctgtgaacccaggactcctggctccaggcatctcgttctgctctccatcccttcctacctctgcatacttgccttgactagtcaatggggctgcaggacgaccttcattccccttcagtccttagtgccaagctgagcagccttgcctgcctcattcccctgctccttcaggacagataggcaggaagtgatgtccatctgcaggactggggacacctgggggcctgtgatgtttactggtcttgtggcctgtcgaaagggaagagcagccattttatctggacggctttctagagcagatgggctcggaggagactgattttttgaaagagagaaagagaagaggcttcatgtttcgtttagggaagctgttccaggcaaaggcagcttggggaaaagtgtgaagttatgagtgggcagaggaagcagagggctctgaatttataccaaagacacctgcctacagtttgaaactctgtgccacaggcaagcccgtgtgagctcggaagatgcgagggccccaggctgggcagggcactgcgtggccctgagccaggccttgtgcaggctctctggaattttctttgagccggcagtggggacaatggcaagcattaccctgacagacattccggagtcaaggcatgctgcctgctcagctgggtcttgatgtgagggtcagcgatgggagctgtggtgatcttttggtctggtttggtttttggccagagagtggcatctccctttggaagcgttctctcacccccagcaccatccctgctcccgcatcccctgcttgtacctgtaacagtacctgctacactggccaggcttcgttgctggggacgtctgtccatcctgctagactcctcgtggtcggcggctgtcttaactgatctttttcattctgagcaccattagtatgtgctcagctaatatcatgagtgaatcagtaaattgctgagatgacgtaggacttaactggttgtgctgaccaccagacccaaggctgccagaccacgctgttgcctctgtgaaagccacttgggttgacctgaggtcttgtgatattgttgtgttccggttgggccttataattaagtagtctccccttatccgccgtttcgctttctgtggtttcagttacctgtggtcaggtaactgcagcccaaaaatattgaatggaaaattccagaaataaacaatgcgaacattttaaattgcatgccgttctgagcagcttgatgaaatcacacactgtcccactccatctgtcctgagacctgactcatccctttatctagtggatccacgctgtctacactgcctatctgttagtcacttaaagacatcttggtgatcagatcgacagatcacaagatgggtgagtaagaacaataagatattttgagacagaaagagagaccacagtcacataacttttattacaatatattgtgataattcttctgctttattagtgttgcgataatctcttactgtgcctaatttataaataaaactttaacaggtaggtatgtatacgaaaaaatatagtatatatagggtcccatatcctctgaggttttgagcatccaccgggggtcttggaacatatccctcatggataaggagggcttccgtattagcaggttatggagaacatcctcgtgtgctagtcactgtacaaggcatgcactgtaggtcttatctcagatcacttaattcagtttattagcaatggccctgtgaagtgatgagccaaccaaggcacagaggtgttgactttccccatgtcacactgcgagtgagtagcagaggcagataggaacttgcaagggctccgatcgcgggcatcccattgctctgtctccggcgctggctggaccccactggtgtgttgtgctcagcactggagctagtctgaagtgccttcacccacagcacatctggaagagggtaactgggatgaggcaggcctcatgaggaaggcgttctagtttgcctgagaagcccaagtgaggggggaaagctgcttttaagactctgctcgtttgtccgtggcagagagggtgtgctcacttactccaggtgacaggaggggacttgtgggtgaagatggcaatggggccaatgctagcccatcaggaagggtttccaagcaagtggagctgccggacggtagaattccctgccccgcgaaggaatgagtgtcctgccacagcagagccaggcacagcagaatgaccatgagtcatgaagccatggaaagaaagggtacctcgctgatccagatcgtgggacaagtgtaccttcacacatccactctgactacaaatttggttcattccatactgtgatgatatatttctgaagcttaaaatacttttaacgcatttttacagagtgagtcattttaaggcctccccctgcccagccttgtaaatctgatcaggagaatccaaatttattttaaaatgaaacaaaacacgaataagatgtgcagataagatggagtgcagcactatcatttgatttgctaaaagatgtcttcctttgcaaaatcagaagatgaaagtgtgactccttccaggggctgtgagtgttgatctgcggaagccctggggccgaggttgctggccataggcagcagaggggccgggaggcgactcatggccaacaccggagtggggtggtcccagtcctggttgcctctagtgaaggaatctctagatgcaagtttaaaaccgtgcctagccctctggccaaatgctgttttcaagatgcactgttccacaatgaaagataaaagctcttttattaaaacaaagcagttgtaaaacagtttgtatctgatcctgagttaaaggcattactaagggaaccacatagggacagagtgaatgtcacttcttccattaagtttcatagtgtttgctgcccgcacatgcttgtacctgtcttgtcacttttcccttctgcctgggagacgggtcagtaaattccaaagggccttttgctaatctaacagccagaaaaccaagcaaaggcttctcccctactgatctccaagagcttagcaagaaaatgaaattcttgtggttctagggcacagctgtgataaccagggaccaacacccgcaagtgtgttgaaacaataggcctgaagtccaaaagctaaaagaataagtgttagaatccaagctcaggattcacaatgagttcgagatgaactctacattcagtttttggagaaaaacagttgtattaagtagtgactgagtatttaaggatgaagtattaagtttcaaaactgttcaatattatattaagtattaaaaactaaagtgaccttttaaatactgttgaattatgcctcctttcatagagttctttaaaaaaaaaaaaaacgaagaagaaattatctgtctcctcagctaagaaataatctattcatccattctagacagcttatttgaacatagcatgatcctggcactactgcccccctaatggttgagtgctttaattgcagacaaagtacccaacgaaatcaaacactgaaatttcaaaaggaaatataattagagcaaacaaaatgccatctacagagactgattttagtaagttactgactgtcacacccagtgaagactttgtcatcttttgacctttagttgtcttttgacttgtggtgcttcatgcattaaaactcccatcagagattaagaaaaggtaatataaaaggaggatagaaatttataatatattaaaatttgattttaggatgaaaacttaaaaatgaggcataggttaaaataattattaatacgggataggtaatgttcattaatagtcattctatttgtgcatcattgatagcataagaatttatttaacttaattagggccagttaatccaaaaaatactctttaaaaacagtcacagaagcaaaaatacatatgagaattattcatcagttttctaagtttcaaagcactattatataacttatagcagataaaagaggaacaatcattcattcattctcctatgtggttatgagaccatgagttcataactaaccacaagtcaaggttctaacatcaaatccttgatggacacttggcatgcatgttctgttcatattgaagaagaaactagatgctgaatcttcagtagtagtgttgcctttataaacttttgttttgccatcatttttgctttctggtttaataatagccaacatttgtctcgtgttttgcagctgcaaaatgcttccacatgtcattttcattccctcaagcctggttcattagttcctttgttttatggatttggaagccattatgttcaaagaaatgaaatgacttgctcaagatcacataaccaataagtggcaaaggaaggatgtgaacttagattccttccttagcctctttattccatgcttctcccactaccagagtactgcttcctgtgagaagagtggtccctccaaagggcaatccttgttatacatggtggcatagcatacgggcggccagtgaagaaatagcaagttaggcagagaatgacccagtgcctgaggcttccaaggaaacagatttcacacaaactatgaaatctacttgtcctttaatgtaatgttggttgtcatttaatcatttattcatccagcaataattactggcagagcagcagccatatcccttgaactgtgagtacggggagcaaagtcctggtcaccgccttgaggagccaccttttgatgaattgtaaaacacctctccctcgggccaaccactttgctctcctgtacttgccacctccaggccacgttacatacctggaatatcaggctgtcacagtgaacgacaaggaggaagccctgctttgtcaaagatgccccatggcattcactgaagaggtcctgtgggtcggctcctggctggccatgtggatttgtcctccttccagatgagtcagcttggggatattcatctgagcagataagtgccaatgttgccatggagagaaaaggcgccagcgttttgttctgggacgtgctgtcacacacgctcgtgggcaggtcatgagaagacgtgtctgaagtgtgatccaagtctgcatgccacaattcaaatccaccctctgcaaatgattcttaccctaggcacatccgaatcccctggagatgttttcagaccatgctaacccactgcacccctgccgcaatcccgatgaaggtgcagagctctcagtgtcatgatagatgattagggaaaagcttaattctttagttatttttaggatatgttattttggaacaagatcgagaaggatgtaagtaccaacaggcatttgaaagccagaagggaagtagtgagccatcccggcctctagagatggtgcagttttaagactaggaacacccctatattatgggagaagttgcttcctgagcgcgctctcatgctggacatggggagagtgtcctcagtccccaaacctgtgccggccggcgcctcgttccgtagcttccctgaccccacatagaactcatgcaaggttgacagaagccttctttctagggttcccacactttaggggtgacataattgtttacttctcgttctcaggtttttgcctgcataaaagtaaacagcagcaaagagaaacattctttctagttaggaaggaagaagagacattggtcatcaagcagagacagtgtttggatcccttagcatggcatgcaaggctgtacagttttccagagtcctttccctccacctaccgcctgttagctaccagaagctccttgtttgcctcagtacctctgtgcctgccttctttgtggtcggtggtgttgcagttcctaccatgcaagcataaccacgtctgccttctccgctgtgcctaagaggaaggactgtggcgcatccatctttgtgttcttagactccatgtcttgcaggacttgggacatggttgacttggcaacacttgctgaaggtttgcccaagtttggttctctgactctctgattttgtgggatttccagaagtctttccttacacatgagaaagtgtagggaaggagaagtcttatcatcctacacatgagattgaatgatagatcaaagagccccaggcagaacgagcttgttgatgccatataatcttaagcatttgcagcgattgtcattgccacctcatgacaattgagtctgggatgatagagcagtgttggcagcactggggcctctggaagggcatcgttagctcttctcaccaggcagggccttcccaccttttgcctctacactactcggggctttcatgctgggtgtcattggccctgctgggcagccattgccataggagccagaggggtccaattgggaattaagaaataaactataacaatcacaggcctcattgagcggaaagtgctcagagtcattttccaagggaactccatggagattactttcagaatgctcacaaataagagaaacagattccttctgcatgtgaagcgtattgcagttataaaatgctcgtgcatatatgactttattttatttccattcagtaatgttatgagtaaatagggcatgtgctgttttcccgatttctagataaataaatgaaatctcagagagtctcacttttacaaccactgtgttcctagcaacggtaactatccaattgaaatgaatctcctcccacctccctccctctctctttctgaacaaagggggttagcttacaattagacaaaactaagatatgaaaaaaccataatgagtaacagtgatgtgaaacagactggaggtgcccccaggaatttgcaatagaaggttggaatggttagggaataataatttaaataatagctactatttttgaaggtttaagagtcaagatagacaactaaaaccagtctagaaactccaataaagctaaaaataggatttcctgtataggcttaagcgtgtgctaagcactttgctaagttgttattactaacattattattatttgaggcggaatcttgctctgtcacccaggatggagtgcagtgctgcgatctcggcccaattgcaacctccgcctctgaggttcaagagattctcctgcctcagcctcccaagtagctgggattacaggcatggcatttaccacaccagctaatttttgtatttttagtagagacgaggttttgccatgttggccaggctggtctcaaactcctgacctcaggtgatctaccctcttcggcctcccaaagtgtagggattacaagcgtgagccaccgcgcccagccgctaagtgattatttaccagcgaaatcttgtctaatcccccatccagttcatgaaataggtactgtttttactgacatttttccaaatagtcaaccaaggactgaaagattaggtaaattgtccacagtagctcagagatgtggcttgaacccaggactgtctgaccagtggtttttttctctttttagagacagggtcttgctgtgttgctgtgttgcacaggcatgtgcggtggcacgatccctgctcactgcagccttgaactcatgggctatcaagccttgatcctcctgccttggcctccgaaagtgctgggatgacaggcatgagctaccttgcccagctactgactggtacttttgacacagcactaagttgctgcctttgtgggccccatgggggaagcagggcaggaactgggcctggaaggggatcagggttggcttgcatgggggccagaggcaggggattccgggaaggaagccagcatgactgcaggcacagggggcaacaccaggagtgagggcacgtgccggggggctggggagatcaagtgggacaggtgagaatgggccagatgatgaccgcactttggagcccagcagaggagcttagacctggtagggtgggctgttgagcccctggagggctctgagcaggtgcaggaggtgagaagtgcggtgtctgtacagatctctgaagtgaagcattggctgtggggtcaatatcatggccatgggctttcggaacccatgaaaagactgtgggctggacccaagggcagatgcatgtctcactgccatgctcgccctccccagctcaccgcacacccagttcctggcttccatgcaaactcaggaaacaccagtggagacattgtcccctgccattaggctgattgatcgagaagtcaagccgccttatgttcagtgtagtgagctgatgggcttttgttctccaggccaaattcctacgatccgtttggtcccagaacactttgcctgtggagtttatgagaagcaagtacagaagtaaacttacagaatgtaattttgagactatggacagagatattagaggagaaaactgtgattctcctaaatccaagggctggtggtattggatgggttggctgcaccagcgggagtgggaagacccctttgtggaccttggtgctgtacgggagaggtgataagaatagccaccaacctagcacatcctgcaggctagatcctaggctgggtaccgtgcatatgagtcccgcaagaacactatgaggaaggtcttatgagtccagtattgcagaacaacaaattaagtctcagaaatattttacaaatcgcccaaggtcttccagatagtacatgacaagtgaaattacaatgtaggccttccctgtgtcccactctatattagcaggaggtaggtggtccaggtctttgctatgaaccattcagagtctgacagtttagcgtgcatttccccctcaattttgcctttgaaatctcttgtgcatttgaacagatgaaaaaactttgggattgacttgttggatatggtttggatgttttgtcccctccaaatctcatgttgaaatgtgacctccgatgttggagatggagcctagtaggagacattggctcgtggaggcagatgcttcgtgaatggcttggtgctgtcctcacggtaataagggagttctcacccagttcatgcaagagctggttgcttaaaagagcttggaccctcctcctctctctcttgctccctctctcactatgcgatatgcctgcttcccctttaccttctgccatgattgtaagcttcctgaggcatcaccagaagccaaacagatgctggtgctatgcttgtgcagcctgcagaaccgtgagccaaaaaacctattttctttataaattacccagcctcaggtattcctttatagcagtgcagatggaataacacacttgtacagccacaaatctgctccccctcttcctacttattcctatcttttttgcatcttccatcctccccatctccaaaacatttagggagaaacaaggctggcgtctgctgggtagcagtctgactgattatcaggcttagcctgatcaggagctgttggcattacacaccacataaggacagctggtatggatctttggccctgaaggtagatgaagaaccttcatatcggaggcatgaccacaattttgtttgcaaaactgaattaatatgcttacgcttctatcttcgtgcccctagtggaatgatgtttgtggagccagtggcctgtgggtgcctcgagaagaacaggggtagggctggctgcaccttatcaacagctgatcaatagctatcaacctgtcaaccagccagggagtcaaggattcgagggagatgctcgctaagcagcagcaagttcctgggcattggcttgtccagaatggcagttcctgggtaaataatgagaccgcatcaccagtggaaatgggaaaacacacaggtacaccatgctggtgcctgcaacacctcaaagaccaacatcttgcttcgggggttgaaaccaagtggtcgagactttacacaaatgcctggtcatggtcatttcttttctctgtaactttggttgccctgactaggtggctctgaaggagagaattcccccgacccgacttctttgcactggactggaattgagtattaggtcaatacgatcagtgctactttggaggtttctgtgtggactttctgatgggggaggaaggcgtgattactaacttgagttcctattaatcactctgttcccctccccggtcaggttcaggactttcctctgaagggcctggggaagattgcgtcttcgtgcagcttgatttggttcagccttctcttagcaaattccctttctgggtggccgactcacatttctgacaatctgagctgctcatggttgcttaggagatggataatgcattcctttagctaagtcacttgggaaacatttagcaccacttgtacatgggcgatcacatgtctcttagggcattgatacttctgacaagtttcttgaggcttctcctatccctggcttctacaatgcagccaggaacagcaaatgccatttggctcacttaatagcaaggcatctgtaggactgcgcctgtatttttaatcaagtgcagatttagaaaatacctaattagaggcaggacagcagcatcttaaggtcatgggctctgctgtgatattatctgggcttggatcttgggcatggcacattgctgctctgccttgcctcagtttcccaatctctacaataagggtaatgataggacctgcctcctggggtttggtaaatgataaataacttattccaggtaaagctcttagaatactacctgacacacagtaagtgcttaataaatagtagcctctattaagcatgttaaaccccaagggaatcctatttttaacttttttggagtttttgaaccagttttagtgatctagttcaactcttagaactaccagtgttcggtgaccacatgcagtgaactgagatatgctaggtgctgaatatataaagacaactatacaaagtttggtttcataaagagattttcatctagtgaaagcaagtattcctgggcatagccacaataaatacgcaggtgccttctttactgtatcattgcactgaagtcaggcaacaagagagcttgtgtgaaccctgttttaaaaagggtgtaagcggggaagggatcaagaggactgaatgttagcccagattcttttgttgtgtgacctcgggtaagccactgaagccttctagatctgactcaggttcctcatctgagaaatggggctacaaagttatgcactaacttctagcagtaattcacgttatgcagctgggtaggagatagtgctctgtcccactgaacgtaatgatcgcgagtttttcttggaacgatttgcctgctgtacaggtggaactaaccagagggtgaaaaccaggccagttcacctgcgtggcttaacgttaattacatttgacattcttgcctggcaaaatcccaaactggaaggtggcctgaagcccctttaaggggatttctgccagcatctacgtgggacttctgatttgaggcacagtttgctttataaagaaccagattctctgatattactagtagcagtctttttccattagcagataagccaaagtgtattacatagtaattactgactctgctagaaggcagagcttctcttgtagccatatcctttgggtggatgggtggatgggagagccgggggcatctaggagggatgaggtaaggagtatgcatatttttacccagaagtgtactctgcaatttccacttttggttttgtctctgcctagtgagatgtaataccaaaatggctcacggagactgctggaaccccgtgtccagagcttgggagcaagcggtctgtgtctttcacagcactgcagctgcccgatttcaggctcaaaaatcagattggaacctctgctgggttcacagggcaaacaccctctggcaagtgactctttcagaggagggttgtgaacagccacgtgctgggtgtggaggcaagtgggtctccagggcagccggctgggatccactttgcacagatctcgcctcaccaggaggaagctccctggcagtgcaggcccccgtgatccaggagggactgcgcttgagcttaggtgatggcagcaggcgtgtgactcccacactgggagctctggccccagaacagaagcttctaatcagcaccacctgctcaaggcaaaaggccccgggtggccaggccagcagatgtctttatcagtggctcgacattggcagaggaactctgtggactcctgagggcacagggcggaagcagggagaaagggctgtggatggggatcagggaccctggattctagtctcagctctgccacaggctggctgtgtggcttctcccctctgggccttgacacagaaagctgacattagagttagatcacctctgggtccctgtggtgctagcagcctgcgttccttctggattctaagggaccacagggaaaagctgttgcccagtgagagactcattgggtgggcagctgccccaaggaacatctttagggagccctgcagtctggccccatggcaccccagaaactaggagggctgccggctaatcccctggtgataattctcagtctctgtgaaccactgaggcatttcctatcagggtggcatctccagtgaccttgctgagttggtgactttgacggtgaacaggctgggtgagactgggctcactgtggccatcagaacccaagctggcttcatctcccggccaggagagagcctcaccacgtgggctcctaacatccccctcagcagctccgcgtcccttcttcacagaggccattcaacagccagtgattctcaacatgtggtccccattggcaccacctgggaacttgttaaaaatgcagattcttgggctccaccccagaacttctggctcagataccctgggggtgaggcccagtaattcatgtttaaaaatccctgcaagtgttctgaggcacactaagatgtgagagccactgcatcagactaaccacgtgtgttcctcttttatttaaaaccatatcttattaaaacaccaacttagcaataaaagagcccttaaaaatcacccacagccctactgccccatcacagcacctgctgtcatctctcttccagccttggtccatttgcctgcatatttttttacgcagacatgcttatgttggactttttttcacttaacagtattagtgcgtcttttccattgcttcataaccttcatatttgtcattttcattgactgcagaacacctccctaatgtactggctttatggcctggctgccctgtccataagcatttggtgacttgccactttccatttttggaaaagtcacctgtctgcccagggaaagtcaccttttggggaattccactgcccaatgcctaaccttccctgtaagccctcaacatgaagtgatccaaagaagattgcttaacgaagaaaaaaaaaaaatccagccagcccagaacagatacagaatctgcagggatggatcaccactgaacgttccctgccctccccagtgttctgaacccgagtcttttctcatttcactcgcaggtggcgtcagcagagggggagcccgggctgaggctgggctggagcctgtggcctcgccccatgccaggccctccgtctggtcatttcctgagcatcctggtctcccagcaggaaggccagtccttcctctcatgccccctccgccttcccccctcttcccctctggcaccctggtctcctcccagacactcagcttggccagcacaccctctagtggtagcccctttgttttgacaagacctataatggttctggggccacgtacataacactaagattattttgttaggataaattcctaagtatgggatggccaggcctagggtaaccctcagggtttcttttaggccatgatctcttctgccagtggcagtctgcaggcgtgctccatcagtgggtccatgttgctttggggataaaattcgaacttcatgacatagcaaactatgttcatcattattggctcatggaccacaaactcaggccagatgcctagaaggggcagattagtgacataagtactgattgggccagacgatacgagagggtgggcctacaatgagctagagagaatacccaacctaatcacaatcaacaacagaaagttctagtgaaagagaaatggtggagagtgctgatgtccatcttgttcttggtttatgtctttagcctcagctttgtctactatacatctcctcctgcacatcccaggcatacctgaatgggccctgctctctcttgcctgttttttgtttcgtctgccttttcatgtgctgtttcctctgcctaaatgtttatttcctttttatctctctggatgattcctactcatgatttaagattcagccagaagggtcacctcctttggaagctttttctaggacaagctctgctatgttaggaggaggcctggcgtttgggtagacaactggagagggccttccctgcactgtatttggtgggatggagccatggcgctgaaggctcatcgtttttgagagcatcattgcaattcacttttcaaatttctttctttaaggctattccaagggacttatgagaaatgctgatggtgtggcctcttttcctgggcagttaccctggttagcccaaagtagactctggactcttccagggacagtccaagatagaaatatgcagttacatttagtaatttctttccttttctagactgagggccattttttcatctttatgtctctggaaaccagtagtatgcttggcgcacaataagtatttaatacattatttttgaatggatggatagaagactggagagatggatggaaggagggagatgcatggacacatggatggctggatggatggatggatgaacagacagatgggtggatggatggagggttgggtggagagatggatggatggaatggaatgctggctggctggctggatggctggatgggtgggtgggtagatggatggatggaaggctggagggagggggagtgatggatggatgggtggtgggagggaggcatggatagatggacggatgggtagaaggatggatggatgaagagatgcatagatggatgggtttatggatagaaaatggatggatggataaatgatggaaagatggatgggtggagagatggattgatggatatcctatatctattcctatgcttctgtggcttctgaagaggtgcctgggcagtgacttccccagtggtctctcccaaacctttcccctctgtgaccctctacctaacacagccttttctcctttttcttcttcccaccacccactctcccatgttcctctttttagctttaccctcatcccagtatttttctctcctttcttttctctttgatccaccctattcctaacataaaccagtccattccgtacctcctcttgcttgtttcaccctgagtaattagccaggaagtttttggtttagggctaatccccaggacctcagaaaggacatgtcctgaagagcagaatccccagaacatttcaggggaagagctgggaggaagggacttatgaggcctagatgctggagctgggtgtaccctacgggcccctccccagtgagtttccatcacccttcacaatggagtcaaatccatctgctgtcctggagactaggctggtagaggtgggaacgaacacacatgccctcaaaccttgtgggtggggctctaggttctggcattctttcaggagttgctagactgacccacaggatggagcacttttccctactgccccataatgtcaggggtaataggtgctgccccaatgacagtgctaaagcagaatcagggcagaccctcaggaagctgatgagacctttgcttccgtggagatcaaggagctgtaacaatgacacctgaagtcactgccatctttagggactggaaaaatcaccctgggtgatctgttccctgccccacctcaggcacctgccactcttgggaccccaggggattagaggcatgtcaagagcagacttccagaggacaaatcatgagtagtacgtattggaagaagtaatatgtgattggagaatagtaatgctaagccatttctttctgcgtggtacaaggttctcctgcccagtacaggtgaggaaactgagtcccagtgaagttaagtggctttctagaagctctactgcccccagtgaccgctggactgggcaaggctgttgcagctgcaggcctttggctgtggttgagctgcagttgtttgtgttagtttcagcagatgaggctgctggcttccctcttatggctgctcttccaaggcctccagcaggcccagcagcccaggagccttcaggcttgaagatggccctgccctcagataccctcctgcactgcggctctcttgaatctttaggaggaaaacccctagccatgatcatggtcttcatctcccaacccacactgctggaagagacacctgtacccagagtcgcccttgtactgcatttggtggaaaggtccctctagcagctggtgttggggctcatcttgacctgcaaggaggcaggctttgagtgccctatttgcagaatgtccagaggctgtcattctacacctgcctctcatttggagacctgaactagagttgtaaaggtggtgccaggagagggctttgccaaggcatctcatgaaaacctggccaacaagtgttaagggtccaccaactacagttactgaggcaaacacctcatctctgcattcagagttagcagaggacaaaggactcgaatgggctaaaggtcattcaggggcaagaatggcatttctggactcttctccttagtcatggaaggacaaggctgtgctgggaagaggtcccactctgccactaactagctggtgttgcagcttgaaatcacccagtctctgcccctgacggttcctggtccaccttagataatactcttcaccctccaccgccagctccctttcaggtcttcatcttcctgaatgtggtttcctctttgaaactttcatcttctcctgcagtgctggatgtgagaggacaatccctggaccatcacttttgaaatgggcaagaggtaggggcttccctaaagatcggaaacaggcatgagagaatgctgtgttcacccacctgacccttgggtaaacatctgaggctcaggatcatagatccagttgatggcagagtcaggactgtcccatgaagggtgccagccaactctgctgccatctggaagggcaagaaggctgcaggggcagagggcaatgtgcaggcttccacaggagctcctgtgtgagatgggggtcacaggtggtggcaggagaggactttgccaaagcatctgaatgtcagcatgcaaagtggggtgcatggggtcctgcaatgagaagaggttccggttcacctcgcacagggtcagtttcaaagcgtgtgtgttgtgtgtttctgtgtgtgaaggagagacggttttgtggcctattctaactcaagcagcttctgagctctagtgaagtagtttcaatttggttcctgcggcttaaaaggttgctggaacacttcagcaaaattgtagctccttaatttagctgcctgtcagttattttttttttccaggtggtttcaggttgacggtgagtttgacatttgtaaaaatgttttggaaaccatattagacaccttgaagtgaaaaggaatttaaagtaccttattccaggaagcgggattggaattattcttctgcctaccccaaatcggatcgctttcctttccttaatctacatggacaaagcccagtgctgcattgggaaactgtagggtgctttgagcacatggcctttgtgaatttccttcctgcttgctgtcaccttcattttggggacttctgcttcacttgagcacagctaaagacagagcatttttattttgtttgtgagagcgtcaaaggatattagggacgggaagaacatccaggacattcctcatacgctcatccccactgctttcccaggggctcagagggtgagggctgcagccacattcacgttctgatgcctgcagagctgagagtcaccccgaaatccgtgactctggagcccccttgctctgtgaagccatacagtaaaatactgtgacatttagctgccagtttcaggccagctatgtgcccagagcttgtaccttaaattagaagagcctgacgggtgacgtatagggctttgccacctggacaactatgccatgattcctcctgcgcccttagagatggggagaaatagcaaccacctgccttgaaataggagcatctccctgtaccccagcctgcttgctctgacgccgtcaaatccattgagagatgctgtcagacactctgcctgtgctaggaatgcaaagaatgaaaagccagagctcctgcctttggagcagatatcgacagaccagtgtcaataaagccctgatggtggtctgggccacacgaagcctcttgaggtagctccgcaggatggcaggatgtctttctctctcctggtggagaacgaggacgatgtccaggtcacaggttctcaactctggctgctcattggaataaccagtggcggtttgaaaactctttcacccacattctgacactgagctggtctcaacagggacacaggcacgagtaggtatttctggaagcttccaggtgttttcagggtgcagccagggctgagaactgttgcactagcggaaggactcagattggagtcctatttggagaactgttaaagaaaaaataaaatggccaggcatggtggttcatgcctgaaatcctagcagtttgagaggctgaggtgggcagatcccttgaggacaggagtttgagaccagcttggacaacagagcaaaactctttgtctccaaaaaaaattagctgggtgttgtagcgcatacctgcagccccagttgctcaggaagctgagccagaaggatcacttgagccgaggaggttgaggctacagtaagccgtgattgggccactgcactccagcctgggtgacagagcaaaaccctgtctccgaaaaaaaaaggaaaaataaaatgattcaggggagctgctgcatagggtgttgcagtggggaagagaattcaggctcaacttcgaatgcaaaggacaagtgggagttcataggtaaggagcaggagatggaggtcagtgaatggaaattatgggggaaacaccaggagtaagggggattgtggctaaagtgacctaacaggattcctgctgatggcacgccagggtgatcagaccacctgggggatggcagcagatggggaactcaattcgatactgaagttggggggattcaggttaaaccagcttaacaggattcttactaaaattggacaacgcagggacaaaggtagaagcctagaaattagggcctggttgaggagagagttcaaaggaatctgagtagagtttagtcaaagtgagactctgtcagaatgacgggtggtacatggcgggtggaagcctgtggcacatgtggggcagagggcagggctgaaagatgggacaggatgggtttgaccttgacaattggggcaggaggggcagaggagtgagaagatcaggtctgtggtcttaaaagattactctgtggtaaggagattaggagggcctggctcccagagttcagtgggggacacatggcatttgaggttctggttgggcagtccaggtggagatttccaagaggcagtgaagtcatggtctaaggccagggcggaggtggaagagctaccggtgtcatagccacatttacctggtttctgcagctgtgggagtgaactgtggatgttgtcactcacctggtggggggtggggtgtcttcctaaaaaagcaggtgaaggacagaatagcgccagtgtggagagagcccaggaagaggaaactgcctgggtgaccaagaatacgtcgtgacagaggaggacaatacgcgatcacagacaccaggaaagaaaaaggtggctttctggagatagcgccccttccttcatcataacccattcattcagaccctgtctgtgagtatttcagggcaggaggaatggatggcagtctcgtcaataccccttaaaatttctgaacataggggccattgaagtgcctgtgtgccattgcctgcttattaaaatgaattatgaacaaatatatttcttttaattcttatgcagttctctgagatatgtattccagtttacaaacagaagctggacctcggagaggggaaacgattctcccaaaattgtgtagccaagtggaagaaacattggaatctaggtctgattccagactcttccgctgtcccatattagtttcacaccagataattttctctgatcagacgttaggaagatgttgaaaacacctaaggaatggggcaggggtgatgaacagatatacctgaagcaggagggaagggaaggtttttatatgatgatgttcactggagcatcattgacatcatagacaaagcagtctaacaacagaggaaaggtatttcaaggccgtgaaccttcaaatctgtgtttgtaaaggctatatatggtcttttccagtggttctcaaacttcagcatgagttgcaagcgccgtcagagcttgccaagacacaattgttgggccttacctggagcttctgattcagcaggactgcggtcccaaaataggcatgtctaacaagctcccaggtgatgctgctgatcccaggatcacactttgaaaaccactggtctaatttagcctgcacaggtgatgggttctacttctaaaaatgagggatgaatgcatttggctttagattgctgaactagggattcctcctccgggaaaaatgggattcgaaccctttgaggagactcttcttcagagtggattatttaaaaaaaaaaaaaaaaaaaacagtctccaagagtcttcagaaaaattagccccaaaggcatgggatcggctgaactgcagctggtggagcagtgcctgtcaaatattgatgtgcgtgcagaacacctggggtcatgttaaagtacagattccaactcagcaggtccagggtggggcctgagcttctgcatttctgacaagctccagaggcagctgctgctgctgcctgctgcctgctgcctgcacggctcgaccacacttccagtagtgaggctagaggatccgtgactgcactgctacatgtgacagatcattgagatttaacctctctccacctcctgagtaacatgatcgatgtcacaaaatctctatttgaacagttctataatgttcaaggaagcaggtaaaacagagcaaatgtgtgaatagttgtcattttaggggtgaagggaatttttttcccccttgaaggtttgaatctgctgaaataaactgaacagaaatcaacaggagaaaaggcatacccatgtattaatgtgcaattgtgcacgggagccatacaaactatgagactctaagaagggtcagggagttgaggcttaaagaccattttcatgggggaaagagatgtaggcagttttgagggggtggtaaatgattcttaggagaaatgaatgagcccaaagaacagacagtggcctgagtcagagttcttcttagcgctggtggattgtgggaaggtgaggggtgcaagttcactgcagacaaagattgtctcatcatgcagataaagtctcccaagtaatgtctcggagctgctcttggaagaatacagaaaaagcctgtctgggcatggtgatgacttttagtcttttctcctgtagttcatctttcctagttattcagtgagattcctagggaggggctcttaagacaattgcttttttcgggggaagaagtttgtttcttcttcacttctggggagaaacaaggtggtttagaaagtctttggttctcaggcagcttctagggccttccaatttcctgtaattcaaaaatgcttggcatgccaaagccgcctattttagggtattgttctctgagccccaacatcatagtagtacaggggaggggaaaaaaagtttgttctccaccttctaggttctccaatggagcccttgtaacaaaagacaattaacaaagtaaatttacaaacagaagtttattaacatgtacatctcatatgtacatgggagaaactcagggataagtaattcaaagaggtggctggaatttgggcttcaataccctcttcagctgaaatgaagaaagaaggttatgggggaggcaatttatgggaaggtgaccaggaaaactacagaaagcaagtgtaaggttcgtgttgcagacttgaggctgtgccttctccctcgataagggtcttgtgatttaaggtcacccccgtcttcctggtacagagagggagatgctcttagaagggcagattttctctgtagatgtaaaatttcccttacgaaagggtaacttctctgttttcagagcttctcctgtgtctgcagtttctcaaaataatcagctcaaaataatcctcatgccaaagaggcatatttcagagtggcatattctggtctcctgcgtgagcttcgaaaaatcctgcaagatgggagacatccgatctctcacttttctgatgctaaacctgaagcttcaggaggccaagaaacctgctcagaatcctggcttcttcccattacctcagactccaaagaacacacacagtccaaccccttctttgtaagtggagctaatatcatatttaatgagagcagggtttctcattggcttttgacgtttggagccagataattccgtgttgggggaggggaagctgttctacgcatgatgggatgttgaccggcatcgctggtttgacctactagatgccattagcttgctgcttcccctgcgacccacccctgccactgctaccctggttgtggcaactaaagatgtcccctggtcattaccgaatgtctcctggaaagagcttgtctccagttgagaatcactgaactagggcactggaagtatggagaatcgcctgttgacatatttatgcctagtgttccattattggaacgctaagcttgtgggagttatttatatcctactgctcaaggtcatcaccaaggtctgatttttcacaaaaaattcgtaacctccggcatgaatgggttaaaacactcacccactcctgggccccagcacaggcaatccagtcagtgtttctctgtggaaaaggaccctggcatttgtatttttgaaagtttcctgggtgacttgaaataagctgtagccaggcttgagaaccaccggagtcatcttccgaatggaggagtgatagagttctagaggaaggattttagatgatttttgaggcatggtgagaagctttgataaaacactgccgttacagtgtgagggaggcttcaaccaaagtactcgcttccctttgcaatattttttaaacgtagctgttatgcactaaatgccctgtgaaattaatttgtcattgttatgttctgccatccaattacaagtttcttgttactacttcagtaatcaaattattcttttaacaaaaaatgaggcaggggagctgttatgagaaccactgacaggactccttccctaggcatcttttctcttctgcccacccaccggggagcaggccctgcttcctgcccttgccctagagggcggagggaaccctgccatcctctctccagtcctgccttcatgggccttcctccacaccctggtgctgtactgtttttcagaagcttgcttttttttttttttttttaaagtcttttttttttccccagaaacttactctttttttttttttttcttttttagaagtctcagaagacttcagtggtcccattgtatacaaccacacactgttgcctgaaatgcaaggtcattcacagaatcgcccatggtgcacggagctgcgctcaggcccaaacggtcagattctgcttttgacccacctgagcccactccctgcatggctcacagagccctgccttctgcaggtaccaggtcagactctgcttctgcctcacccgagcccactccccatgtgtctcacagagccctgccttctgcaggtgcagcactgttgccacctgtgccacattccccgtgagatctgacatcccctctctgtattcctggtgatccaggctgtgccagtctctgtaccttggggagtgctcggcacctatatgttcaggcccagtacagggtctgctctgaggggatggggcctccgtggggcaggcagccctgagaggagggggtccctgtgtggccacatgggcgtggccttgtgtttcctgtgcgaaatgggcagcctggcagttatctggtaatgagtgcatccaggacagatgaccaaactggagtcgcgtggtcgccagttgagaaccactgacctaggctccatgtctgcccaggctcccctgcgagggccactggcacttgcctcttagtcttcctccccactcccacccgtgtccccgcccaccacgggaagccaggggcatcctgtgcacatttatgacaggataggaagcaaaatgaagacttctagtgaaatcgtcgtacatctgcccattgtcacatgatttggggcattttttcgaggtttatcaaggaagagtaaaaatcacagcagtaaaaagagactttgcactggcctgctggatcacaggtgccgcattgtttctgtgtgtattacctcatttaaccctgatgaggggatgggcactgactccattccaaaggcgaagacattaaggatgttaaactacatgttaaaacagcacaaggaaaccctgtctctactaaaaataaaaaaaaattatctgggcgcggtggcaggcgcctgtagtcccacctactcgggaggctgaggcaggagaatgacgtgaacccgggaggtggagtttgcagtgagccgagatcgcgccactgcactccagcctgggcgataagtgagactctgtctcaaaagaaaaaaaaaaaaaacagcacaaggtgctgtgctctgagtttttagggagaaacctacctattctcaaatgtacttcacgttctggcacttcaaaaaagtaaaaagagagagaaatatttcccagacttacttgtcaatattctcactctattggaagaacacttttatagaaatgttaacctcatttgcattggcttttgtatcttccccttaaatctttaagtcattggtcacacaccccaagtgaacctagtttgaaaagaggtttatttctcattgctacacctgctgaagacccggactcaaggtctgctctggcccctgacatattcaatgctcttggcaacttaagtcagagtttcttcatctgaaaatgggcacaagtcttcagattggccctggataggggaggcactgtgatgtgtatgaaatgtctagcacactgtctgggacttagcaagctgtggtgagtatctgtggcattctctgattgaaccaaaatcataatttcagttaaaactatgaaaatattgttcatcacttatggataactgtgggcattttactactgatgaacccaagaggacttgccagaggtcacataaagccaacagtcaggtgacaagatgaggatactgggtgagttccctgggccacacactggccatctgacctgaggctgagcgtgggctaggagtcggttcttctacacgagcacgcctaacagctctgccacctgctttcccagtctgccctgccgtagggtccaagaagagcatttcatgtccttatttgtttgtggcttcatttgtcccacgtgaagggcagagacagaattatgagtgagcagacggtggtgtcttttaaataccgcatttcacttcctagggacgtttcttcatggtgctgatcatgcagtgaacatttcctgacctatggaagtgtcagaaacatttctggatggaacatgtctctaaatttccaaaaggtggtattttaggcctagacttcagactcttatatttgaaagaagtcactgtctgaccacccagtgctcagaaaatgaggtgggaaggtttggtggacctcagcctcccccactggcttcttagtggaaggctcatctctgacaagagaaggggcccttgagaatggagctttctgtgtggcaatgaacatggacttgaaacctgctagactaggtcaggggcatatgaaggcatctgggctggccagactccagtggatggacagctgtctcctctcttaaattttaagaacttaaatgccagggcttccttaaacattgagcaatgcttacatgctctgagtcagcttggatcgtgatggctagaaggagtcatagaggctgactccctccatgttcagtccaggagagggaaggtgacttccctgagccgacgtggctggtcagtgtcaaggctgggcactgagtccagtgcagccctctccctatgggttcctccctccaacctgctcctgcccagagctgctccttccgctctttctccccttcctctgtctctggggatctggccgatgatgctctttgtgttgtcaggaaatgtgcccagcagccaagcataccctgtcattaaaccgaatctggtggtaaggatgtctttatgaagacacctcatcctgtcatttgcctgtgaccatcacttggcctctcggcccttttttttttttttaaatctatgatattgggaaggtcaaattagctgatcgctaaggtgcattcccatactaaaaaaaatgttcagccaggcgtggtggctcacgcctgtaatcccagcactttgggaggctgagacgggcgtatcaccaggtcaggagatcaagaccattctggctaacatggtaaaaccccgtctctactaaaaatgcaaaaaaaaaaaaaaaaaaaaaattagccggcagtaatggcgggcgcctatagtcccagctactcggcaggctgaggcaggagaatggcatgaacccgggaggcggagcttgcagtgagccgagatagcgccgctgcactccagcctggacgactgagcgagactccgtctcaaaaaaaaaaaaaaaaaaaaaagttctgttgtttctgatctctgagttatgctgcgagaaaagaaccactttgtccactgctgctccttgagcttggggagattgtggggagaacagaaagcagccgcccgccccccgtgtttctattcagtgtaagaagaagagacgagcccattctgctttcagagtggatgcggtgccagggggtttgtttccttgccattggctgggcatgttttactgcattattcttccatcgaattttccataacagagtcttcagactcaaatccaaagttattacggcaaatcctgctgggaggctgagagggatttttttacttttagggaaaacgggcctatattctaggcaataaggatgccatcttgaaggaaattggcacaaacattctatggctgacacagcgtcagcatgtgacggtgtttgctgggcaccgtgtaggcatggtgttgtgactggtgcccaggtattgcagctggacggctgcctggcagccatatcaacatgggatacctagttgtatggctagcctgggagtcttctgtgcatgtgattatagcgcggaaaatgtgggcaatcaggactgcctagcatccgtatgtcttgtatagtttatgacctgcacacgggcagcttgtgccccaagtaatggagtcagcacgtggttgttatacaggtacagttacatggctaataggtgagcatgcattgaattgagacagttttgtgactatcccctgtgcaccacgtgtgcacacctacatggtcactattcaggctttgtgcatgtacatgcatagggttggcatgaagatactatgtgtataactgtatggtctgcaggcacgggatatttggtgatcacacagccatcccccaggccttgtgtgttgtaagctttctgcaatctgtggccaattagagggcagatggaagagaccctaagacaacatgaccagtgttaactttgggtctctagagagcgacaggaactatgagctagacggcatctgcgtcttgtatatttgtaatgacatttaaatattttaccagtctcttcgacgtcctcattgtgatgagtttttctcattgatctttccaaaaccaaaaggggccattcaatgtttttattgtagcgaaaccaaagttaatactatgcatctgtacttttggcagccagaaccctgtagtccccagcgacgatagtttgtattttcaaatacactgtagcagtgtaccagatcctaccacacagggtgtcaagccataaacagagttccctagccaccccaccccagcttttctttatatagtccaataaagggaattaatgttgtatcaaagatgaaaatctgcttatcacaataggatttacaaaataattgcacacgttttctcatttgactagctcattttcagttctgacagcccttttctctatatcatctcacttgattccctgagcagctctgtcagattgacagaattctcacatccatttcaaagatgggaaaaccaaggctcagaacagctgtggaacttacctgcagtcacagctgctgagagaaggcaccaaacccaaagccacgcttccgctgtgctcaggaaacaggtcctgcttcccttctgcactctgccccagcagattgtatcagctgctttctgaacactttggttagcaagacactaggaggcacaaatgggaaggagttggcttgtcccacctccacccagtatcatgatggctacttgtctgccttggattcagatttctttcaagattgtccatgcttattgattgtaaatcagtgacctacagttatatttccattcagttcaatccacatatgaactgagtctcttcgatgttgatgatattgcctttgacacttggatatgtgagcagtgggacctatacaaatgatttcaactcagtccctgtcctctagttggcttccgaccaagtggcagaagccaacacacacagtcacctgtgtgtaagcgtagcaggaaagatgagctcaggatggtttaggaacacgcaggaggaagcgttggagcctagcttttggtggccggggggaagactttgcagagcatggtcctatttaagagtgtgctttgaaagatgtgtagggtttttaacaagcagtggaagcatgtgtgtgtgcatacgtgcacacacacattgcaaagggctgcagtgggtaagggagaggcaatgccttatagggagaagggatgacctaaatacgtatgagtctgtgaaccgccatgttcactaaggggattataggatgtgtgtagaaagagagtagggagtggaggtactgaggctggaaagtttggttgaggccaaaatatggaagaaacatttagctgtatttttgagcaggagaatgacatggccacagatgtattttagaaaaatcagtctagcagaggccagatggatggagctgaggaagcaggcactgatgttcgaggagtttgaaggctcttgcagaagtccaggcagcatcatgaatgagtcatctcagcttggcatgcgaacagtttttgtcatcactcctctgtttataatgaaatgctgagaatgtctgcacatccattgaccctgggttcatcctagctacagaaagtacctttcagcaccagacactgggaaaccctccctgaagtccaatgaaacctgcgtacgtcctcaaagctacagatgtcccatcttctgtgggtttcagaggcacatatctttaataaaaatataaaatggtgctcctaggcacacatcccccttctgtacaaaagctgaaatcagaaatggcaattcacaaaggttccagtttctaccaatctttgcacggccctacaagtgcagtcaagctcaagtgggcagtctcttgtctaacacttggtatggctccatttctgttggaattgcccatctctaaggcagctccctcccttctccccttcccacaagggcccttagaggcaccttttcatctctcaggcctgatccccctccttctttgcctgtgtggagttgtttattcttgtttactggggccactttccgtgctgctgctgttattgatgatctttgtccttggtacaaggccaggcctccaggaagaagcgtttcctgcactcagccactgctgccgttctcaggtgcactgtctcttcctctccaacatcctctcccctccttacttcttttttatttacacactgagtgggaagagctatgaaggaatatgtaacattttaataacgtctcattttcctccatttggggggcttcggtatgataaaagtctatatcatcaaaggaaaatgccactgggaagaaaaccagagaaatgttatggcaaaaatgagatagaaaatggatttttgaagattctgcactgagaacttggattgtgatcctgtgaaagtgtgtcctggctattaaaccccttaggaatgattgaagttttagattgccttaaaatgtaaggacttctagtgtgggttgaagacagtttctcaatcagaactttctggaaggatgacatacgtgtggctgttgaataatcttgtctctttccccaagggaactgcccttagaaatgtttccacttccttctcttctgtttctgtttttcctcccagtaagaccataccttgatttggaacctcaagattgttaagtgaatgaaattgcccaagcccagtaaagccgatggtctggggtatggcccttacgcgagatctgttgagtaaagccttccctgagcctcccagccagaattattcagtttgacatctgtgctccaaggcatgacctcttgggtgccgatgccatcagtcggcttccaaaccgtgaacattcagagtgtcgctgagtaccagactctatgcttttttactccaggaacctggataaggattgttctccatctctagacagcttagagcagagactgtgtcctgctcatccttgtagtgaaatttgtgcctttgttttagcaactatataggactctatgatccgcaggtgtgggcttcacctttgtctcccggcttgaccttctgctagaatgtatatttccctggtcctgttttatttgtgtgagccatctctaatgcttgtggaacaaagtagaggtatgaacaaaccagtgcgcaaatatttaagcttctccctttgaatcatacccctcaaaggccttagtattgaccctggtactttgtaggagctcaggaaatgttgcttgggttgagctcatttgaaatgaaagcagccagagaatgaacctgttatcctgcagggagttcattgagctgaaatgggggccctggcagaggaagaggtctgcagagcccagaacgagtagagctctggggtatgagccttgcagagcctgtgctcttctttgggagtgttcactggtccaggcttcagggtgcttctcagaggtctttggagggcaggggccacatctttcattggtcttcatccacgacggtagctaagagagggcctggcacctaacaggtgatgtctgctttggaattggaagactctctgcaagtgaaaatcatttcgtcttctaccttattcatgctctcatgctctcaaattccatgtaaaaatattttgcgtggaacatgaagatgttgttggaatattcaatatctggattggagctttctttgaagaacattctgttttctcatagtctcatagtctttagaactttttattcctgtcattctaaattaccaaaaaaaaggagaagtaaggaagtaagcccattataacagcttgttgcagggaaaagtgggtggaggcccctcttccctctcttgttaatgtgaaaagccttgaacttgggctataacatcaccaatataaaaggtggcattgattcagcacaagtaaagaagattggctttaattagagcatattgacaaatttgtaaatttgtgtaaaaatctactttggagtctattaaaatttgggaccccactatccagttgactaattacaatggtaacattcatcaactcccaaggactctctagtagcctttccaactctaagaagttaagttcttttcgctcagtccagggattcctcttagaaaattcctgtttgaacagttctggggtaagccattccattatcagagacatctgatttgggggagcttctcttcatagtgaaagggctggattctgcctttatgtaattccacccactggtcctagctcagctttagagcaggtcagggtggctcctctggtcccttgccgagagagaccttctctgaggccagcagcaaagttgttctgcagccttcgttgtggaagtctgagcacagttttctcctgcaggggtccctcagagggcttgactactgggattgcctttgccctgagatggacttgtcagtgccagcagaaaaacagagtgcccagaactggacagtggcaggtgccccacgctctgtgctggggagatgctgcctgctgccagcaattctagcaccagctgcttagccaaaaataagttctcagctgctaaggcctgatctttccgctctccttcttctggaagctgaaagtccagcggtctgccagctggaactgggaggttggggatttgtttctattcagatgaaaggaaaaacagtacgaggtttttcatttcttttttaaccttattatgtcaaaagagttgtcttgttcttaagagcaaaaaatatcaccattgcttctgaattttgctttgaaaatagcattaggagtggtggggctgcattgagcctctcccagcttcctggcagaagcccctatcgagagaggcagatgcagcttccacttgagtggagggacggctctgggaaaaagcccgaggactgggttcggctcagcaaatctgccagcctttggattgataaactgcctatttgcacagaggacaggagcagctgcctcaaccatggaattttccaaaggctgcaaaactttaaagatggaacttgaagttattcattcctttatttagcaaatatttatcagcacctgctgtgtgccaggtacgtgttgggtgcaaaggtgaacagaggacaatctgtatcctcagatctgacaatgtctagggggagaaatggacaagagagcaaatgagcatggtctactgtagtaagtgtccataggtgatatggtttggatgtttgtctcctccaaaactcatgttaaaatgtgacctccagtgttggcggtgggcctggtgccaggtataggatcaggggacagatccctcctgaatggcttagcgccatctccttggtgatgagtgagttgccagtcagttagttcacgtgagggtgtggtgcctctccggtctcttttgttcctgctctggccgtgcacctgctaccactttgccttcagccataagtaaaaaccccctgaggcctcaccagaagccgagcagatgccagcaccatgcttatatagccagcagaaccacaagccaattcaacctcttttctttacaaattacccagcctctgatatttatttatagcaacacaaaaatggcctaaaacaataggcttccctgtagccctatataggagggtgcaatggatggtggtagcgctacataggagggtgcaatggacggcagtggaggtggttatggtggcggctgtagcattgattagtgctgttattgctgtcactaacaaaccgcaaggatttgcagcacaggtgaaggacaccagctctgctttagatggatggtcttgggggcagcatggaacttgtcagaaagggagagctgttggagccgctttggaagaataagatgaggcatgggagtgaggcctttcctgacaaggggcaggtaatgtgggaaggcatgaaggttaaaatgaatatggattgtttagggactagcagccatttcagtgtctctaaaggtgtgtgtgtgtgaaggtgggaggtaggtgataaaccattgtcatagaaatggagaatctttgaaaagctctaagctgcagagacaaagtcagacttgcatgttacgtgatcactctggaggaattgtggaggccaggctggaatgggatcgggctggggcagggagaggggctaagagtgggaaatgatgagggcctgggttacagtggagagggtggaggggaggagacaagaaaaaaataaatcagagagaaggtcaggaggactccatggcctatgacctattcaggctctgtgtgtgtgtgtgtgtgtgtgtagtgtgtagtgtgtagggaaagatacacggtggatgaatgagagctggggctggggatatcaagcctattgactccccatgtgactgctgggaggagaagcaggagtgagaacaggtatgacaaaggacaaagacagatattggtccatgctgacttgggatggtgcacctgctttctggggctgctgccttgaggctgtaacaagctgaccgagagatgtagggcatggaggctgttagcctctcaggggagtctggttgctgaggtggtggcaggaggagaagcataatgggtagtgttagacaggaaggctgaaccctcacatctgtggtcaattgatttttgacaagagtgccaagccattcagtggggaaaggacagacttttcaacagatggtgctgggacaactggatctccaggtttgtgagtgaatgtaactaaaagaatgaagctggatccttacctcacaccatacacaacaattaactcaaaatggatcaaagacctaaatataagagctaaaacgataaatccgtctcaggaaaacatagaggaaagtcttcactggatttgcaatggatttaatgcagatctctgatggagttggtactggtgtcttggatatgacaccaaaagcacagacaacacaagaaaaaaagaaattggatttcatcaaatttaaaaacttttacacatcagtggacactatcaagaatataaaaaaaaacaacccacagagtcacagaaaatgttagcaaatcatatatctgataagggattaatgtccagaaaatatttttaaaacccatacaactcaacaaccacaaagaaagtaacccccttgaaaaatgggcaagggactttgaatagacatttctccaaagcagaaatgcaaatgcttaataagcacgtgaaaggatcctcagaatcatgagtcactgaggcaatgcaaatcaaaactacagtgagaaaccacttcagacccattaggacggctattatcaaaacaaaacaaaacagagaataataagtgttggtgaggatgtggagaaattggaacccttgtgcattgctactgggaatggtaaatggtacagccactgtggaaacagttagacagttcctcaaggagttaaacgtagaattgctgtatcctgcagcaatctcacgcctatgtatatatccagcggaattgaaagcagggattcaaacctgtacacctgtgttcttagcagtattatttacaatagccaaaaagtggaagcaacttaagtgcccgtcatcagatgaatgggtaaaaaaaaaatgtgacttatagatacgcaatggactgcagcctgaaaagggaagaaaattctgacatgtgctacagatgggcgaaccttgaggacatcaagctaaatgaaataagccagttacaaaaagacaaatactgtatgattcctcttatatgaggacctagagtagtcaaattcatagagatagaaaatggaatagaggttcccaggggctgaggaaagggggagttattatctaatgggtaaagaatttctgtcggatgatgacagtttttgaaaatggatagtggtgatggttgcacagcactgtaaatgtacttaatgcatttaattgtatacttacaatgcctaaaatagtaaatattatgttacatatattttaccataatagaaaaaaatgtaaaggaaggcaggcagaccctgagcattgggttcccttagctctcctagtgcatttcgatcgtgaacattgctgagggttcctgtccactccctgtgcgatgcctgtcacccagggattcatcccctcccacctctaaacatttggctatgaaggtattgctcccaaactggacagaagctctctagggggctgagcctacccctggagggaccctggcctcctattccagctcctgcctgggcaggggacagagaaccgtgacaggcctctgatgctgaacgccaaatgtggttcttcctcgacagccagcagctgctttctggcctggaagtctttcctccacttgcagctcccactcacccacagttttccctggagaggggagccctgaggctgcattttgtgcatgatcattccaatgacgcaagcatccagtgcccccatagcccaagatgcccactggaggcagctgggagcccaggcactctatagcacgcatttccaacaatggctgctagctcggggagagggatagggagaggtgaaggagtatccacaatggaaagaaactgtcccgacacagagacagtcacagtagcattgggaaatgccctttgggtggaaggtttagttgcagatggccaagctcttctcaaaagtatagtgcagtgatacttttgcatagtatttgcagttatttgctttgcaatgtggaatcagtaggagactttccagacttgagatttaagcacaaaattgtattttccctgtactgaagggtcccaacatgggtaatgaccctgattctcctgctatttggaggcatttacttctgagaaacatacaccatgcctaccattgaagccatggccaaaggagtatctgaaaactggaagagaagacagcttctaagcaaccagaagttatgtagccaagttcatgcacaaaagccaggatgcttgacacctgtcttggctctggttttaggcactcacacgtacgaagcttgagattcttgtttaccagtccccacaaattataagccacagattaaaatgtcccagggctggcttggagaaggccctccaaatgcaccagagaagcttccggaaacttggcacctgagactaacgaaacagctttcagcagagtgggtggcagatgggaaggcttcagaagcaaggtgcctccctgagtgatgtcccaggagaaaaatgacatcaacccagccaacgagaaaaagccctgtcgtgctgtgtgggaaggcaggtgccgggccttacctagctccacatgctcatgccatacttgctggaagctgggatgatgggatcccttctccagggccacaggaagggagaggttcatgggtcctggatggctaggccctggctgggactagagagcctgggcgagagaattgccgctggggctctggaggtgctcgctggggaaggtggtccgcggcactgaagaggaaggcaggccatcaggtgtcccgtggggaaaagcattccccaacagtctccagcttgtgcctcgtgtgtgtctgtggcccacagaggcctggctcatgggtgctttgcacaactgtgggctctactgaggccttacaaagttgaaactggtgtgagacacacatgggaagatgtagcagcgatgccggtggcttccaggctcaggctgaggcagacgggcgggacgtgagtcctggctctgcatgcccaggccgtgtgtccctgctgagttgcctcacctcttcaggacctaggcttcccatctggtgcacagggatgagaccgcaccactcacagaggattgtatgaggattaaagaaatacagtaataaaatagccgtgacccatgagcatttaagagatgacaatgacgtaattaaaatgtgttgggcgggggactgttgctcactgtaggaaagatttctcattatatgtcattatatatcatattaacataaaaggcttttattttatgttgatgaagtagacttcggaaaatgcttcaaaggatctagggggtgccctccgcatgtcacaatgcatcacctcggcccctggtccacgtggagaggtcacctcatttccccacaatgccgggaaagtgagacggtgctgctcctcctccacaaatagcaaggcagggaccttccccaggggcatctgggctcccacctccagagaagcgtccccctggaatctttcttttcctgacaacactagatgcctttctccccagccccgtgacaaacgacagtcaagcttgctgccagggaggcagggaagtgacgatcccgtcaccaccccccaaccctccgtggggaggggcaggcgggtgtgggatccatcacgcccgcccacgtggatggcttcaaagtgaacagttggcattcctgcggggtggccctcgctcctgcaataggccatcccgggcggccgctccctccctcacctacgatctgccgtcagcagctgcttctgacaggtgcgcgggctctccatggcagatggtgaccaaaatgggcttgctggcaggctgtgctgccgcgccgccctccctcgcacacactgatgtgtacacaaacacagcccggccctccgtgccttctcgtggcacctgcctggggtttcaggggcagccagagggcttattccagagtcgcaggcccatttcccccaggccacccacctcactgggacccttccatttttggccgccagaccatggatgtggcgtgtcccacttcccaagcacggcatcctccccagtctccttgctagtgtgtgtggtaagcggcacagctgtgcacccactgctccccacgatggctttgggcttggcctggacagaacccacgatggccgagctgccttaggccacagtcacaggctccagatgtggggcctgggccaccctgtgctccctctcatctgtttcccggagtgtggtctggtggatgtcggacaggagagactcgtggccaccgctccagtgtccatgagagcccaagtgcaccggaagcctgttctcttcacaaaatagcaagacatgtctatgccacagtgaccatgtgccaggtcactgagcccagcctccctctgggagagagtgcctctcccctctgtcaaccctgtgcctaggtggggagctgcagctgcaggatcagagtattgccaggccacccagctcggccacccatcgccctgccggagcacctgcccctccctccatgtttgggcagctcattccaaaccaccacccagccaagacagccagatgaggggacatctggcgcgagatggtcgccaagtcactgctgttccatcatggcagaaggaagatgagctctctgccagattcttaaagagagagagagaataaaatgtgagttacatgcccggcatttttttttccttctttttaccctgacacctcagctgtcactttcctttctctggaacttggactactaaggaccccatatccataactatttagggtagacctttaccactggatgctgatcagagtgccagagtgagtgatgggagtgggagcagagaggtgaggcttggagatgaccttggaggaagaatgcatacacaaccatgtgctcacacacacaatcacacacgtgtgttcacacacacccatgtgctcacacacacctatgtgctcacacatgtaatcacatacacacatgctcgcgtacacccatgtgctcacacgtaatcacagacatgctcacacacccatgtactcacacatacacaatattcacacatgttcacatacacgctgtactcacagtgcacacacacatgctcacatgtgctcacacacacacatgtgatggatcacgaggggcagaggagactgagactggctattcaccatctgtcctccagggtagggctgcctgcagtgagtgtgctttccatgagctgatggggtcagaacccattagtgggaactaaagagtttatttcctgctctttcccagtaaggggagaagcgtgactctccctgtatccgactcccaggctcacacacttgtgtcgggcagtggcgggagagagtgtgtgttcacagcagtggtctcgcagaaagtctaccgtggtgggctgagggaggtcccttgcagtcacggcagcttgtgggctgtgtgaccttgggcaagttccttaacctctctgaacctgtgttcttcatctggaaaatgaggctatttgcttcttgaagaatgtgacctttcagctacttctacaagatgatattgtcactttcattttagagatgagcaaatccaagtacagaaaggctaagtgacttgagcaaggtcatgcaggaaagtggggcatcctttcaggtaatgaaagcaaagaaggggagatgggtgttggggatgttcaagaataggcaggctgggggttacatccagggtgttggtgcagacaggaatgggggccacagagtcctgggtgtattggaggcgtctccttggtgctggccagtctgttgctctcttttccctcctggcataagttaaacggacaacctactttcaaacacaaaaggtgggttttcacagataagccatatctcccctgctctgtgcttgttcctttgatttctccaaaaagtgcaattttccatatttctgaaaagtcatgttgtttggcccactttctaggccctaggaaccaagatgaggcccatgctaggatggccctgagtcttgccttgtcagacgtgatcttctcttttttgaaacaggcctcactctctcaaccaggctagagtgcagtggcatgatctcagctgcctgtggccttgatcttctgggctccctgtggcctcagccttctgggctcatgtaatccttccatctcggtctcccaaatagctgaggccacaggtgtgtgtcaccacacttggctaatttttttattttttgtggaggtgaggttcactgtgttacccaggctgatcttgaactccgggactcaagtgatcttcccgcctcggccttctaaagtgctgggagtgtaggcagaagccaccatgcccagcctagactatgtgacattttctttgtgttcttgcaaatgtgatgaacaagaactggcatctcacaaccagaggtggatgtgaaacgcccacgttctcaccatcagactttcatcagctcccctgggtcctgggcagggtgaggtagattttagggtcatgacatgagtcagtaagggcaggtggagggttgtggcagcagtccagacaaaggtgggtgatggctgagccttagaggtggcgatgagggtggaggtggatttgtgaaccattctggatgaactgtcaagctttgctttacaattaggacttgctatggacattggatggggagagttgatgatggcaatgaaatgtgtagcctggaggagaggtagcaaatgatgccgtgtgccaagagaggggacagcgaagaccaaccgctttgggaaaggaaggagaatgtctccgggtttgcacggggtgcgtttgaatttctggggtggggttgtgagtggcaggattctgtaggcaagagaagagaagactctggatcccaggaaatggtggggcacagagtgaggcacagagcaggaattgtcattggtctaaacaccccagcacctgaagtataggatagcttacattttaatcaaaattcttgcttgctccttacatttttattgtaatgcctattctacctggtaatcacattctgaaacctgataaagtatcaattctgagaatttcattaaggatcacatcaatctttaagctacactggagatgcaccgaatctttgagtaggttaataggattgcaaagaagaaccaataggtataaacttcttagaatttctattaaaaaattgacaagcttcgacaccacattctaattttgtttcaagagtaatcacgagaccaggagcactagcaggaaaactgtgtcaccacagacagaactggctcactgtctggaaacagaggccagggagaaagggtcgcatccctgggacgagatgtgcaaaaatcgggcttctcagcatcattcattagcaccactctgactttacatctgcatagtgacatttaaagaggaacatgggctgggcgtggtggctcatgcttgtaatcccagcacttcgggaggctgagacgggcagatcacttcggcccaggagtttaagaccaccctgggcaatgcggtgaaaccctgtctctaccaaaattttttttaaaaaattagccaggcatggtggcacatacctgtagccccagctacccaagaggctgaggcagagggatcgctggaacccagaatcaagcctgcagtgagctgtgagcataccactacaatccagcctgggcaacagagcaacaccgtatttctaaataaataagtaatagaggagtaggtaataaaaaaatccaggttttaatttaatttgtttaaatgtaaggggcacaagtacagttctgttgcatgcatacattgtgtagtggcgaagtctgagcttttttagtgttaatatcacccaaataatgtaccttgtacccattaggtaatttctcatccctcactcccccaccctcccacccttccaagtctccagtaactattatgttcttgcatatttagctcccatccgtaagatagaacatgcagtagttgaccttctgtgtctgagttatttcacttagcataatggcctccagttctctccacattgctgcaaaagacatgattgtcttctttttaatggctgagtagtattccatggtacatatacgccacattttctttttccgttcatctgttgaaggatgtttaggttgattccatatccttgctgcagtgtgtagtgctgtaatacacatctgagtgcaggtgtctttttcatgtaatgatttattttcctttgggcagatgcccagcagtgggattgctggattgaatggcagttctatttttagttctttgagaaatctccatactgttttccgtagaggttgtgctcatttacattctcaccaacagtgtgtaagcattcccttttttctgcacccttgccaacatctgttatttttttgactttttaatagtagccattctgactggtgtaagatgatatctcattgtgcctttgatttgcatttctccgatgactagtgatgatgagcactttttcatatgcttgtgggccgtttgtttttaaatgaagttcatctctcccctcatgagaaaggagatcatgtaaggtctcttgtcacacggggacatggaattctttttagttaagatggcagatttggtgagtggttgagaaccatggctccagagtcagactgcctgggttgaaatactgcctctcctctcctttgctaagcacccttcttaccaaatgcagcagatactactgtgatctctagagaggacgtgatgaggataacatcagacagcatgtgtagagcatgcaggggagcctggtacagggtgaatgcatacgcagcatcacccctaggccctcctcgccccaccaacatgcacgtgcttgtccttgtctcccagaaacacaggactttcacttgggttgatttaatagactcaatcaagatatttcttcatagaagctgggcacagcggcccatgcctgtaatgtcagtactttggaaggctgaggtgggaggatcacttaaggctaggagttcgagaccagcctgggcaacatagaccctgtctctacagaaaataaaaagaattagcctggcatgggtggcacgtgtctctagtcccagctacttgggaggctgaggcaggaggatcgctggagcccaggagtttgaggcagcagtgagctatcgtggtgccactgcactcccccctgggttacagagcaagaccttgtctattatttttaaagatatttcttcgtagagcaagtcaaaggaaaaagatgatcctccgagcctgggtccaggatcttcccatagtggtcttcccatggtcccatccgttgctgtgggtttgtgacattgtgacatggagtatgcatgtgtggcggggacgcttggccaggagccaccaacactctcgtatggaaagtctgccaacaggctaggtcttccaaggaccaaaaatctgggtggcctgtgaaaaacccaagtcacttgtttggggggtgccggtggaggacaggaaagggtggaacaggatgcaagtggccaggcccttgacgctcctacttctttgggcataacccccatcacctcataattcccacagtgtgacattccgtcacatcgcaaaaataaccaacacagtttagagcagtgctcctgaaatagaatccatgtgatgtattatctcaaatacatgatttcacctcttcctcaaaacagcactgagaggtagatatcttatccccctcttacagaagagaaggccaagcctcaaggtcagctcctgaaggtcatgctgtttggcagaaccaggagaagagcccaggcccctcttgtccccaacctctatgcaaacatgatctcctggagaactcctggagatattttaaggagtgtttgatacttagagatgcacagtgctgctttcagtgtagagtgccatttttgtaactccagttaacatggatttttattgtctgaactggaaagcatgccaattatatgcaaatttaaattgtataattagcttatgttcttgagggagttccagttcttccactggttctgagcctgacaaaaaggaaaattatgctttggcaaagaacacctatggcctattttgaattctcctcccccacacccatttttcctttctccctccctccttctcgtctttccttcctcctttcaaaaaaaaaatcctgactgtacttcattgctaagcagcttaaacagcccgaatgagacccctccatctgacctccactcaggttttacttttcctctttgttattctcttggcaattagaagaaccgaagaggccagagtcctccgaagacgcctgcttggaagttgagatgctgttgctgaaactgctagaatgccaggcatgctatcacctgcagctttgagacgtcacgctgacagtatcacaggaaaacagccttttgtgggccgtcctctgtgtgttcacaccgtgtcgtttttaagctttaaaggaaactgacaaaagcttcttttctctctgtcttgagcttcactgcgtattcttaaccatgtggagctgggagctaacgcatcacagccaactgtatctggagtgcatttgctcatatagcccttattttattttttagtcttatttttagtttcctttgaatataataataaaaaaaaaaaacccaatcattgaattcttagcttcagccaatatagtgtgaggttagacatattgcagcccaagggagaatttctgcttgcaagctggtcagcctgtttgcagctgacagatgtaacctgccctagggcaagagaaagtctcaagggagcttttaatttcttaatattgaaatgagcacaacctttattgtcttaatcagtgaataaaaaaaataaagttgctaagtctcattttttaaacatggcgtaagaggattttaagaaattacaattgctttttaagctgctgttgaaagttaattttctctgtgttcaggaagattctgccagcagctcctagctaggtagtcatattccagttaagcaaaactttcccaggggtggcgaacagccctgttctgtggacaccgcccctgggaagggaaagggtgtgtgtcgtccacagagtggttttactttgtccttgaacttggtttttatcacatttcataaactcagaatacaggagtactcatttaaaattacagcagaaatcttctgatgcaaactgcattcttttagaatatatgatactttaggcaagggccgtattaacatttttttcgccattcataaagaagggattgatgaatgatagtgaatagcccctatacagtcataaggaaaatgtttccgtttttagtctgaacaaataattgtatatgaaaaaatctgatgtattgcagctagtcgttcttaagtgtttcttaatttaatccaaatttgaaccacgtttctttaaattaaaagttcctcaattacaagggccacaggcttgtcagttctggttccctggtactttgtgtaatgcccgaatagggacacagtaaatgtgtgctgaaccaactgaaaaagttgctttcagagctacatgggaatgaatgtggacctgcagagatattacatgtgatataaactatcgaacatgatgttccaggtatagaacgaagatgctcaacgggagcataccagaatcatgggacaggggttacgcgtttgaagccaaagcataactttggaatatttagagaaccctcaaaattcaacaatacaagcaaatcacctgattaaaaaatggacacgagattagaacagacacttcaccaaagaagtcccttcacctacaggatgcctttgtatacagaaggcaaataggaacgttaaaaggtgcccagcatcattagtcattggagaaatgcagatgacagccacgttgtgatgctactctacagcagttagaatgagcaaatcaaagaatcgtgacaataccaagtcctgggaatgacacagagcaatgggaactctcatgcattgcaggggactgaggtggggagcacaaagtggcatgatcagtttggaaaaccattggaaatttcccatcatttaatatacttccacctactgtgagccagcaatcccagtcctagatttttacctacgagaaataagacgacacaaaaacccattcccaaatgtttacagcagctttgttcataatagccagaaacaggaaacaacctaagtggccttcagttgggaaatggaaacaccacactgaggaatgcgtatgcccaggaaggccctgatctcgcctgtggctgccatgaggccctgcacaagggaagagaagaagagaaggccgagtggagaaccgtggggtccctgaagcttcctgtgctctagcgcacacacagccctcagcaaaggtaggagtctggtgcttccaggcctgtaaggaattcggtgcctaaccattcggtgataattagctaaccacactgagacttcaatggccacacctgaaagagaagacagactttacagaattagtccaagaaagtcactgaacaaaggaacagcagcagcagaagcaacaccacactgtggggcaggacatctgatttccagagttgccacattattttttaaattgtctgattttcaagaaaaaaatatgtaacaaagaaacatgacggtatccgttactaaacaaagactttaaatctgctgttataaaggtgcaccaagaactaaaggaaactgaaaaaattaaaagaaaatgttagagtaatgcctcaacaaataaagaatatcagtaaggagagagatattaaaaaaaaaaaaaagaactaagtagaaattcaaagatacaataactttttaaaaaatcgccagaagggctgagttggcggaagaaagaatgaaactggaagataagtcaattgatattatccagtctgaggaacagaatttaaaatgggggaaaaacggtgatggttacataaccttgaaaatattttgaaaaccactgaattgtaaagtttgaaaggataggtcaggcacagtgacttatacctgcgatcatagtgctttgggaggctgaggcaggaggattgtttgagcccaggagtttgagacagacccaggcaacatagcgagaccccatctctacaaaaaataaaataaaactagccaggtgtggtggtgtgctcctgtagtccctgctacttgcgaggttgagacaagaggatcgcttgagcctaggagtttgaggctgcagtgagccgtgatcgtgccactgcactccagcctgggtggcagaatgagactctgtctatgaagaaaaaaaaaacgaattttatgtgaactacctctcaatataaaatgattatctggggggatgggcaagagcacagtttagaaaaggctctggaagacacagtcccaagagacatgtgtaagtaaacaggaggcatcctgctgacttaacttcctcattttacggctggagaaactgagacccagatgagtgaaacaaactatccagtgcttcttacttaacagaaacaaatgcctccaaccattctgcagtcggtgtgacccaccatctcagtttgccaggactttcctagcgttggcactgaaagttctgcatcctgagacacccccagccctggcagccaagacacttggccactctgtcaaccgtctgcagtgagactattctttctagtggctctgaattgctgcagttcttctgtgaatgagaagcggtgacattcagaggagtcccattgcccactgaattcagtgctctaagcttaagcatctgctgctatgcttgaagttcttttctattcaaccttttggaatgaaggctctttccttttaacaaaatctgcatttcatccccaaggtgaaacctgctatccttggctttccctgaaaagtgaaaagtggttttctttgtgtactaaatgctaagcatataacaaaaatcagaagttgtagttaattgattgcagatatgaaaaagcagattataacccctcagagatctatacaaagacagggacagggaaagagaaggagaagatccatgtctcccgaaactgaaagccatgaaaagaaaactcgtagaggaaaagtcacttgaattatttttaaaagccagcagacctcaaaggaaagcccaaatcaagaggaagcagcagtccttgaatgcatgatggagggaaaccatcctgcgggtggagggtgcactgtctgagccagagcaaatgggtggttgcacatttcaactataggaccctgagtttcatgctctggccccaggagggtgcagcttagacctgcagccagccctgtccagcctggtgggtccccaccattcacgatgtgcggtagagaaggaaggacccattccccttgcatctaggaagttatgcttggaatttgtgaggtgtggggaggtgaaggacgacaaggaagtaatgggaaaacaaatgacggccacccacttcctctgggttcccacttgagctcagccttacagaccttgctgcatgcaagcaggtgagcctcagaggcacctgctgtctttgcctgggttcacgtggttccttcagtctcctgaagtggccccttgtaccactgtgattgcaggcgatggaaaatcagggggtgtgcagctgggtccccagagacgagtacgcagaaataggccacagcttgatgcctccagcagcctctccatccacctctgcttccatcttttcctgtggttgagccccagggtcccatctgctgggtcgccctcaccctggcctagcccacctttccagtttatccttgatttcacctgacttgccctccctgcactctcctccggacctgtcagcaccctcagatacacctcattacccccaacccccagcctccatgtgtttggtcacggagtttcttctgcttggagcatgcccttcacaccctactcctgcctactgtcaaattcccagttcagtgcccacctcctcctgcaatttcccagcaggattaacctttccttcctccatgccctcaaaggactgtttgcacctccatttccgcacatcccctctgcctcgcgtggtggatattcacagtcccgtgtgtcctctctcctccaagggaattctgaccctctgggtgggggacaggagtcctcgtcactccctggggtgtggctgttggtgtgagggaacttctcctgcctgagcctgcttccccagcacctggcacggcacctgctcacgctgggcactgcagacacgtcgtgggaattgcccgtacactcttctgagagcacctcgcgggcagggcttgtgctgttcatccctgtgttcctcgtgcctagcccggtccttgacacacagccagtgcgcaataacaattgtcgagattcattcatgaagtgaagttggagagtttaaaaacttcttcacagagaaatctgctcgcttcggctgaactgtgctgacttcccaacccttcggtatcacaccccatgcccgggaaagcccaggaaaaccaacgcaggaaataaacgattccatcgggccgtggtgctcccagcgtgggtttgtcagtgtccttatgtgagggcccagggtgttggagccatcactggctggagcatggctggttactgtggcaaagggtggacaagtagggacgcttccgctagtgctttatagcgtctgcctggagaccacccatgtgactttcactcacagcttactggccaaagcaggtcccgtgggtgacctgacttcaaaaggagggtgagggagttggagagcacttgtgccgttgaccacacttgcctgcaagagcagagctgcttacactctaacctcacatgggattcggtacgtctggggaagggcccagactttgcatttcttgcaaactttgcaggctgtctgaggagcaagggcagagctgtggagccaacaagctgaaacaaactcattccttcctctccttctccatcctccccgtcctctgcagagacacaactcagcttgtagctctgtcgttctgcattgcaaaccaagagaaatatccttagcagtctgaagacactgtgatttacctcgagggtgcagaggacacagaggaatagataatgaaagccattagctgtgtgacaaacctgcagagtatgggaaaggacggaacacaggagcgctgcagctgtacgaagaagccccatccgtccagctagaggccgtgcatttgcataagcaggtctcttaatggaccaagttagatctaattgtgtcacctctttctctcctttccctcccaatgagttcacaaagctgggagggtcagtgagctccgatgggggcttgtaaaggcttcagcccctttgaacgcgctccttgtcattgtcacactgtggtggcctgggtttgtcctccttgcatgtgccagcagtgattgatgactcacaggggcaattccattgtcccagagcctggagctcctgttgctccggggtcctctttggtgttgaagagaagcactcatcccttcgtcagaagacacacacacacacacacacacacacatacgcacactccatgtaggcttagtaagcccagccagtcagtgcccagtcagccgtcccccttccttgtggctgaaccgcaggaggtgggggtgcatctgctctgcaccactcagccagagatgcaggagcctctgcccagctcagaatagatgatgttttcttactagtggctttatttaaaagccatcccagtcatttcacattttttttttaaagttttgattgacatctatttggtcaacctgtgctccctatggactaaaatagctgactggggcattgtctgggcttattaaacctgcatgttgtgtgtgtgtgtgtgtgtgtgtgtctgtgtacacgcacgtgtgcacacgcaggacaagcatagcatggaatttgatggagtggatgtggagggaattgaagtggtctccgtgcagaagggggaaggtaggaaccaagtgaagtgccttgtacaggcgtcctgctgccgctagagggcgaagtgagtctagaatccacatgcccgcgtcctgcctgcgagttttcccctaaagcagctgtgctggctcccggacagcagcttcaagttgacctcttagaagcccgaccctaatttccgatgggctcagggtcataaattagatttctgttctaggaaactaatttcataccaccacaatactttaaaaagtgatcacaaaatgaaatacacatatacgttttacaaataattacatgaaaacctaacacttaaggctaaattcctttggtgggtgtaggggatggggattgcttggagaagacataatgaggcttgcagtctgatgaggtttgaactgcaggtaccctctttctttcctgtgactttccctttagcaagcacagccattcctccttgccacaagggccttcaaactgtgatggaaatgagggtcatctgtcttggaaatatgcaccgctgagtggatctgcctgcccatttccggagccctgtgcctggcgactgctgggggatgggcagttgcagtggtgactctggaggggcagctcagttcataggatgtaatcatggttggatggactccagagggtcataggatcctttgaaattataagcaagtatttgattgtgagtttatctgggtagagtgtccaaagcattcactggagtctcaagggaatccatggtccccaagagacactattgtacgttcaggttcctttctagtaatacttttttctaaaaagtgtctgtaggtcagttcttctaaggacttctagagatagtagtgatagtggtacaacaaagtgaaggtacttaactgtacacttaaaaatggctaagatagtacattttatgttatgtgtattttactacgactaaaaaaaaaaaaaaaaaaaaaaaccaacaaaaaaaaaaaacaccaacagggagaaccacttgagcctgagaggtcaaagttgcagtgagccatgatcacgccactgcactccagcctgggtgacagagtgagaccctgtctccaaaaacaaaacaaaacaaaaatatgtctataggtcagtcctactaaggcgggaggtgaatacatacatacggcatccttgtgcgcacaaacacagggtgcacatgcaggcccctccctcccacgcatgtgcccacaggttcataggcatcagcatctctagagccagccccctccactccctcccgaccctgctctgtagaattcctatacaaggttcttgtggatttgtatcatcccttgcacctctcacgtgtcgcaggacagaacactcggcatcctgggggcttccttatcccacagccccaaattccgggaacagcatggatgtgggagggggcatggaatccagacctggattcttgtcccggacctacccctcacccttgtgaatttgagtaaggcatgtgaatttgaataagatccctaactgctttgggtttcctggtgggtaaagtgaattcaagtaaggtctgtgaatttaagtaaggtccctaactgctttgggtttcctagtgggtaaagtagaataacggccccaccctgcaggatgagtagcctgatgacgtgagatggtgaaagagaggcaccctgcaatccgtctctgccccattagaggggccctgcaaactcctcctgacatccattagaaaattgacactgtacctggtgcttaaaacgcaaatgctgctttcctggcactctgagtatgtctcctgtcatctcctagaatcaggaggttacttgggaagttggtggcgcttggtgtttagagcgtatatctctttgggtggagggcaggcgggcaagtctagctctcttgccatcaggtgacccaggacaagctctctgttagctttctgtctttataatggcatcatggccactgggatcagctgggttgggcaggagaaagaatggccaagccatatgcttggggcaagtccttctgctgtcacgttccttttgcagttctgtagaggagcacagggtcagcgctggaagctgctgatacaacaggctggagcataacgaggtgtctttgtggggtgtgcttgtcatgttcccagatgtgtattatttgacagctaaagaaacaaaagcaacaaaatatggcatgtacgtagagtggaatagtgtgcagccttaaaaagaaagggtattctgacgcatgccacctcctggaggaagcttgaagacattaagtgaaatatgccagtcacaaaaagacatactgtggaattccatgtatatgagggagctagaggagtcaaattcagaggagacagaaagcagaatgggggttgcccggggctggggagtaggggaacagggaagtttttttgtttttttttttttcctatttgtatttttattagaattattgaaggagaggggagaggtgctattgataatattggggcttctcatctaaaaatatggggagactctttgaatccatttgtattgtataacaaactaccccaaaacttaatgacataaaacaacaaatacgtcttatttcttacagttcttgtggtctggagagcccatctgaggctgaatagtcttaggtggcctttccttcatgttggggtctcaccttacacagctaggatgatgcgggcctctttccatatggtctcggatctgcagagttactaacccagccaggttcagtggtagcacaggtgatcctggcagcaagagagggcagcccccaccccatgtacaagtgcttttcatgcctatgttagtatcacatatgctatcggggaacagggaagttttatgcagagtttcagttcagaaagatgaaaaagttctagagatagtagtgatagttgtacaacaatgtgaatgtacttaacacaactgtacacttaaaaatggctaagatagtacattttatgttgtgtgtattttaccacaacttaaaaaaaaaaaggagaatcacttgagcctgagaggtccaagctgcactgagccctgatcacgccactgcactccagcctgggtgacagagtgagaccctgtctccaaaaacaaaccaccaccaaaaaccaaagagatggcctgtgaaataaacgtcacgtgttttgagtcccggggatgtgagctgggtagggagagtctgactcacatacaggctgatccatgtctagagctcctttgggtattttataacctactgggctcctggggcagggcggcatccttgtctagccacctgtgggagtagtcaggagccagggttcagggctggcctcggctgctgaccggtggctgtggtcatgcctgtcctctcccccaggcttccctgtcctcagctgagaaacaggaataagaagcctacattttagtcaatggaaggttcacgtgaatagagggtggaagccctttggaaacactgttgttctggacaaacacagggtcctggtctccactctgggctctgggtctcaatgcctttctaaccttgcccactggtgcccactgccacctgtgctgccaggagccatcctgcatttcccagggtggtatgagagcgtgtcacctccatgtaataggctgagacactcgggcacttggagaatctcggtgatcctaatcgtaagcttgttagcaggctgcagtcagcagaatgatcacatgttcattacatttattaccagaaaggctctttactggccgccctagaaggacggatgggacctgctgtgcccggctggcacgccttccataaggagtgacccggctgcttttcgtgcatctgtggtgttcctatgagtcgctggagctggagaccgagctgaggtggatgaggcctagggggctgggggctccatcacaacttacacatgcctacccgccttcctgccccagagatctgctgctcagccatagaaatggggattccatgggggaatgtggaaatgggggctacttaaggagggcaggataggcaggctagctttcacccctgggtggggatttttgggaaatggagccagtactctgcagtagttaaaacacgccaggcaggctgtgtcgtggctcacacctgtaatcccagcactttgggaggccaagatgcgaggatcgtttgaggccaggaatttgagaccagcgtggacaacatatagggagacactgtctctataaaaaaattaaaattagccaggtatggtggtgtacgcacttgtaggccctgcttttctggaggggctgaggtacaaggatcgcttgagcccagaaggtagggcctgccatcaaccatggttgcaccagtgtactccagcctgggtggcagagcaagaccctgtctcagcaacagaaaagccaggcagggcatggtgcactttctgtgccctctctgcattcctcgtcctagcacagtgaactaggtaaggggcccatttcacaggcagaaaagctgagtccaaggagaaaatgacaacagaaggaaggcacaggaggcttcctggggtcattgaggaagagtctgtgagaaaaacacaaatgaccaattctgttaggtgaccttccagaaattccctgggccaggtgtcgccccacatgtgttactgtatgcagtcctgctgacttctttctaaaaggtcagcaagacacacacacaaaaaaatgccacaagcaaaagtcaagatacttggagtcagtaagagagagaaaagttgccgggagctaggctcaggtcattcctcccctgaagtggaacgtggtaggggcatgtgagactggctgtcagtacagccctgggggtacctggccccacaggctgcagtagggagctgggccggggctaccctatgcagaggcaggccctggggttgagcagcaagagcacctctttccaggcttttgaaccaatctaggcagttacttcaaccaggcaagtccgtcatgacctgaactcattctccatccccaaaagtggccccatagggcctggaggatgagcacagtcccctgagggcacctgggtcttgaggccggagcgccactgccctgcctccctctgtccagcacagtgtttctggtgacatcccactgtcacgggtgcagcctccttattggaaggcgcctaaagattcagtaggtgatgtgggcagttgtctcggcagtcacgaatggtcagccgtttttatgggtcctccccatggacgacgggagaggggagaggccaccaggctgcgcattacctgggtccccaccctcttcctcctctccagctctcctgacagttctctcctgcctgctcctgagggccaatgagaggcagtaaaaccgagatccggatctaaggcgttccatctgctccaattcgttaaggaaaagtagatgaccacaagcattggtgtgtcagccatgatcagtaacacgctacctaggaacccctgccccatcactgactgggacacctggtgtgtgttgatagtgcaggaagggggctcaggagactggcatgcacccatgccggcacctgcatagcttggccccggtgccaggttgaccagtggacttggggtggggcggggagggggggtggcagcagaggaaccatctgtaacccagaggtgacagtcttcgtcccctatctccccctgctcctgcaccaccccactctccctgcagaagagcaaatgggctttttcaggagccgtggatgacagagaggcattcttctgtgctccctgcaaggacacagcaccacagggccaccatctaaagactgaacctgcccatggaactggccaggactctgtgacacggaaagtggctgcctgagtccgtcgtccccttctccctcccaccattccttcccaggccctagaggaggtgctgggtcttgaggtagcaacagggacccaggtggaatccagaagcagagagaatctccaggagatcccaagaatccatagttcattttctcattcattcattcattcattcattaattgcacacagtgcacaaagccccgagatgagggagagacacagacagtcctgggtagtggaagtggcttggagaacagaagggtttttgtaatgcagcgtcatcagcgctgtcgggcattgcgatgccacgcgaacatagtatgtggagcagcttctgccttcaagaagcgggcaggtttcatagaggtggggacatttggtctgggtcctcagagatggataggagttcctgcgatggaaaagaggaaaggacattccttggagatcgtgtgcaagggaatggaacattcgggaaacaggtaaaaatgaacaacaccaaagaaaatagtgcgcagaggggaaggaaaggctgaaaaggtagaagatggtgagggagacgatgctgaggggtgaatcagggagaagggcctggggtggagcgggaatggggagaaggcccggggtggagtgggatggagagaaggacccggaatggaataggatcggggagaagggcctggggtggagcaggaatggggagaaggcccggggtggagtgggacgggaagaaggactcgggatggaataggatcggggagaagggcctggggtggagtgggatggggagaaggactcgggatagagtgggattcgggagaagggcctggggtggagagggacagggagaaggggccagggtggagtgggatcagggagaagggtctgcggcggagctaaactggacggggagaagggcccggggtgggttggatcggagagaaaggcctggggtgttctgattcggggccagggagaggccccctcctgggttaggggaggtgctggggcaggcccagatctcccaggctccctggtgaacagtcagggcagtgcactctttgaagatcgccaagcctgcagggccctggagggagatgtcatgattaacttaatgctgtcacttgtgccgcacacagcggggcccaccccgggggacagcgaaggagcaggggggctgcgaagcccactgaaatcaagacgtgaatctgaacagtggcggagggagacctcgcagaatgcatggagttgtccgaggggagtgacttgcaagtgaggcagcggacgaagggggaccaggaagacactagatgtgaccttccgtggtccctttccccttctttcgcacctagtctcttttttgtcctttccctcagttttggcggtgggtggggggatgggggagagtgctgggaaggacaaccgaagcctgcagattgacgccacgctcatcgcaggccggtggccgccacctctatccgccacccgacaggacccgtccatgaggtcccaggcccagggcggtgcagaggcgtgggtgggctgcggtttccctgctcgccttggaggtttttcttagtgaagtgtctgccatcttgtggctgaggctggtactgccgaggcccaccggcaaacctcccttccgggctccccaagggggtccctgggcctgcaggtggctgcgaagggaggaggaggaggggaggtgggcagtggcgctggcctccctgcgtggacccacttcctcccacgctgtgctcagagaatcttctggagaccgcagctgtgcctgggaggccatccttgtgcctaggaggacagggaagagggtggatctcagacacaggcaggctgggaggtctgcacaggtgtggccatagaacatggacgcctccagtacgcaggcacaggcagctcagggccgggagcgaggcccgtctcagcaggcggtgtcagccgcggagtgggtaggtcctctgaggacgatcacacctgtgggcaagagcacacccgggctctgggccaagtaagcctgtgaatcccactggcgttgtgaacccggagcccttgggatccgattttttatttgctatttggatacagctgtaagagatgacagattattttacatccctcagttctccgaacttgccttggaccaggaatgtcaggccctcaccgtgcctttttctcttctccaaactctctggtgctgcctggagcagatggcaccccccacagacgtcgtccttattgttgtcaccagaatattccatttccacagccacctggcatcccaaagccttccttcagtgggcagcctcttcacaggcaaatgctagcgatggttcaagtcacacggccagcacatactccatttccaaggaggtcattgctaactctaaatctacccctgttagttagccaaccccacgtgctcattcttagagaggttctgttccctgaaaacagtctggagccaaatgctgtgtgagctggggcccggtcatggaaacagaaaacttccattccgtcaagctggatggattctacagaaggaattcggtgtttacagaatcgttagcagggctgttcgcgtgaaggtcagggaaaagcaccccaagatttcaggataccaagaagttactgaaattgccaaaagtcattgctgatggcattccacggactctctggagagggccaggaggagctggcagagtcttgggtctgcttcctgcagagtcctgcgctcatcctcacagctgcgccctgcaaagaatagcttcttcttttacgtagcctgccaaatttcgtgtgagtttctctgattggtggaatctgaagcagggccttgctggcagcagaatctggggaatgcagtctgcgagctttccgcctgtgcggtacgagggtgagctgagaatgtcagggaccaaggcacagtatctgatacacacttttaaatatgggtgataataataggacttccttcccgtggctgttgtgaggctaaaattaacatgtgtgaagtctttgcacagatcatggcatatggtagaccctcaataattgctagtttacaaaaaattgtcaaaactgacattagaatggctcctcattctcattcctaacccctgcaagaaaactggctgcctctgagctggctggtctaacccacccgtcttggcggggaccctgccccttgtcgttccggacctgctgggccttctgctggctcagacggcgaaacagagatgcaggaaataagtgacgttgctcaagaaaaacctgacgcagtgaatcatgctgaatattaatattggatgcactgtgcttggcagacttgaagacttcatctcacatggaccagtggacagtcagagtgtggttggtcccctcgtgaaaacatgggtcctggctctgctttgcagctctttactgaatggaggcagtgagagtgggttgagcctctgtggccgtgtgctcacatgcttcaagcagcctgcaacaggaaagaattagggcacagctgaaatccaaaggggagaagaagcaggctgaaatccacggggagcaatgtctatttcttagtctgtctcctgccccaaatagcccctctctcctttcccagcttgtgttgatgcgtgtctttccctggcagcagatgtcaccgggacgtaaactaggacgcagagggtggtgatgagccacaggccacatcctgccctgccctgactccccaggctccctggcctggagttcagagtacagaccccaagcgaccgcctgctcaccaggacgtgccagcagggtccttctccccagagccacagcgagtgaggggacactctgtctatcctgggagtgggctggggtcctgttcctgagctggtgggcagatgcgatagtgccaggtagagctgcagccattctgtccatccctaccctgtccacccgtttcattccctcccactgtggccctgctgagccctctcagggacatccatttaccctcggggacagccagggagccatgcttacctgctgtttcccctgggagagctttggggccagtttcaaacagacccacagcgtccaaaccagggcccccaacatgcacttgggatggcaggggtgtgggggtagagtgtaagttactgatttaaaaatctgatataaacctgatttcagttcccagtcaactgaggcacagcaaggtaagtccctgcccagcgtcactccacttggaatgcggagagcccggcctaaaggggacccactgcacatcccaagccacgcgtctgctcactgcagccctggcccctcagtgccacccctcgcaggtgctgtctctctagcatgggagctgatggcgcctttctgtgtccccacaggttctttcagagcacggcttcggccccatcactaccgacatccgggagggacagactttctactatgcggaagactaccaccagcagtacctgagcaagaaccccaatggctactgcggccttgggggcaccggcgtgtcctgcccagtgggtattaaaaaataatttctccccacatggtgggcctttgaggttccagtaaaaatgctttcaacaaattgggcaatgcttgtgtgattcacaatcgtggcatttaaagtgcacaaagtacaaaggaatttatacagattgggtttaccgaagtataatctataggaggcgcgatggcaagttgataaaatgtgacttatctcctaataagttatggtgggagtggagctgtgcagtttcctgtgtcttctggggtctgagtgaagatagcagggatgctgtgttcacccttcttggtagaagctaaggtgtgagctgggaggttgctggacaggatgggggaccccagaagtcctttatctgtgctctctgcccgccagtgccttacaatttgcaaacgtgtatagcctcagtgactcattcgctgaaatccttcgctttaccaaatctagacatacataaggggctttctctcccttttcagccctctctgtgcagagaaaagatgtgagtccgcttgatgaattctaatgctttgcttagagctatgagaaatgtttgttttaataaaaacctacagtccaataatgccaactgcctgacatctcctctgtctttggcttgcttaggtagaatatttttaagtgctgtaagatgaatttaagagctctaaacagcttgggagggaaaaagcctcagagccgtttacctccaaatgggaacagttcggatgaaatttttggtaaacatgcacacctctagctccttgcaacctaagtaatagtagttgttctccaggtgcctgtcgcatccctcacgtcacaggctgttctagttatagcagaccccttcaatccctgcccttaagaacctttacattccagacaaggagtcataaacatggaaagaaatgatgaaataagatgatgtcaggttctgatgagggatgcgaagatgatgaatgggctagggcagtcagttgcgtctgggggctgtgagatcgtgttcaggggtgttttagcgaggttggtcacggaggccttcgcaaggtggtgagacctgatgtgttagtcccttctcacgttgctataaagaactgcccgagactgggcaattgataaagaagagaggtgtgattggttcacagttccacaggctctacaggaagcatgattctggcatctgcttggtttctgggtaggcctcaggaaacttagaattatgatggaagcgggagggggatcaagtcggggtgccacatacttttaaaccgtgagatctcaggagacctccttcaggagaacagcactgagggatggtgctgaaccctgagaagccgcccccatggtccagtcccctcccaccaggccccacctccaatactggggattataattcgacaggagatttaggggggaacacagatccaaaccatatcacttgagaacgaaatgaactaaatcagtagtccccagcctttttggcaccggggaccagtctcatgaaagacgattttcccacaagtgggtggtgggaggaagggggatgtttttggaatgattccagcacatcacacttattgtgcactttattattattacattgtaatatataatgaaataagtatacagcttatcatcatgtagaaacagtgggagccctgagcttgttttcctgcaactagatggtcccatctgggggcaatgggagacagtgacagatcatcaggcattggattatcataaggagcatacagcccagatccctcacatgcaccgttcacaatagggttcacactcctatgagaatctaatgccaccactgatctgacaggaggtggagctcaggaggtaatgtgagcaatagggagcggttgtaaatacaaatgaagcttcgcttacttgcctgccactcacctcctgctgtgaggcctggttcctagcaggccaccgaccagtaccagtccgtggcccagtggttggggactcctgaactaaatgatgcaggacctaaaggaggaagcatgttgggaatacactagtggaagtggaagctattccatcagtagagagaaccctcagtgaggcaggtgga

SEQ ID NO: 384 - DNA, 23373 bp, Homo sapiens
  source 1..23373: mol_type = genomic DNA
tcaagcctttcaggatggcctgaggagaagagcactgggggccgtgtttgccacatggcgggaagcccaggaagtggcagccggggcacaggagcagcgtgtggcccaggcctcccttgcccgctggagaagctgcgggcagcaaggccaggaagatgggcagcagaagaaggcccgggccccacaggccttcccagcatggccagtggccccgggcatgcaccatgaggcccagcagcaggcaggagagagcgctggggcccaggcagcccagtgctggacttggtgctgggctctgtgggtgcatgagtcctgtcggggccaggtcagccgagcccatgcttcctggaagccgcgagcctggtgagtgctgtggtctaagtgcagccccactctgtgcttccagctcaggcctcaagcctgtttttggcaggggtagagcgtaattcatggctgggtggcagggcaaaggctcaagagggtggttgggggtgacagggagaggccgccctggccatctagtcctgggccacatcctgacaccgcctcttgctgtgtgtcccctccttggggaagtctctaatggtcatgccttgcagtcaccagcacagccagccactcagcaagcgccataaacgcgctcttgccagggaaggggaggcaaagtggcactggcaggactgtcccctctctgcccctaaacaggatgcttgtccccgtctgtgattttctccttccaggtcgctctccatcctgtttacccagattctccctccagaaaagggagtgtgggaggtgggtgggccccagcctggggctgggcccggaaggccccctcccgcagggcactgggggggctccctgcagagagtcctggcctttatggccctggctgcagactccttcctctcccgcagggtcctagaggcctcggtgcagtcggcggtgcgcggcggtgtccagcgagccatcctcacccagctccggccggctgagctcaggcgcttcctgcggacagtgcagctcagggtgcggctgggactgccaggggccggcaaggtacgccccaagccccagactgacctcacgctctggccccggatggccagcagggggagcctgctgctggacgccccagccccttggaaacaggtgaagggagcctaggcagggcgggaggtccaaaaatgaccctcggaccaccggccttagaatcagcttgattcagccggtggtggcagcatggctggatgcctccccaggggcccagcaacctcgtatgcaccacctctccccagttctcagtcagcctctgacaagcaactctgaatccatcagcaaagatgaacctggcacctctcgagtgccaggccactgcaggtccggccgcaaagaccagcatgttgggtcacagcctgttagggagacattgaaatgcatgctttctcacggtgcagttgaggatcagaataggtacacgaggacagtagcatttttttgtcaagtttttttgtttatttttgagacagagtctggctcaattgcccaggctgaagcagaggagtgatctcagctcactgcaacctctgcctcccgggttcaagtgattctcccgcctcagcttcctgagtagctgggactacaagtgcacgccaccacgcctggctaatttttgtatttttagtagagacggggtttcaccatattgcccaagctggtctcgaactcctgaactcaagtgatcctcccacctcgacttcccaaagtgctgggattacaggtgtgagccaccgcgccaggccaagtttttttttttcttattggaaaagtgaaatatgcttattacagaaacctcagaaaatataaagtagaaaaataccaaaatttctttcataattctctctacccaaaggcatcggtcagtccctctccagaccagaagcagttagttctgacaccaacaagtggtgataagaggttgatagcctagcaagggggaagaagccaccaccaaaccaaacacaaaaaatgacactgcacagcagtctggggacatgtccttgaaggacacagccccaaagatactggcaggtgaggtagtgtccctaagatcaacaggcatcatcatgaatcctatttcagaatgccacaaagaatacgttttagagaagattctaagagaaaaagctaaggtgattttttttttcagtcgttttttgttctcagacagtgtctcactctgtcgcccaggccagagtgcagtggtgcgatcacagctcactgcagcctcaacctccagggctcaaacgatcctcccacctcagccacctgagtagctgagactacaggcgtgtgccaccacacccggctaatttttttttttttttttttgtagaaatgggatctcactatgttgccagggcttgtctcaaactcctgggctcaagcgatctacctgccttggcctcccaaagcattgggcaggcccattacgccatgagccaccacacctgctggtttttgttttttaaatggaattgaaaggaactagccttggctagttgcagaattcacacatatggggctatggcaacagcagattctggagtctcagggtcttttctttctagataagttacagggcaattgcttttcagagtacttttacatttctattccattcttgtcagtaaagacaaggatcccataagctgatggagaaactgaggcctctagaaactaaacgctgggaatggcacccagggtgctgaattccagggtctcctcttttctgccacaggcacacatgccccagcagcccctttggagagccccctctctatagggtactagccgggggctcagactctggagtcagacggcttccgagggatgaggcctcagacaagtaactcagctttgaaatgttttcagtggggagagaaatagccccctcccagggctgtgctccgggaactgactgagggctaactattatgggcccaccccattgttggaatgtcttcagccacatgggggaatgggtggaagaggccgggatgtgtcctgccagctagagcagcgaagaaatcccagcggggccccaggaagtccaagcccatggggttcaggtgctcctctctggctattccttcagacccgcagctgctggacacaggccacagagctggtgcctcccgcgccatcactgcagtgcagcctgggtggacggaggaagccaaggggaacggcctgggctcagagtaaggagaccttgccccgggggacaaacggtgtctgaagtgcaggggtgaagcggtctccagtcctcaggggcctggaaatcagctccttgggacacggtcttatgtgtattgaccattctccccatccattccctcttcggaatgtttcagctgttctgagaaaacactttgcattcctgccccgcccctgtgatttctctttgggcggcaggcagccgggagaggctggaggcctggggagatgggggcagggcacaaggctaagctcagcaccttcctccaccctcctcactgtactcaactcctaggcgggcactaagagcagctgccttcctggacccaccttaacctcttgtgactcaactcccctttccagggtgcagggaacattccctctgccctgccttccagctctggccacagtggcctggacagagtagctgggtcccaggcctgcccctgtggacgagggaccagggaccaagagcgcactccagccctgagcccagagcctgcaaagcccaaagcaaggcccataaacggaggctacggtaagaggagctgtgtgtgcagtttggtgggtccgagggatgggggcaagggctgaggggcttgcctgagccatggctacagctgggccctctctggccagtgctcgttcctgcaggatcctggaaaagcaggcccaggcccatggctctgccctccttctggccctgaagggtcacgatgctcttggccatcaggaggaagtacctgcagcgccggtgcctcgaggcactgcttcacgggctgcggggttcccagcaggccaggtgcctggcagtggcatggcagcactgggtggatgcccaaggggcagagcagctggtgcggaccctggtgagtgggtgcacccctctccacactgaccatctcccatttcacctcatacttaacccaaacccctctcaaaagtatggcccttggacctactgactccaaaaccttgggggacaggcccaggaatctgcattcttaatactcctcagatgacacccccttgccatagccctttcactctggtgcagcagtgtcgggggagaaaggcagaagggctggggactgcgggggagcgtgagcacaagaggccttctctgccaactgtccccaaagctcagggagtggcacctgagatgggcctggcagacgtggtggcagcggatcctgcgactgcgagtggctcagcagttacagcagcaggaagatgggtgggtcctttcccaggtactgccctcttccctgcattccactcagccagccttccagaagtctgtgccacagccacgcaccgtggagctttccctgcttgccagccccggggccccttcgttttcaggggagggggtcagttccattacagaacacacaggctggatgctggagcccttgctttgatttgtggccccagctcaggccaggcccacccggtccatcagtttgcgaagaaggtgtggcatgaggcatggctgccactcacactagcccatggagggcctgggtcctgagcgccccctccctcatttgctctgctctgagtacagcttcccagctcaccatcagatctattctgagcttgtgcatttggcctaggcaagactggctggctgcttggggcagagggaggggccctggggacaaaaggagctgggtacaggggttgctctagcaggcacagcacagaccccggagaaagcccacaacaatagcatttcctctcctccctggttccaggcctttaagaagtggcaccaacgcctggcagccaggagcccaaggagaggagctgccagtagcccaagaccctggagcaagccaggccccaagggccccgagagtggacaggaagccgccagagcaccgcggggttgggggcttggggcagagcatggggcccagctgcagctgtgacttgttctcatagaataaaaaacagaactgaacttagccttcccagggaaggaaccatgccccacacatccagggagtgatgacagaggggacagcttgaagagctctgaaggacaataaaacccactcctcagtcctagctgctgctttcagtctctcctagcggctgcccctctgccccagccagtgaggccaggaagggagtaaagaggacatcccacaattgcgtccacccccttggccatcaggctgctcttccactacacgaaacagcccatctgcacctgccagtcactgcccccaggccctggggcttgcaggtgactcgtggggagccaggccaggcagataacctctgggacaggacgaggggatgaggaaggcagctggcaggacaagggcctacctgaaaaatacaccaggaagctgggctgctgcacaggcccaggcagatctggggcccctgtgctggcaaatctcatcttagcctctgacagggaacggggcagcatcaggcctccacagccaggcaaaaggggaaggccacgagccccaccaagcacaagggttcagactgccttcaacccttaaggggcactttttctctcaaggctcagaatagacaactgtgccaaaaagcagcatggtaggtgtcagcccaatgcccatccagggggctggtgccatggacggctaagtgggcaggcagggcagtggtgtgccccttcagtcacaagtaggtggggcccagctgcccacctctaggaggtggaagggtacagcactttgccacatctcttctacgatgccaccagtgcctgatgcccttgcgtgttttgcctgtactgcacgggctccaagtgtaagttcactgggagtcccaggctggctctggaggctgccttggttcgagggcttagttggcaacaaccactctcctcgccttctcaggaggtgccacccactgtggtcctctgcaggacgcaagtgctccccaccaaaagagcacagactcctggctagagcagagagtactaggttcccatgtggggccgactcaggtccaggaagagcctggaagcctcactccagtctagctgccattgtcaggtgggggagtggaggccggggtgggagagacacgaaggagagtggagttcccaagagaagcagcactgtggaggaggaaggcgggacaggagtggctccaacgcagggcgtcaggacgcagggtcatggagcctccgtttctctcgcattctgggtgggcctgttgagaagctccaatgtgtcttccaccacctgccagaggcagttgtccagtgggaagtcattgtccaccaggttgaccaggaagtagttgtcgtggatgtactggatgatggtgcgggacggggactcctcctcatacagctttccccaccgctcaatccacagggcaaaggcctcgtcctacacacacatacccccgcacacacgcacacatgcacacacacacagaggcaagattaacagggctctccaagggctctgctcaacaggacatttcccggaatagaacaaggcccactgccagtatcacttcccacccctgcccagaaataaacaccctgcatcagcagtgacatgggtgagtcagagctgggtgtgccctgaaggctgggtccagtgtggccttcagcacacgcttgggacttggtcccaatccctccccacggttttccaggtgggcggggcaagcttgcccccggctcctttaccttccagaacatgaagctgacgggatccactacggtgggctggatgatctctcgcccagggaagatgccccaagtgacagcattcggctgcagttcaggggcattggtgatgttttcaccctgaggggatgtggggtgggggtaagacctgggccaagaacaactggagtcccactgcctggacagccttgactcaatgaggctgtctgggctcaataccctctgcctgcgcctccactcccggcctccactctccctgcgcctccactcccctctccctgtgcctccgctcctggcctcctctgcctgcatctgtgaatgatatctctccccacacaagcctgaacctagaggcgtcctggccacttcccctctcctccttgagcaccccctgctcactctctgatccattccctcttgtctagcccacctccaggagtgtgtttggcttgggtcactccaggggtctcttcactggcctccccggctctagccgtccccaatctctctcatccgtatgactatccactgtgatttgcctaaaataaagcaggaaccaagccaccccactgctggagaaaggcttcccttgcattgagggaaaactcaaattccagcaggacaaccatgatctctgcgggcctggcccctgcttaacactcccgcctcctcctgctcatgttccccgtttccccagatggtgcagctcactgcctctgcctgtcctctgccctgtcccaggaatacccttctctcctgttggccaactcctctttgtcctcagtgattcccacagatgaccctctgagaagccttccctggcctcccaggtgagatatccctcctctggacccgacagcatcctctcctgaacttgattttcccacttacactggctggtggtcacacattgatctgcctccctcactctaggctgggagctccttaagagcagggccccagttctgcctgtatctctctgtcttgcacaatgcctagcccaggctaggtgctgggtgtttgctcaacgaagggcctggtactctgtgggaaccctggggcctggcctaccttcacattgacaaggtggtaattaacccggagctcgtacttcttcagcacttgcagaagtgcttccgctgtctcgcgggaagtgaaaaactctaagtaggcctgtgggagagacaggtgcctgtcaccaaccccagccctgccagacgccctttcgcagacacctaaggtatcaggactactggcagccatgtgggcggaataatgaactgtggcgttggcacgtccataagcaaagggtgaggggagtggggacgtgagtttctcagtctggacaggtctgagggctatcagccacccctctcccaatcagtcagggaagactccacgaagaagccatttctgaacagcagcaactggtttgacaggccgagtcatgggagagaggccccacacattccatcctccccagtgcaagctgacaatgacattgacatctcctctagaaccagtgcctatcagggattaagctgggtttactcaaactcatttgctagaatgctgataatacgggaggctgggcacagtgagccccacgtgaggaaagtgggttcagggaagttgagcacgttggctactctgacagtaaacagtagagctggtccttaaactcaggtctttctgctccagggcctgtgggccttagatcagaacataatgttaactccagcagccctgggagaaaggtgtcaactcaggatagtaacagcagctgcctttcagggagtgcttcctgctcttaccatgtgccaagcacgttacatgctttgttaggtttcatgcccagaacacaagctacatcccattttacagacgagaaaaccaggctcagagaggtcgagtgacctgcctccataggtctgatttctatctttttttttttttttttgagatggagtcttgctctgttgcccaggctggagtgcagtggcatgatctcagctcactgcaacctccgtctcccgggttcaagcgattctcctgcctcagcctcccaagtagctgcaactacaggtgcccgccaccacacccggctaattgttgtatttttagtagagatggggtttcatcatgtttgtcaggctggtctcgaactcctgaccttgtgatctgcccaccttggcctcctaaagtgctgggattacaggcatgagccaccaagcccagccaatcttttttttttttttttttttttttttttgagacagggtctcactttgtgggccaggctggagtgcagaggcacaaatatggcttactggaggctcaacctctcggactcaagcgatcctctcaccccagccccctaagtacctgggactacaggtgtacaccaccatgcctcggtcatttttgtattttttgtagagaatgggtttcaccatgttgcccaggctggtctcgaactcctgggctcaagtgatccacccgccttggcctcccaaagtgctggccgggttccgtgcccagccaggtctatctgacttaaagcatgagctcccatccgctccaatccatgctcattcaaaatttaagagcccaggagaggcaggctgctctgccctaagctctggggaacccacgggtgccggtcaagagaggggggcaccccgtgcctccctaccacaccttctggaagacatagcccccgctggggccccagcccacgatggggtcggaggacggcttcccgttgatgttgggctgtgagttgatggtgaggatgccctggcggttcacccgcagcagctcctccttcagcaggctggtctcagccgccaggggctcatcgttccagggcaggcaagtcacctgggagagacggtgagctggctggggcgaccatcaggtttggcaccctgagtccctctcacggcccccaacaaagacccagcctgtctttgcctccctaagcccttccaggtggaggtctcccaacttacccttctccctttgccatgtccacagcatggaggggagggcacaggatggggaagtcacagccccgcagcctggcctgcagctggggtcaggccaggggcaggggatgaaccagggtccccactccagcatcactcactttgtgaccattccggtttggttctcccgagaggtaaagaacgaagacttcaaagacactttcttcactggtcagctcctccccccacatcttcagcagctcctccttgggggacttgctcttcaggtagaagaggtagtagtccttcagctccccaaaggcaggggaagaggaattgcccctggcagaggggtgcccagaggtcagggcacactcctgacagagggcagtgccaccacatgcccaggaggccattcctgtaaattctgcccctgactcctcccaggtcaaccacaagcatgcaaacttcttctgccctcccgctcccaagaacaaagatgtatttgcaaggaaggtctgcaggccctcaccagcggccgttagggaactcgtcccactcctgggtacggtagatgtaactctttggtctggaggcccagaagatgggacgtacatcttcctctcggcgcttggggtgggcgctgagagcccagggtaggggacgcctgggtgaggatggggacagagaattgagacaagggattggctagagggagccggaagcaggggagcacccctgaggctgagttcttccatctgatgccctctgagactggagccttcgatgtgcccagctagccatggcacagacatccatctgtaccaccgtggggagccagcactgcagccggggctgctcttggaccctcctctggggatctctgggccactgccctcacctggggtcctcagtccacatccccaggcgcttcagcacctctgtggtagccatctcgcggttgagggtgtagaagtggaggcctggcaccaagccactggccagaagctcctggcacaggctcacggccagctcgatgccatagttgcggatggcagcatcgttgtctttgattggctcaatcacgtccttgatctcctgtggcacctccagcttggacagcttcacaagctgccgaagggagtggtagccctgtccaagacatgaggggctgtggcggctgctggccagcccgtctcccaccctaaatacttctcccccttccatcatccatgccaaccacagtgtcaggcagagggacccacgaaagtccgatcatattctaggagcacacctgggcttggcctgccgttttctcctcttttttctgtttttagagactgagtctcactgctctcaaacgccagggctcaagccatcctcctgcctcagcttctcaagtagccgggactacaggcacgtgccactatgcccagctttcccactttttacagagtagagcagctgccctaagcattccagccttgggttgagccagccttttagccctagatgtgtctgttggtaacatggtgtcatctaacccagctgttcccatgctgcactgatcatccgaatcacctgccaagctcaagaagtaaaacacacattccgaggacctccctcagatttactgagtgagaacctccaggggtgggacctggagatccactttttgaaaaagcttatcaagtggttctgatgacagccacctttgggaaacactgatttaagcaggatttgtaatgagaattagaatcccttttggtgatgcttgttggccaaagtacaacaaacccctcaacagacactgttgctgggttttggggggaaaattagaggtaaccaaaatggggtggccaagcaacgctgtgcaagttctggacctgagaggagatctgggaagaactcagcgaactcagcactccacccagagcccccagcctgtgcgaggacggtgcggtgagagtggggtggagggagcttatgggctctcctgggcccctcacctggatgggaaagatcccggggacgatggggcaagtgatgcccatgtcggtgcatgccttcacaaagcggaagaatgtgtcagcctcaaagaaaagctgcgtgatgatgaaatcggctcccgcagacaccttctccttcaagtgcttcaggtcagcctcaaagctccctgcttcggggtggcctttggggtaacctgccaatagggatgacagtcaggagaggctggcctccacctgttcaaggcgagggatgaagagaccacagggactgggcagagagagtcctctgctttgggggctctgatcttgcaccttccaacagcacagcacagcctgaactaaaacagtgagtggctgggctcatgactgatatgcttctgaccccagagatgactctcaggggaggtggctcagagcccagttccaagagtgggggtggattgctccaaactcccacactgtcctgccttgagcagccaagcaaatcaggcctgcacttggtggccatagaaaagagaaaatgctacagttagcactggctgggcagcatctggggtagtaagcttgacttttctctaggcaccggattaaacattgtttttaatgtaacactgaaattactcaggggtccaagatagtgaaaagctaaaaaccaagttacacaaggaagaactgaagaaagtgatgttttcttcaaagaaaataatggatggcagggtgcggtggctcatgtctgtaatcccagcactttgggaggccaaggcaggaggatgacctgaggtcaggagttcgagaccagcctggccaacatggtaaaaccccgtctctaccaaaaatacaaaaattagccaggtgtggtggtgtatgcctgtaatagctactcaggaggctgagtcaggaaaattgcttgaacccacgagacagaggttgcagtgagccgagatcgtaccattgcactctagcctgggcaacgagagcgaaactccgtctcaaaaaaaaaaaaaaaaaaaagaatgaaaagaatacagaaactcctttcaaatgtccaaaggtctgtcctggggaaaaaggatccaccataggtgagtttgttttgttttgtttcagagacagggtcttgctctgtcacccaggctagagtgcagtgatacaatcatggctcactgtagccttgaactcccgggcacaagtgatctcccacttcagtctcctgagtagcttggactacagatgcaagccaccacatctggctaattaaaaaaaatttttttaattaattatttattttttagagatggggtcttgctatcttgtccaggtttgtctggaacttctgggctcaagcaatcctcccaccttggcctcccaaagtgctgagattacaggcatgagccactgtacccagccccctagtgaagttctttattagtcatattctgtgttgtttctaatggcagaaccagcatccggttcagagagctggctagagtactataagccactcacaaaacaatgagctcctggagtctgaaaacacaggggcagtggatgctgaagacaagattccagaattgcttaggaggtgggatcagatgtcccataggctccttactggctctgtgaactctctgacccctttcctcaatgactaaacttactagccgccttgctcggtcaggcaagcaggatgaccataggccttcatgaaactacatggagtgctggtttcatcagcccaagcccagggcaggactctgagccaggcggaaggccaagctgctttgctctgataaggcagttccgttcttaagaaacccagagtcatcaaaaaatgaatataaaaactattgtttcaaggggtaagggagtgggggataaagcaatggggcttcacacttgcaataacaaagctattttcccagtaggaatttcagaaacaacaaggctttttaatagctgaaaagtatagctacaatacctaaatatcaccgaacaaatctagcatttgattacgtatagattttgctatttactctatttttctatcatgaacagctgagggctttcttttttaaaatgtttttattttttgtagagacacggtctcactgtgttgcccaggctggtcttgatctcctgcctcagtctcccaaagctctgggattacaggcatgagctaccatgcccaacaggttggtgttttctaatccactcatcttcattacccacttgataagcaaagtaagaaaccattcagcaactgtgagctcacagcttcactagtttccaatcattatcacctaacgcccatcacgggtgcatattcccccagtaactgactatataatggctgatacaagcgatgacaatttaacagttggaaatgtctgttctctgactcctaatcagtgcttcccagacttagcacctaaacacccctgttgacagaatggacatgtccatcgggggttagggacaaggccaaagttactcacaacatgtaattttcttgaagccacgtggtttgttttttgggttttttgttttgttttttttgagacggagtctggctctgttgcccaggctacagtgcattggtgcgatctcggctcactgcaagctccgcctcctgggttcaagcgattctcctgcctcagcctaccaagtagctgggactacaggcacgcgccaccatgcccggctaatttttgtatttttagtagagacggggtttcactatgttggacaggatggtctcaaactcctgatctcatgatccacccgccttggcctcccaaagtgctgggattataggcttcagccaccgcacctggccttttttttttagttcatatcactttagatgctactccataacatagccatgtttaatataaaaatggtaggatttctcccagaatattggcaaaaaaactgtcatcccagaaaatgtgccaatcccgggacttcctgtccctggtgcacactgtcttgccatacctgagcgctgtctgagacgctgagggctcaatgccagccttcagcttcaagggtgggagagaagtccaacccacccatttctgttgggggaacctggtcttgtggctgtggccaatggtgattctctttcctgggaatttggaacggaggcctgtccattagcctggggaactggctggaactgacactctgcacactcaggagcaggccaggtgtgtggaaaagcatgggtatcaggtctcccagatgaagcacagatgtgcagtgggaagcggagatgggggaccctgtggccccagagggaatgagggagggccttgctttttgacctcttccagtgccttgtgaggtctgaggccatctcctgatcttgggttccctgccctctggaatcctgttagtaaatatccctcttttgtggggtgttgttttttttttttttttgagatggagtcttgctctgccactgaggctggactgcagcggcaccatctcggctcactgcaacctccgcctcttgggtccaagagattctcctggctcagcctcctgagtagctgggactacagccgtgcaccaccacacctggctaatttttgtatttttagtagagacggggtttcgctatgttggccaggcaggtctcaaactcctgacctcaggtgatctgcctgcctcggcctcccaaagtgttggggttacaggtgtgagccaccgcgcccagacccctctttcgttttaaagaaaagaataaggccaagcaggctaagggcacagccaggcagaggaacaaaaagctaggggtcgatggtggcaggcccaggaggggagtgggtgatacaaaaggagcaaggacatggtgcagttcacctctgcatgtccttcatccagcatggacccatgagtgcccctgatcactgtgtcctgaaccgaacaccgacaggctctctgggcatctcagcctccctagctccatccccgccaccaggatgatccagccactcacctgccacacagatgtcaaagtagtcaccaaactcacttcggatgtgcttcaccaggtccactgcgtagttgaagcctccctcctcctcttcccactggtcacctattgggtctgcagggttggtggaggtcatagtcactgggtctcacccaacctccagagaccctttctgttccctctacctagccccgacacccaggactgcgagtccctggaaggcagaaacttcatattatttaggtttggttcgtctctttctagcacttggtaagacagcaggagggaaaaaagcagcccaccagttcaatattcactgcatgctgaccctgtgctggcggtggagaataggagaccaccgctgcttctcaccgtgcctggaggattggagagcccttccctacttctacctgggcatgcctgccaccctctcccatcccacggccttggggctcctgcctcctgggagaattttctactcatctcaagtgaaggggtcttgtggtagggagcacgaggccataggatcccacccatcaggctccctcttcccactcttaggtggcctgacaacagcgggcaccagaggcctgaccggctattctcactcctggatactctgttactctgtgattgggccaagtgctgggtgcagccagcaatcgatgcagtggtgtaggcaaggcagagggttatcaggccgcgactgcattcctgacggaactcctatgtcgaggtcaagaggtggaagaggtggctgcctgtgtgtggtgcccaggatgactcactacccacaatgcctactgacactactggcggggatgggatcctgcggatcctcagcgtggggcccaggaagaagtaaaggaccatttcaggaaccaagttcaggctaccaagtggcctccgggaaagccagaacccagagtgtaggggagtgctggctccacacctccccgcagcgccatgatgttcttcaggcccagctgcttagctttgtgcagatggcccgtgatctcctccaggcgctgacggcagcaggtcatgtgcaggatggtctccaggccacagtagttcacggcggtgctggcgatcatcatggaggaggtctccttgtctgagccagggtcacctgctgggtgccaggtcacgtctatgtagagggggccacctgctgccatccggtcaaacctgtagggggtttgtttctgaagagaggttccaggagaaataccatccgtcactgccttcccatggggcccgggagttagagaagcatcaatgaaggttggagacagaccaatcagcgttcatatcctggctttgctacttatagctgtgtgatcttgggtacattacttaatctctgtgagttctgtttccttatttataagacacggcagatagtagtacccacttcataataacactaggatgctgggcgtggtggctcacgcctgtaatcccagcacttcaggaggctgaagtgagtggatcacttgaggtcaggagttccagaccgcctggccaacatagtgaaacctcatctctactaaaaatacaaaaattagctgggtgtggtggtgggcacctgtaatcccagctacttgagaggctgaggcaggagaattgcttgagccaggaggcagaggttgcaatgagccaagatcacaccactgcactccagcctgggccacagaatgagactctgtctcaaaaaaaaaaaaaaaaaaaaaaaagcaacaacaacaacaaaaaaccataacactaggagaatatgacggcagctggttccacagaacttagaacagtgcctggtgtacaaaccgaatactcagtatatgtgaggtgccgttataatcactattacagaggtaagacacaacaacagcgctatcattttgtgtgagagcagcacttcagacttttcacagcgcttgcctgtttattatctcaggtgagttaagacatcatgattgagagttaggggaatcctaactgtggcaagcacagcctcgctgtaggaacagttagaaagagggtcagcagactcactttctttcatgccaccccccaagccctgtgcagcagcttacagttatgcagaccaaggccaagttccgaaacgagactcaaaaaaaagcctggatgtgcacgagtacttgtgttacaagctatcaacggtgtatttaaacatccttgtgcatttaaacttcaaaaacttgggagtgacacgtgagacgtgcatacagtaaaaggcataaacttaaaaaaaaaactgcaattcatgaagtgctaatgtaattcagttggcatttctagagttcaagaagcataatccaaatttctaacttgctgaaaacaatctcactgctttgtgacttcctaaactgcactcgtgatccagcccccaagttccctcaaagaatacagtgtgagaatcaacatttttaacccattgaagagtgtgtctaaaataccttgacactgtggagggacttttacaggcaacagagaagttgcagatcagatgacccactctgccttctccttcctgccccctccggctgcttttttctgccgggttaaagggcagcccagcctcagggctgacagtttgctccccaggcaccaccactcccgcctcccaccttaaccttgcatgagtttaccttgagatgagattgacagctccctcagcagttcgaggagggaagaattccagggagaaccacttgtcaccagattccaatcgccgcctcatcttctcccggagtctctcatgccgctcggggtccaggcccggggtggaacatctcgaactatctttggagctctcactgccactgctggcactgccctccaagcaggggttgaggctgctgtttcctctggcttcgttcaccatggctgggttcctactgcacagggtggggcagggagcatcagggggcaggcagccacacccccgacacatcaagacacctgagtggcaggttcaagccggaggcgctgtatttccacacaggaagaaggccaaaaaaggtgacactgccccctcccagtggctccatgctcctcagctatggctgtccgggccgcctcactcaaagccttgccctccgctgctgccaggctccttgcatgcaaggcagcccccacccggcactgcaacatgctcctcggtgacagctacctgatggaaggtggcacagaggacctcacgctgccgacctgcgaggcccatattcctagcgaggggcagtagtgcccagctgggaggaccctggcttttcgatggtccatctctgtcagctcaggcccagagtgcgtggggagggaacagaggcaccttccccagcgggtgtgttcaactgggcggagctgcgacaaaggaagaggcttgagctccagccagcacaagggggcgggggcaaggcttccaggcgaggagggagggctgaggctctagtaaggggaggcggatggaaggagggggactcaggggcagagactgcaggggttggtggagatgaggccaacaggcgttcagggataccagatcaccctccagagaaggaacagctcactctggctggctctgcctggaacatctgttacttgaaacagttcgtgcacaggatggaaggggtgagggcttgactatgcagccagatttctcctgaattcatgctactccaaaaagaccgtgttgtgggttagaacttgatgctggccatgttccaaaaatagccagacccaagttcagtaagggcacgaatttctcagaacaaaagctgccccatctgtgcttgccttgcaggctgctcttcttacacatcacagaattcaattcaaatcatcacagtgacccagctactgggaaggctgaggcagaaggattgcctgagcccaggagttcaaggccagcctgggcaacatagcgagactccatctcttaaaaaaacaaaaaacacacctgtaatcccagcactttgggaggccgaggtgggtggatcacctgaggccaggagtttgagaccagcctggccaacatggtgaaatcccgactctactaaaaatataaaaattagccaggtttggtggcgggcgcctgtaatcccagctactctggaggctgaggcaggagaatcgcttgaacccggaaggcagaggttgcagtgaaccaagattgtgccatagcactccagcctgggcgacaaaagcaaaactccatctcaaaaaaaaaaacaaaaacaaaaaacagaaacaagtaatcagagccaccagggcacagacaggccaacagagggcatagggtcatctggcagtctggttaagaaaataagacaaacacttaaaaacaaacaaaacacttgcacagcaatgggcaaacacacagtagtgaatgggtgtgtggtgacatggcacaacagaggaaagcccaggtgaggttcatttctttcagactgtccaccactaaccctgtgtacctaaccatttggggtcttagactcttttgacaatctgattaaatgcactgctcccttcccctgaaatacacacacaggtgcacagactacacggggatacatccaaagacaaggagttgattccagactaagaaccctgggccaaagctttctccctctagggctgctctctttcattctgacctcaaactccagattctcagtggggatggctgtggggagtgaggaacgggggcgggggggaggagtaacagcaagagcagccagttggctttcctccagcgtttaagggcgcacctcgttaattgcttgctggaacagaacctagagtaggaggaagctgaaccacctgtaaaccctctgattttcaaagacttattgcattcctagtatatgccacgcatgtgccatatttgtaagccaactcccacgatttatccgttatcagctggactcccatagcaccctgggttgtaactgtgggtgaaaaggcctgtctcctttctctttccccagttccctgagacaggaccggtgtcctgcctggggtatccccagagtttggcacacggtgatagccaacattcactgagcgccaaagggccaggtgctgccactctctcaaaataagcctctgccacttactgaacaactagtctgcgccaagcactgggatactaagcctacgactcccagaaaggtcccggcggacccccgtgcgcagcgggacgcagtgggcgccagggaccgcagtgccccgggcccagcgctcttctccaggtgatcgccggggaggcaggtttaaaaggcaggagccggaagccgtctcggcgcccaggtggccgagaatccagtcaccaggtcactgagtcaccgatgggggcgaggacacgggcctgggccggtcagaggggcgggatcgtcacccctggctcaggggcccctccgtccaggcagggagccaaagtcagtcttcgcttgagggttggcggtcgctggaagtggtagccattgggagttacactaatcccgcgaagggtgcgcaagggaggcggcagccccccccaagaagagaggcaggccggcctccagcgctccccgcccacaagcacgtccttgcccccgggaggttgtttgccggctccaggatctccctcccggcgaccccggcctcgccgtcactcaccctccagtcccgggtgactcagaacgctcggccgccggccgcaccactgtggccgctgcaggggcggggaacgcagtgaaggggcgcggcgcaggtgtcaggttgctggagaggcgggcctacagggcggaaaccaccggcgcgggtgaccggaagccccgcccccaacatggccgtgcccacaggtctcgttggaggccgtgcctttatcgtcatgtgacgcgagtcctcgccccacccgtctgcagccactcctggtctcagtcccagagctcgagagggccacgtgaccgtcccggggccagtcacgtgaggcgcagatcctggctgggagggggttggtagaggggtccagagtggcagtaaaggaggaagatggcggggtgcagggggtctctgtgctgctgctgcaggtggtgctgctgctgcggtgagcgtgagacccgcacccccgaggagctggtaagaagccggcggagtcggcctggggagggggcggttgctaagggactgagagaggcgttgccgggggtggggccgggccaatctgggcccgcaggtggcagcgggtggggcctggggaccgcagccagggctctcgaagcgtctaccctgcttcacgtgcctaagtctggggtcttttctcataacccctcctggaatctgagggagaatccaggccagctccagtaaatcccacccatgtttccttttatttccatctgaaaagagtttggaatgaaacaagcgttttcagaatgagcttcctcacaggactttgtgcttatcatgctgctgttttagcttctccagtcctttctcactctatccctcaccctttctgggtcactgacagtccagcttccccctgcaaagcatcctgggaaaacttgagttgtgttcccagagttgacaagtcctttctgatttcagatacgtcacactgtcaaatggaacctgcatttttaccccccttttcagctggcgttggacatctttgaggtgtcctgaagaggagggtggttatttggagactatcagtggaaatgaagagctcagctgatggctgtagatcctcacccacatggtccctcacccctgaaaggttttttttgagggctggttcctatttgataatggctccagatgatttagaagctagccactgatttcagtaaatacttctgcctccttccactcctaaccactaaaaaaggctccctctgcggatctgtttttctagaccatccttggagaaacacaggaggaggaggatgagattcttccaaggaaagactatgaggtgagctcctttgatactgcttgggcaactaaagtagtgagtggcctggtcacttcaggccgaagcattatgattccaaccagagatgctctttgaccttctgtcccagggagtgagtgggtaagagaacttccttctaggaaagagactgtttagcaagcccttttctcaccttaaccccaaaacaaggtctggtgtttttacacgtttataaatctgtggcaccttaacctggatagagtatgtatttgccattaaactgtttgcttttacagcttacagagagacttagagtgaaaggcactggcaggcagtatgtgcccctaacaggtgtgtgcttataaactgttaaggaggccttgcttctcttctaggagagcttgcttttcagatattttcttgctcaagcagct

SEQ ID NO: 385 - DNA, 614855 bp, Homo sapiens
  source 1..614855: mol_type = genomic DNA
tttcagacatcctggaagcactatgcagggacacttctttgcatcctttgttgcaattcctggagctgagtctgttcttgtagcccccaccagcccagtgttgctgagcgaatgacaggtcttgtaccattgcctgcttgatatgtgacattcttagaaatattcagtcatacatttgttggatctctgcattgggaaatgagtgtgaaccagtcttcagcagcactcttctaaacagaagtttctctgatgatatgattcacagaggctgagggagaggaataattttttgcctctttatcatcagttatggataacttttgctgaagggttaagacacagtgaattctggctcacacagatcaaaagcgaatttattcctttcctgactttaaattcttaaatacattcagtctacatactgcatgggtattttgactctctgaactctaaagtgaaaatgtcaaaatcttgacttctgtggtgagtacatggcatctctcttcttaaattagctctaattgttttatagatacatatggatttctttcagggaccagtcacagaagcctggaatatccagattggaaattcacagttcatattggctttattagttttgctccagttgtcttagtactagtaggcttgtttaattcattccacaaaattgaatggattaatggaatcaggtcaaatctccccaccccacatggctggaagggtctgactctgatatgttttataaagagcctgacttacagcttgctcttgagttaaaaaaaaagttcaaaaacaattttgcatattatataaggttacatccctaagtgattgattaactagcgcagtgaaggtagttccgttcttttagtggaaggttaatcaggtctctaataccccaggcagtcgctcccctgcagatgctcaagtccctcttggctctctaatcactagacagtcagccccctctccacctgctgggagtgttttgacagaaagcaaggacttggccctaagcagcctctgatccttccaataaataacgctgctgatcttcacgcctcctcttctgtctgcccagcttcaactccagtccttctgtgtaaacctttaactttttttattgtatggattttaatgttcattgtggtggctactttgagtggttttacagaaaaaaaggagtgcacgtgtcagagttcaatgcaaattcagaaattaagtccttttttttttttttttttttttaccttgagcaggctaaggcttcccttttaattaaagagctgcactccagctctccagtcataaaaggacagcagccaaccgctgtgggctgaatttggggctgcctttgagtcagcctgagctgatgtgttttctggaatgactttttcttttttgaagtcgatctacaggaatcggcctcatcagctgtgtgtgttgagaggtggggacgggggagggatgtgtcagactctgagcgtggaccagaactgcgctcggagactttcagtgaaagcagaggagagatttccaaaggttgtattttccttctggttggagcctctcatccacattgtggtaagtgggtcagctctggttcactcttccttttagaagaacaggagaaatccatgcaggattaactctgcattttccacaagtgaatttcagttcccttgttttaactttaaaatgtgcatatgtcagtatcaaaacatttttctttgctttggtttttgtttctgctttctgatagctagattcagctcagcctaattcaatcattctctttaaaattttaactctaattaaagctaaaaaaaaaagtccaaattctgaaagtcttcgtgagtgaagaggaaatattgaaaagttttgaaagacagacaaaaaaagtgatttttttcaggtataaatgctttagcaaagtcttgtgtacaatttaagattgaagctcataatagaaaatagtattttttcttattcaagagcacatacacattcattttaaatgcctgtatggtatgtgtcatacaattaaaactgacaccttttttttacaatatgtgatgtgttttgcatatgtcatattttcacaaaacataatgtacttttggtaaaaacagtgtatctaggttgtctgaatttttcagccttgacactttatttctacgaaacaatcactaccatttgatagaagaaataaaacctagtgttagctagatcagcagggtgactaaggttacaacaatctgtacatttcaaaacagaagagcataattaaatgtttctagcatacagaaaagacaaattcttaaagtgatggatcctaagtacgctgatttggtttgtaaaagttagatgaatgtactaaattatcacatgtaccctgaaactatatacatctattatgcatcaatacaaattgtttaagttaaaaaataacagccatcatttatgaatgcttcctttactcagatgttagttcttcatatgcgttatttcactacatgcttacaacaaactcatgagttagacatttttgttactctcttaagatatatatttatagcaaagtgataaatacacatggtgaaaataaaccaaatgatactgaaggttcataaggaaaacctacaatctccctgtagctattcttacctagttttgcaccccagagcaaaacatttaactatttatgttagctttgggaggatttatctccagattcctaaataatatgtcaagtctgaaattttttttagatgttgtcttattgatatcctgctattatggatagggattcagctcatcctacaccactctccatctcctatcaccccattgtgtttaatatatacatgtaacttttagtttttctcctgtcagtcaccttggtaacttcaaaaacccttaagcctatatttgttgttctatcaactatagacagtatttctcaactcattttataaaatgcaattggtagttctcctgccctctcctgccctgccgttcccctccactttctaatttcagtcagccatggtttgcttttgatcagcttgaaacatacaaaattgcctgtgtgtgattaccggtggtttcatgcggtcatggtcaaggtaaagaacattaggttgtgtttcataaccattgtaaggtcttctatatctgtgggatggtttcaagatggaaaaccaattcatattatttataatcttgtaactctatatgtatgtttagaaacagggatacataatagaaaaagataacttttcctactttaccagcccttattgcaagtgagaagttgccttagaataattctgcttttgagtagtccaccattccctatccacggctgctccactgctgaaaataccattagtactgaaaaggtgaatcaccagcaccttggagatagccgctttagtgagacatgtgggaaagggggcagagatcaatatcagcgttactttcatttgtttattccacaaatatttattgagcactgccatgagccagagattgtgcaacagggcacagaatgaatcacacagtgaatctgattccggccttcaagtcgctgacactctagtggtagtaatttgtgtgtggctttccataaataaacattgtagtgatagagagagagagagacagacagacagacagagagacaacactaaacttctcacctctaatacagaaataataaaattcttatttgtgttaagtgatctggaagattttttatttccatatttttaagaattaaattcaaatgcatataacaaaccaaaagcaaattgtctttccatggtagaacaatatttttaaaggttgttattcaagtgataggttgacactttttgttttgtttgtattttagctgctactgacaaatatgagttgaaagtgtccactttctgttcctggacttgctacttcatagaaaaaattgtttcaatggtgaaataggcaggaatgaataagtacgtgttgaattcttatgtgatttgtaaggatgagtatgatctcctctcgcaccatttttattcattggaacataaaactgcttcaattgatatcaagtgcaagaaatccatgtgtatgaacaactggagtgctgaacaaaattacctgtggtttatttctccttgtgtaggtattctttttctttttttcttttttttttattatactttaagttttagggtacatgtgcacaatgtgccagttagttacatatgtatacatgtgccatgctggtgtgctgcacccattaactcgtcatttagcattaggtatatctcctaatgctatccctcccccctccccccaccccatccccagagtgtgaagttccccttcctgtgtccgtgtgttctcattgttcaattccaatctatgagtgagaacatgtgttgtttggttttttgtccttgcgatagtttactgagaatgatgatttccaatttcatccatgtccctacaaaggatatgaactcatcattttttatggctgcatagtattccatggtgtatatgtgccacattttcttaatccagtctatcattgttggacatttgggttggttccaagtctttgctattgtgaatagtgccgcaataaacatacatgtgcatgtgtctttatagcagcatgatttatagtcctttgggtatatacccagtaatgggatggctgggtcgaatggtgtttctagttctagatccctgaggaatcgccacactgacttccacaatggttgaactagtttaccgtcccacttgtggtattctttttcataaataccttgggaaaacaagggttgtgttcactctaggctgttactttgtaattcaagtatcagtcataggtcacagtcagcttatagctaagaaggatacgtaccatatagaagagcatctagatcatagccctccatccgtatgtttggaatcagtgaagaagtagagctatctcaaatgcattaaaaaaaatatcaaatgcccgctgtgaggtttctgtgaattcccagggagctgaaaatttttatgattccttttggctctaaattactcctccaccaattactataattttctgtctgtctcacaaaactcacatgctttcccagttttgggttgagagagttcggacatgaaatgaggtcctttctttgtagccttgtacaggcatggaaagaaaagtaaacaacagaaaatccattcacaaaggccatttgtgagcatagcagattttatgtaaagtttgggaaaattttcttcaattccacgtccagtaatttggccatctatttgcacagtcatccattgtatttttagacacacccccaggacttatttgtacaaacaaaattattcagctgaaaaaaagtcagcagtacttctctaattactcctatttacctaatccttgactttttaagattacattttcttggactctgattctgatgcaaaacttttgccaacactgccctgagagagtgtaagggtagggggaaattgatgaacaaaggttgttcaagagtttctgattatgtcagacaaaactgcttttgtactttggctctgatatttgctgatcattggcattgcttaatttgctgaacttctctctaagctgcagtctttttgtatgaaatgtgggtaattataacattttacctactacatagagctgtgagcattgaaataacacaatgcatcaaaggtgcttagcatagtgtccagtaccttgtgagaagccaataactttcctttgttaacattgtattattaacgctgctactgttgaccgttatacattcagaagactttaagttccatcaatcatctttagaaatttttactactatagaatttactacatttaaaaatagttccctaggagagaagcaaaactaaaaaacaaaaggtaaatggtggggaaaaccataccctagagctagtgtcatggctgaactattttactttctgttagaaattctaggactttgaagtgaaaatactttgaaacttagcaaccatggtatgaacaagaacactattttttctttcattttatggttgcttttgcaaaatgtagtaaatgcagcccctaacagacctgttagtgataacggtcttgccttaaatgccaacctgtatttattttactacggttttttaaaagtaaataagcttttccaactttatattttccagcaggtcttattgaaaatgggcttatttttatgccacttatcctcatgaagatttttttttaattttacagaaagaaatatgaagagagagagaaaaaagtaatcccaggtcctttttacttgagggcttcttgtgtggctttgaactcagcaggtagggtgttttgacccatataaaagccttacaaagggaccactttttttgcgaggtagacagagatcactgtggatgtgtgcttcattcagtgcatcgtttccctttgcagatgtgtgtcccatggagcaccgcaactgaattttaagctttcaaaagtaacatctagtatttgatgaatttggactgtgttgtgagaaagtggaaaattagagagctccctgaaacctgttagagaatttcctgttatttattttagctgtacaccaccagcagagtaattatttgaactttcagtaggttccatcccaatagatatttttaaaaaatgagaaggaacataattttaaatcacatatatataaattatatgcagacgaaacaaaggggaaaaccaaattagttcttctctacttaaagaactatgaattatatggtcatctaaaatccgattggggactagacagtttatttctttttaaatatgacaatatagtaatttttttcaagtgtcaagatgattctaaattcttccatgcagggtatatgaggaggctgtgtccagagaagttataagataatcctagggacccagaggctatgcacattcacctgcatcccagacctttgtcccaacttccaaccctgccctgagcctagtccttcatatttctagtccttgtatttagaataaggcaaggtaggcagtgggtgaacactgctgagtgtttggttatgtgacctttatgttatcctgaggcagttcaccaagacgttcaggagcctacatttcctcaggcctctcaatttgggagagtgtgactttgaaattggtgctctcaattctttcaacctgctgtggactgaatgtttgtgacgcaaccaaattcatatgttgaaccgaaatccccagtgtggtcatattaggaggctgggccacggggtggtgaggaagtcataatggtggggccctcatgatgagattagtgcccttataagaagacacactagagttttctctctctctcattgttatgtgaggatatgatgaaaaaaaaaaaaaaaaaaaaacagcccaggaagaattccatcactggacaccaggtctgccagtgccttgatccgggacttcccagcctcacaactctgagaagtacatgtctgtgatttaagccatgtggcctcaggcattctcttttaggaccctgaatggactgaggcaccacccacacaagcatacagcatttcatcagtttttataagatgtagacctcttgcacctttggttctttgtaggctgtttttcctttccttaactcttgcctctctgatgcactctttgctagtcattttctacgtaattgcgatcttgaacatgtgtagatttttaagatattggtaggagttttgaagatgttttgacagtaatttaatttcttcttccaagggaattttttgaaaatcaacatagtcatagaatatgtcactaataaatgaaaacattaaaatgtaaccaaatatggggaaaaaaatcacatggtatgttgcaactgtggcctagagtcttgcttttgagaaatcaatctgtcttgactttgaaatattaaataaaggctatgttggaagtgggtggtttggtcctgcaatattctggacaatactgaggaatattttcactccagaaaatagttccatatttgtagaagaatcttcatttttaaactaccaccaatggaatccattttccatctctactcctgcagctttctcttattgactaaaaagtttctaatgaatttgaggcaaaactagagaaaatataacacttgctatgaagtagtggaacaggtatggaaaagcatatcctgaattgagggaacattcctggagaaagaacctggaaaaatgtccagtttccatttaagccctggttaagcagtatgtggtttggaagtgaaataatgagcctattgaaaagtatgtaataaatgagtatttagactcaaaatctaaaatgaattatgagggatttgctctttgttttaaaaaatatattccaaaggaatattttgagatatcatgaaacacacatctcgcctaaaaaccaactgagaattagatttgatgtgtgtcatgattgtgttggagatgaagagacagagggaatggtcagttttgctaattaggaaaatcctggacatgtttacatcatcttacaatgttttgatcaatcttggaggcattaaattgactacttttcctaatagagatagtgcatgtgttctgaattgttaattggctctaaaattagttatagtttatttctaaattgaaccaaagttgggaaaaattcatggacttaatatgaaatatgttattcatcaatttcatatacaactttggttttttatgattttagatgttgaatctttgaaataatatttatattatctaatgataacgtttgatgtttggatagttcattgtctttacattttaaatttaagctacttttttttctttcaattcatgtgattaacttcttcggatgaacttgttaattttctcctactctgagttcatttgaatggcttattttgtcacttatagcactatctatattttgctatatttagcagtttggtggctatgattgtaccaggttaaatgaacaaaggcagttcaataaatcatcctgttacagctgacacatatgcttatgctatttgcctgtctctcagtcaagctttaatagattactcttttccaaatctttttttcttaaacactaattatccttgatcaataacaaatacattcaataaatatattgagtgcctgtattagtctgctattacactgctacaaataaatagctgagaccaggtaatatataaagaaagatttaattgactcacagttctgcttggctagggaggcctcaggaaatttataatcatggcataaggggaagcaaatatgtccttcttcacaaggcggcaggtgagagaaatgcaaagctaaggaggaaaagccccttctaaaaccatcagatcttgtaagaactcactcactctcacaagaacagcatggggaaactacccccatgattaatcaccccccatgaggtccctcccccaagagtggggaacaatttggattgcaatttaagatgagatttgggtagggatacagagccagactgtatcagtgcctatattgtgtataacctaatgaggcatactaggatattttggtgaaaaagacatccctgcaccaagtaactaaatctgaaacttccttttgggaaggccaggcaaggactaaaatactgaatgtagtatttgaaaaaagaatgcagtagtaacaccaaggaaatgaagtaacatttagagaagtatagatgaaaatcatagtgagtgaatggggccatttattgcaatggtgatagcacaaaagaactagcagaatgaccaaaccaaagttgaaatgctagtggagaaattcttgacaacactagctcaaatattaacattgaagttgatttaaagttttgaattgttgaagtcatctttaatatataaattcaggtcctggattctgaacttttctatcataaatgttagtgtaatccttgactttttttattttgatgaatattcctttagctgatatttattttacggaagggttttaaataagcacttaccaacttaattgcaactgtgtttctgttttcctcactacgttgtcagccttagagagcaggtacaatgtctgtttttccacttgtatacctctgcacagttcatggtaatgggtaccatattattgagtaaatggctggatgcatagttggatggatggattggtggttgtctagctggattaatggatttggaatgtcccagcaggatgatccacttttgaaatattctatccatgtgtaaacatttctactttttcaggaattatcagtggagtgttctgtgggaaacaaaccatatcggtagtggcaatgggttctgataataagcaaagcccttgtatcctttatcatagtcctgtatcacagttatatgcttgttcagttttatatgatcatttcttaaaggactgactcttagacataatgtggactcctgtgaaagaactatatttgaaagctaaatatagccatgagtgccaaaaatgtaattagcactgcttttaaggagcccatcttagtaatctatctttgtttatcttacaggaatactcatcatctgatttgctccatgtgaaaaaaaatcccttccaatgtccaagtatcctgcaatgttgcagggtactgatatggtctggctctgtgtccccacccaaatctcatcttgcattggaatccaaattataatccccacatgttgggtgagggtccacgtgggaagtgattggatcatgagggcggttcccccatgctgttctcatgatagtgggtgagttctcatgagactgatggttttataaggggctatttctccttcactttacacttttctcacatgccatcatgtgaagaaggacttgtttgcttccccttctgccatgatggtaagtttcctgaggcctccccagccatgcagaactgtgagttaattaaacctctttcctttataaatttcccagtttggggtatttcttcattgtatcatgaaaatgaactaatacagtaaattggtaccagggtagtggggcgctgctataaagttacctgaaaatgtggaagtgactttggaactgggtaatagacaaaggttgaaacagttgtgagggctcagaaaaatactggaagatgtggaaaagtttggaacttcctagagactagctgaattgttctgaccaaaattctgatagtgatatggacaatgaagtccaggctgaggtagtcttagatgcagatgaggaacttcttgggaactggagcaaaggtcactcttgctatgctttagcaaggagactgatggcatttttcccctgccctagagatctgtggaacttgaacttgagagagattgtctgaaattggcacttatgtttaaaagggaagcagagcataaaagtttggaaaatttgcagcctaatgttgtgatagaaaagaaaaatcaattttctggagagaaattcaagtcttctgcataaagttgcataggtaatgaggaatcaaatgttaatcaccaagacaatggggaatttgtctccaaggcatgtcagagaccttctcagccgttctcattataggcccagaggcctaggagggaaaaatggttttgtgtgtcagcctcagggccccctttctctgtgcagtctcaggacatggcactaggtgtcccagctgcttcagctccagccatgggtaaagaccaaggtacagcttgggcctttgttttagagggtggaagtcccaagccttgacagcttctgcatgatatttgtcctctgggtacacggaagtcaagaattgaggtttgggaacctccaccttgctttcagaggatgtatggaaatgcctggatatccaggtagaagtctgctgcaggggtggagccctcagagaacctctgctagggcagtgcggaagggaaatatggggttggagtccccacacagagtccccattggggcactgtctagtggagctatgagaagagggccaccatactccagaccccagaatggtagatccacctacagcttgcactgtgcacctgaaaaagcaacagacactcagtgccagcccatgaaagcagggagtggaaggggtgaagggagctgtaccctgcaaagctacaggggtggagcagcccaaggccatggaagcctatctcttgcataagcatgacctgcatgtgagacatggagtcaaaggagatcgttttgtaactttaaagtttaatgattaccctgttggactttggactttcatggggtctgtaacccctttgttttggccaacttcttccattggaactggtgtacttacccaatgcctgtatccccatggtatctaggaagtaattaacttgcttttggttttacaggctcataggaggaagggacttgccttgtcttggataagactgtggacttggactttgggttaatgctggaaacagtttaaactttggggaactgttgggaaagcataactgtgttttgaaacgtgagaaatatgagatttgggaggagccaggagtggaatcatatggtctggctatgtgtccccacccaaatctcatcttgaattttaacctggattgtaatccctacgtgttgggggagggaccatgtgggaggtgattagatcatgggggtggttcccctatgcagttctcatgacagtgagtgaattatgagatctgatgattttataaggggcttttcctgcttcttttagcacttctcctgtgccatatgaagaaggacatgtttccttccccttctgccatcattgtacatttcctgaggcctccctagccatgcacaactctgtgtcaattaaacctctttcctttataaattacccagtcttgggtatgtcttcatagcagcaggaaaataaactaatacagtaaataacaaactaatacatgtacttgctcccagactcttagaggggtagtgttggtatagaaagaatggaaccccgacacctccactgcctcttgtggagctttttgggactgaactcaatgtgctcacactttctccaaagccagccaataacacaagggagctacgtgccctgtcaccctctacagtccttccagctgccatgcttctgctaaaccttaactactggttgttctcttagggtttcacccctctcttctctcttgttcctgttctctgatcctacagtgctctctctcagctcaatctcagcatgtctaaaaactgcccattttaaaaataggcagtgtaaacatcatcaagcttcccttgattttctcagctagttgggatctctttcctacagcactttgtaattctaacgatcgataattatcactttcagttttgcagatttctggaaactctgattttagtttccgtcactgttttggaagcttcacatgatcattttagtcgtgcacataggcctagggcggcatctaaatgtgacctttactgcatgcatcagggcctgttatccagcctttgtagctcctggtggcatggcttctgcctttgccctgctcccctgtagctatgtgggtgttttcttggttcctctgctaataatttgccattatatacgagtgacccatgctgcacgctctgcctaggagccttccccaactaatgctgattcatcatgcacaccttgtcttaaagctttctcatcggacctagccagaacccttccttgcaccccacagctaaattacaccattcctgttcttctctttcatcttaacctattcctgactttcatggtatttttcacaattgctatatgtatgttaaacataataaatacacacacgcatacatatacacatacataaatacatatatatcagtgcagaaacaaatatctgaacccacttacccacaaatgattttttttttgagacagtcctgctctgtcacccaggctagagtgtggtggcacgatctcagctcactgcaacctccgcctccagggttaaagtgattctcctgccttggcctcccgaatagctagaattacaggcatgcaccaccatgcccagctaattttttgtgtttttagtaaagacagggtttcaccatgttggccaggttggtcccaaacacccgacctcaggggatccacctgcctcagcctcccaaagtgcagggattataggtgtgagctaccccacgatgagatttttgaaagtaaatccttgtaaccaaaatcaatgtaaaaaaattttttaatctttattttttgaaggacattgaaaggtactcaatggtgaccccagcaacactcttcacaatctctcttcctcactgccttattttccataggcaggttcagctcctctcactggccgacaactcaagcctgtctgcaggccagcccaggaaacgatggagtccctggaagtttcctcctcattcttctcatggccttctcctgtgctttctccttgatctgcccagcccttcttcttattctgtatcacacacagctggggctgcaggctttgcactggggagaaagggctagaaatgggtgcaaagacaaagggggcttcggaaaaagggaagacagtgggagtgctctgggccaccacggttccttaacgcttagcctttctctagactgtgaatcccatgagggcagggcccaggtctgttctgctcacggcacatacaccagcgaggtgcctggccccaaacaggtgctcaatgctatcagccaagtgaatgaatgaaggaacaattttgaagtcattaagctgatgagtaaatgtagtactgaacaaaagacactagagggagatcagagaaggacttcagcaacatgagcacagcagaagccaagattcagccgcatttgatagcgtggaaatttcatttctgcttctttgtcttcaatttaaaaaattttaaaaataaaataaaagtgaattttatacagagatttatttatttatttatctgaactgaatccgacactaatcctttctgtttttaatataggtcatgatggccctaccatttgtagaataatgttaagactgtagatagacattctaaaacgatagttatttgagtaaaagcctcatggaatggccctgcataaagagattggctagaaggaacaccactacagtcatctgaaaggatgaatcatggacacttgaaagagtgctggggaggaaaacactgggcccaaaaggaaattgtcagaccgtcctgacaatttcataaagtatataagagaaacaggaaattatttaggaacaaacagaataaagttcatgtgaagctctgggactgactgagtgttacacctgaaacgggtatccaggcttactctttcttcaaccttgacaatcccctctctagacattgtttgtccatctgtaaaatggactaacagtagtacagagtttgtaggatgaggaggtggcaaggattaaaggagagagtgcacataaggactaacacagggactggaccagcacacacatagtcagaatgtactgtgtgtgctccgtcgatgcctttccatgaaattgattaagtttactaatatttgcctgcctcagccatttcctctcttgggctcttttttaatgattacgctgcactagacattttttcttgtactgtacttcaaaatatttgggacctggagcgctttgtgggcaaaagtactcttctcttattgttgaaatcctcctgtgtgttggttcatctggagaaatagaaagacaaggcccctgcccttgtttatgaagaagcatagagcacagtgctactctaaaatcatttcaaattgcatgcataggtgctgatggaagcgtgcgatgtcgaagttatacaagcattttaagttcagccacattcacgctgccatttatagtaaatcctccttcttatatttgctttattcttggctgcagtattgctggatctggcagagactctgataagcaaatggccaagagctatcttgacaaggaagaggtgaccttgaggcagaagagaggaggagagctgagagaaacaagtagatagaattgcagaatggttgaaaagaaaaaaaaggagcttttgcctttactttcagcttgtctgtgttagtgctctttttcctctggatagataagtctaccggaagttcatttccagatgcttcagtaaaaaattaagttgactcatagtaataaaagagatgacaggaaagtcttcagtgggtgcaaaagccatcatgatttgaatgatgaattcttatatgaactttaaaaattaaagatatccattaggtatcacatatatcattttgaaaatgatgtgtattctgcctaaatttgaaagaggtgaggtatcacttcaaagatttgagtccacgtaatttagctttccataaataagagtaaatcaacataaaatataaagagacaatggcatagtaagatcttacagccttttagttttaaagacctgggtggtggatctgctctattgttttcagttgtgttacatcacaataaaaagagaaaaaaaggaccttaaaaaatgaatcaaattaatcattttaaaaagttctaaattggaagtcacactgaaacaaatgaaaaaggaattaatttggaactactagaaaaataacatgtagccagtattggattcaattcaatttcaaatcagaacaacttttatgttttaccatctgcctcaccaagagccttataaaatttgaacactacagtctttagagattcacatatgaggaaagctttttaaagaccatttgatgaatataaaaccagaataaataatgttggttcttgtccataaatagagttagtaattagtgattactaaaaagataagtcacatctgtcatatcatgggctcagatattccatttgaacttctgccctctacacagtcccacagtagtccagtttaatggtcttctgacccagggtaggtaagcaagttgagactcagagaagataagctagggtactgtgctcctccaacttgtaaattgaaaaaaaaaatggaattgaagctatggctctaaactgttggatttaggcataatacttatttttaaaaataggcaaggagcatgaaacagaaacaacttatttctgcaaaatgcttgtgttccagttgtgtattgagatgagctagatagaaggcaggtaatattctttttttttttttctttttttttttttttttttttgagacggagtctcgctctgtcgcccaggctggaaggcaggtaatattctgataaagtagactctttactttcttcacatatatatgcatgcatgtgcatatttgtagagacttgaatcgcttgttggctttactttatggataagatatgaacattttatttgcccatttagttgactcttctgcagctcctctggacatacactgtaacatatgtgcctttacagtcctgtgtcttgcatgttgcctgcttaatgagttagtgaatgcttaaggaaaggaatccttaacaaggaaaaaggaaaaagagagacaagatgctaatactagaaaaaaagtaataatatcattgaatcaaagttttaccaaagctaatcattttaagaaaatataagattctacaggagacaggatgcttaggtggtagacactaataagacaaatccagctactgtctgcacagtcttgacagaaatgccttcaggtttaaaaatactaaatcactaactgtttattgatttaacatttaacatgtgccaagtactctgactgggttaaaatgtcaaacaagacatggtccttgcccaaatggagttcacaggaaacactcgaggaaataaataaatggactataaagtgacaggtgctgagatagtccctgcactacacaaagggaggctcagaggaaggggcaccatctatcagggtggggttgggaggggtaggctctgacttttgacaacccattcccattacctcctttcagaccgtgagaaaggtaactcttcaagagtgatacctagtttacattcttgctaccctgttaatagagcctgccttccctgctaaatgagaaaataaaccaagaaaattatttcaagaactaggtcttgaaattaaaccagtatgcaactcggggagatgtagccaggttaagaagaaggggttattccaacacaaagactctgaaacaagaaatagcacttcatgtttgaagacgatatagtgtttagggagtggagctgagatgagagagacaaaaagtaaagctaagtgtacttgtaaaataaagtttatggcttggaaagatgggattgattatggcaacactttaaggtcaagaaaacaaattgggcacgttgtcttaagagggctaaagtttaattaaatttgattaaaatataaaaaagaattgatttcagcattttctgaatatggtagggctcatttgtgtgtctgggaaatctacataatctttctggatttgacattctgtctgcctgtaaaaacattggaaatatgtaaatgactgattgtgtctaaatgtgtcctcaattctggatatgctgaagacattctaaaatttatctttacttgtctcctctttttatttcttgatatctagttaggtaacatgccctcctggttatgttcatggaagttatccttttatgtgtaagaagccaccttcaaaacttagtgtcataatagatgaagaaggaacacttcccaatcactctatgcagccagaatgcccttatccccaaaccaaagacattccatagaaactccagacaaaagtcccttatgaatataaaaagcaaagtattcaacaaaatgctagcaaaccctatgcagaaacatatagaaagatttattcactatgaccaagttggacttatcccaggagtatcaggttggtccaagacatgaaaatcactgaatataatatatcatattaacaggcaaagtattacaaaagacaaattaataggtaaagtaacacaaaagccaaatgatcgtcacagtagactcagaaaaatcacttgacaaaatataactcccttttatgataaaaacactcagtaaatgagaaacagaaagatgcttcctgaacctaatagaagtttattcctaagatgaggaacaagacaatactctctgctctcaacacttcaattccataatgtactgaatgttctagccagggcacttacataacaaaatgaaataaaagtaattcagattaaaaaatgagaagcaaaattatctattcttagacaacatgatcttgcatatagaaaattgtaagaaatccatataaaatgtagaaccaataaatgagttctgaatgtttacaggatacaatatccacaaacaaaaatccattgtgtttctacaaaccagcaatgaacaacttaaaaatgaacttacaaaaacaattctaaatacaaatagcatcaaaaagaacaaagtgcttagggataaattaacagaacaagtgcatgatttgtacatttaaaactatgaactattgttgagagaaattaaagaagccctcaaagggaaaggcattcttttccatggattgaaagacattatattggaaagatggcaatgctcccccaaagtggcctacagataaaatgcaatccctattaaaactatagctggactttttgcagaaattgacaatctgaccttagaattaacacataaatgcaagatatccagataactaaaaactatctttaaaatgaaaacaaaattataagactgacatatcccaattacaaaattactacaaagctacaaaataatcaaaacaatgtgatactggcataaggctggatatataaatcaatgagatataattaagagtccagaaataaacacttatatttatgatcaatcaattttgacaacagtgccaagactattctatgggaagagtctattcaacaaatgttgctgaaacaacggaatatccatatgcaaaagaatgaacttggacccatacttcataccatatacacaaattaacaaaaaaatagaccatggaactaaatgcagtggctacagtttttaaattcttaaaacacaggagtaaatttttgtgaccttggattaggcaatggtttcttagatatcatgccaaaatcacagtgacaaaaatggtaatttgagctacattaaaattgataattattatgttttataggtcatcatcagagcagtgaaaacacaacacatagaatgggagaaaacattcaaaaattttatatctgatataggacttttttctaaaatatttaaagtgactcttgcaatataacaataaaaagacaacccaataataaagggtaaaggacgtgaatcatatgtttccaaacaacataaacaattgatcaataaggagagaaaaagatgatccaaatcattagtaattaagaaaatgcaaatcaaacctacaatgagataaacttcatacccataactggctaaaataaaacgtcaatcagacaataacaagtgctgacaaggatatgaagaaattgaaaccctaatacactggtagtagaattgtaaaatagtatgccctctttggaaaaatttggcagttctgcgaaatttttaatgtagtgttatcacgtgatccagaattctactcctatgtatagacccaggagaactgaaaacatatgtccacacaaaaacctgaacatgaatgaatattcatagcattcttcacaatagcaaaagagctagaaacaacctaagtgtccatctactgaaagaaacaaacaaaatgtggtatacccattgcaattgagtattattcaatataaaaaggaaggacatattgatccatgctgtcagatatataaaccatgaaaatatgctaagtgaaaaaagttagacacaaaaggccacatatggtataacctcatttgtacgaaatgtccagaattggtaaatcccagaaacagaaagcagattaatgatttccagaggccttcagattgttctgggttttgtttccaaactagctcatctacaactgtctacctccatactaaacaatccattagtataaaagtgaaatacgcatatttttctttcctgacctgtttataccattctgtattgtgaattttcttacccaccttcctttctctgcacaaatgcagtcccttatatcctgaagtagaacacatcactctgtcttcactgctcccatggcactgcataaacactttgatttggcataaacacttatgtttacatgtggctgatgattttcacaagtgccctccttcctccaggaaactataagttacttgagagtgggacacatgcatttttcttcattatcttatccaagtcaacttttatgaaaacattttgtacacactagtctttctataactagtttttaaattgaatatttgaagagtagcattttcaagtaaaaatgtatatacagtagacattaaggagaaaacatgttcactttctttgtattttgtgcctaagtacaaaacaagttaagactctttcagagcgaaatgcaatgttctgagtaagcgcaatccccggttttcctggggattcgaattccttcaccatcgtagtctatgcttgaaatcatcgagagaactgtggatggtatcaactccatattctcttttagctcttcctcggccgtttagtgatgggtcatatgatgatgacttgggaactgaaccatgggcagtaatcctttttcccttgttcgtgtataaaccacgctgccggtgaattaagctgaagatttctctctgtgcccttgaaatgtgctcctagggaattaaggcattcttggtctggaatttgaattccttccttactgctctaagtgcattaaatgttgcagtattttagaaactacttattgttttaagaaggttgttagaatccatcagtaagtcaaagcagtacaaaagtgtagaaagaaaggaattgttaggacctattcatttatctccctacgtcttaattgaatatgaaaagaggaaaaggtcagaggaaagataaagtattgtgtacattgtccacactgtaacaaaagtgatctgcttgaaatttcctttcattctggggcttgaaacctgcgaatggctccttccccagtatccccaagataaagttcaaattgctccaaaccattttgtgacctgatctctgattccatctcagtgtcctctctcatctgtttgctcatccttaactccagactccagccatccctgaacatcttcatttacacaaaaggaagctgttttccattctttcttgccaccgagtgtgccattttcttcaggtttttgttttcctagagcagtgattctcagacttagtgtttagcagagagccatctggagggcctgtgagatccccaagagcgctggacccaccccagagatttggatgcagccctgtttgatgggagcacagaatctgcatttcaaacaagttctctggggatgctgctgctggtccaggggccacggttaaaaccacaggactgcatcactctttcatacgccctcattccctcattccttctatgcattctgcagatttcagctatgatagctcatttcagccaatcttatttgatccctagcagttgggcagaggcttttctgtgtatacctgagtagttttactcctcctcactatagcactgaacaacctgttgttgtaaatgcctaaataatgtcattgaaatggtaagctcttcacaggtacgggctttcatctgtgccatggttgtctctcagggcctagtgcctgcctgatagtacagtctccataaacaaaattactaaaggaaaataaagaagaaataaatagagactaggatccatgttcagtccatcttgtgttttctctaataccagcaaacgctgtgcatagcagaagccctgcacacataacaagggatggttttacagggagccaaggacaagacttactgagtacccaatagatgtacttatttattctattgatgtttcctagatatatcatacccagataatcgattgtctttcccttacaccatccccttccttttccactctgcttcttcttcctccactctcctttccctcaccagataggcagatggcctcaccaaacacccaagcacctagaaagctggtcttctctctcacttcccaatcctgccagtcttcaagctattgcttcctgagaatttacccagtctgctctgtcttcactaccatgactcaatttcaagccctcatgctctctcccctggactattataggagctttttaaataagtttccttgctgtccatcttgtctccctcaaatctgttcttcacagagcatcacgatttaactcctctgttaaaaatctgctatccactccccatctgctgcaagagtggtcttcatttttcaggtcagggatccctttgagtaactacagactctctcccaagattctatggaagagatgcatgtaattcaggacagaagagcacctgcaaaaaagaggagaaaagacttcccagcaggagacacctcctgcaaggcattgtgcattaagactgtggtggcagtggctgtcctagaacatttgcattgcagatgagaagctgctagagttgagcctgtagagacagacaggagcacctcacagaggacattgtatatggtatgaaggagccattgcctgggccagccaccacctcttccatgcctccatcttgctttgtctaagcttacgtttgcattttccacactgtgttatagtggctgatttgctgtgctgggaaatcactttaagggcagtgactgccccttatttgtatccatatgcaaaagtacagtagcctgtcagtcaatagttgttgaatgagtgaatgtagaatgaaccaatgcttctgagttaccttagttttacacccttagaaatccttttctcactgtgtctgttgctgctatgttaggaactctgtcactatttacaacacttaaacaatagattataatttgcatgcagtaaaacacatatatactacatgtacaattcaaccaatcttaatgtatctctctatatttatacgtgtgcaaccaccacgagatcaaaatatgaaacatttccatttgttctagaaagttccctagagcccttttcctatcaatagcccatttgcctgatttctattatcataattttttcctgtttttggattttatgtaaataaacagagtcataaatttgacactctcaaaatatcccccatcagattcatgtaagacttttattttggtgatacttctccacaaccatcgcactacaacttaccttaatccactcaactaacacttacatatttggctttagagatgtatatcaatatcttctgtggtctggagataattcttatcatattagcaccttagatgtaattgccagtattcatgatatgttaaaaaattattaaatgtctactaaatttgctacagcttagctacttcacgagactctaaaattcggttccctgctatactcttaaatttcaaatataaacatatatacctcttcccttgataaaatcttacttccgatctgtatcttttcttgacactttccttctcttgacacttttggttgactgggtctgtatgttgaaatgtctgccttgatagatactcgagggtgtaaaagtaaacatcaatgtagcagcatcatgtcagcattttgagagaaagcccacgcaggatgtaaattagcagtaataggatgtagcatcaggaggtatcacagcgatacatcagtgcagctaacctggccaagaagaaaggggaagggactgatcgggaggcagtttgcccgctgtgacccttgaacacttattttctactcattttacacaaccccttcccttctccaccttctcctctccagatgtctctcctatgtgtgtcctcccctctccctctctctccctatatacacaacaccaacatgtagggttgaagttcatcaggcaagggacgatgcgcggtgaggaaggtagaaaaaatgtgacagacagaagaaaggcctgtgctaggagttgaaggcaaatggcatactggaaacctaagcctaaaccacctagcaggaggggtattgccccatgatgaaaggtatggtggactctgtagcctgaatgacttggtcaacagagtcatgctcctttatggctgaatgatcttggacatcttgcttagtctttgtgcctcaatttcctcatctgttaaaaaagtattagtacccactacattgttctgattcttaaatgaatcgatgcctatgaagatattagaataatgcttaccacataataagcactttttaattgtttgctatataagttgaagccttaaaaaatggaggtcatttcctagaaatattcacttagaagcttatttataactttcttactttttgaataataaatctgaatatttattctggaaatgctaaagggaataacactaacgtatttattttttgactacctgagttttagggctgctctgatgtttgatgttgaagccacactgaagaagagaggaagcagggatgaaccgtactaagagcatgcattcatgttactgttttcaggcatcccagactcattctcttgatgcaaagtctgtgggtggaacttctggattttgggcttctagggatgagaggtttccagtattggcaacattagataaattaaggaaatatttcattgggtcagatcaagtccgcctttatgaggaaactgtggaaagaaggaagcagagatagggatggagatttcaagacaggaagaggaggactcaccttttggtcgatgatgggatgtgctgtccacttcccacttgtcactgcctctgctctgtccccagttcctcgcccttgggggccttgagtggcctccacttcccaaacacactatcctctttatttctcctgctccaataatttcctatgatatttatgcatttcagatctaaacatcccactcctctgcattaaaagcttccttgtctctatatgactcatgagaaggaacagagcctcccatccccaccccgcagcctggcctctacttacctctctaactcacccctcagctggctgtgccaggtactatcctttagccttgccaaacatttctgtttatttcttgaacatgtcatgaagataccacacacctctcttctgcccacctgctttgcctaatctcttcctactcatcctctggtgtgtgctaggcaccacatcttcagaaacacactgcaaaccctcaagcttcgggtgcctgctccataatgccatgcattttctagtgtagtctctgtaattctgtttcccagtgtataatctttgtaagctccacagggtagggtctaggtctgattcatgactgttgcatgttgagtgctcaacaaagacttccagggctgatagaattctatggtagtccccccacttatttgccgttttgctctctgcagtttcagttaaccaccgccaactgcagtctgaaatattaaatggaaatatctagaaatttccatttaatatttgtattctatttctagaaattcattaattttaaattgcatgctgttccatgcatggagtaacatgatgaagtctcatgccatccagcttcatttctttctggacatgaatcatccttttgtccattgtataagcactacatgcttcctgctcgttaatcatccacgtcgtctactcctgacatccagtcatcgacattgtcgtggctcagtgatcctgggccatctgaagcagatgatcctctcttggctgcggtgttaggtcaatagtagcctgctccataccaatgcctacgtcattcccctcacatcaggcatcagtaggcattttatcatctcacatcatcacaagaagaagagtgagtacagtacagtaagatattgtgagagagagacaatgagagacagcacattcacctaacttttattatagtattttgctataattgtcctgttttatcattgttgctcttaatctctaaattagactgtgcctaatttataaactaaactttatcataggaatagtatagaaatgtatagaaaaaaaaacagtgtatatagggctccatattatctgtggtttcaggcatccactggggatcttggaaagtgtcccccacagattgggaggatactgtataaagtttacttgtttagtacctggttcatgggtaaacatggcataattactgtgaaggggtttctactagtcattgatacctgcaagactctaggaaaggcagtgatgtcttcaaggcaaatcacataataaatattttcatgaatataaagatagcattagatcaatacaacatcaggggtgtgtgaaatagtcacatcgtgatggttggaattgtacttgttgagcacctagcttgtacagaagaaccctgggcgcttggcattacagctgccatttcttatcacaggaatttgaacctcaaccaggtgacctgacctttagggagtgacagatacaggattcatatccaaggaagtttactgaaatagaagtaaggagggacaacccactagaggagccttggtcagggaaaggatgtcccagtcttctacggtttcattagcctcatgcactgtggccagaatttatctgtgtctgttgctttactctgagaagtccttccagttatttatgggagtgtgaagtatggagagagagacagggagaggaggaagagaaaaggaggaggggggaaggcagatgttggtgggggatggaaaagagagggatggtgggggatggacgagaggaagaggaggtaagaggagaggccaaaataggctaagagagattctgatgggaaacatgaagtcgtggatcatgaatcagagacatggatcagagcacggaccacactcacagagcatcctggcactggtttccaaagccccactattcaaaaagcaatggacggaaagcctgatatcatcctgcaagggcagtggaattgtaacacaggagaggaaccaaagagttcaaggactctaagcttttataagctgcacatatgcccatttgagagaaagagtgagagagagaaaaggaaacaaattttctcttggagaagaaaagagaaagtctccaggcttatcaccctgaaatataagcccatgggcctgggaggtaattctccaaattgcttcagagctacacacacgacgtccagcttccaaggtatgcttttatgtaatcaccatttaaccaaggctgccaatgctctttcctctgacagcccaaactgtgcagataggagaaaatatttatggagaacaatatcgtaacaatgagggctacttaaacttatccaaaaggcctgagacttcagtttggagaaataatttaatgtcatttgtgaatttggatatttcagtgtacattctttttctagaacaccttaaaatattgttaaattttgggaacctctctagtgactatattgtatccattgtcactcaaagaaaattagcaacaagggaattcatttagaagaagaaagtcaaacttgcagccagatctccctatgatccgttttaatggcgccttcatgggggatattgaaaaacaatatacactcagtctacttgtacctacatgcttgaatgaagaaggggctatactccacttcatttctttcttcttctcctgtcatgtatggtaagttatgtttacttaagtgttcaataatcctgcctttaataaaatattcctcaagacattatatgtcatgcaccagaaaatgctttagagcaattctaattctctggctctccctttgttgatctctgaatgttcactaatgttttggacttcataggaaataggaaaagtagaaggtctgagactcaaataacgagttacctacctaggaagagccttccctatgataactagttaagaaaaatgcaaagcattgcattataaatgctggattgactggtacatgaaaaaaatgaatataagctttagagaaggtcaggaataatttaagcaataaaaaaatcaagaacagtttgtagattaaatgggcttgaagtaaatttgaagaatgcatggaatttgaataggtaacttagtgtgattaaattgtaaataagagcatgattcaactaaagaggcatattttgtttaaaaaatccatgtatatcaatgggaaaagtatgaaggagaggcttcttatttaattgcctcacaattcctttcatcctttttgggaaaattaagaatatcttttagatcatcaaaaaactttcagatattgtcttctaaatgacaaatgtatagagatctgttcaaacatttcagcctggtgtcccagctgtcttatttaggccaacagtaatcgctaaacttgcttcgtcatcaataaatttttttttatctgcctattcctggtaactggttgcagtatactatttattccctcaaactgattgaagaacaaggcaaagaatacttaattattcatgtgctcatattcatccatatcacacatgtgcacataaacctaggtagagtcatacagacataaaacaaaacggtctgtttcttattcaccattaagatatgcaaacttttgtccaaggtcaaacacctgaaatggaaaagtcttcctagatagttgtaacgcatatgctggaaagatttcaaagtggttgttcggattcaagtgaaaaaccttacaaatgctttacaaatgtcctgctttagatacccagtttaactggtcctcactagaatttaaaacatttcattttgattagggaaaaaaatcaccaaaggaagtgggtggccaaatgcccttaaggagcaattagaacatcccatatagcctgagtgtgtgtgtgtgtgtgtgtgtgtgtgtgtgtgtgtgtgtgtatcttcatatatccatatcaatgcacatgcatgtatttgctattatattaatctatattgtattacagagagtaattttcagtctttttgaagcagtttttaaaattgcatttcttttctacatcagtactctatgaaagtatttgaataaccagggatattttctagccgttatatgacaaattcacttttagtcactaaagcagggctcagctgggttagccctcactgccctctgacatggagagggcagttcctattaacccctacttctttccaactgtgcaagtctgtattgtaaatttcttctcatttacttcacaattgcccacatctaacttgaatgtccgtttgttctggttggagaaatgtgagactacgtgaagctgaagtgaacacacagccctgtggagtcctgaatccgagagctagtggtttcacaggcaggccaaaatcaggaacaacctccacagtcactagactgagatcagggactttatgagagagtcaaggatgttcagtcattcaaggtaggcttgatcctggtcctgaggcaccaggggttgaccagaggctgattctatagcaagagctgagtgtatttatgccttattttttgacaactcagatattttctcctctgtaggcttcagcctcaaaggaccctaagttattagaccggagttatgttcccaggagaggtcttgactccattcacccagaagcagtcaatatttgtgatagaggaaattataaatttagctgtcagccattgtgtgtgagacacctgtggctcaaggtctctaaatgtgtgtaatttacttcatcaaaggctaatatttataagccccaacctattcacagggcagaggcaatgatgccccatcacagagcttaaatttgcataacaaaaaactgttgtgtgtgatttatatcttcatttagaatttttgtcatgacctactgttaatacgtacctttcccaaattggtgatgtttgcaaactttagttttaatttcttcatttaataaagcatgtcaatgcaggcactattagattaggaattatctgtcagcagactggcattatgaaactacatgttttacattgtccaaataggttttaaatgaaaacattaagtagtatctcacctggggcctttttggagctgtgtctcatgtatcccattttaaaagatatttactaagcaatttctaacttttgaatgcttatctctcattagaatcattgcagtttctttttttgtttttggctgggaaataatttagccttatttgaaaaaatctggtgtataataatgctaacatttaagagaaaaaaaatcatgtgttcatatcagaaatagtgtgaataatgagcagctgtatggtgtataaaagagaaaaaggggtttcttgattattcaaaaatgagtttgaaatattatgcattcgtatttggaaagaacaatagttcattgtaataatactgaaaaataataaaataattgtgctttatgcgtttgaaaattttctggaaatgcaaaacaataccctctttcgaacgcatggatttaattttgtacttaatgaccatattctgcaaaatagataaattgctaaccatatatttaatttagccttggtcatttcttgctactgtcatcaactctgataccatatttaaaatataagatttagccgggcatggtggctcatgcctgtaatcccagcactttgggaagccaaggcaggtggctcacctgaggtcaagcctgaccagcctgactaacatggtgaaatctcatgtctactaaaactacaaaaattagctgggcatggtagtgggtgcctgtaattccagctacttgggaggctgaaacaggagaattgcttgaaaccgggaggcagagggttgcagtgagccaagatcgcgccattgcactgcagcctgggtgacagagagaaactccatctcaaaagagaaaataaaagaaaagaaaaatatatatgtgtgtgtatatatatatatgtatattatacatgtatatatgtatattttatgtatatatgtatattatatatattatatatagctatatataatatatataaaaatatatattgtatataatatatatattatatattatatatatatatgattgaaggagtcctgaaattattgttctgaccacccaacagtgagttgagtttctcagggatggatatagaggaggaaattttaatcaacttcaagttaccatttttaaaaaattttatgaaggaagtaaagttaatggaaccaaaattattttcctcagtattaatgcctgcattagaaattaatttttgttttgtagtgatgaaatatgtaaataggtttaaacatagttctaccaatgtttagagcatgagtatgtggtttcaaagacaaaaagataaaagggcttcttaatctggggaaattatatgtagatacagtttatacatagaaagcacattctaagtagtttaagaaatctgtgaatacatttctcagtgtatcctccttcaactcctcaaagtggattagatgttggctcttgttgttttagaggtctacatttgtagtcttacagtttctagcacacaacactgtgctatcttgattgtctctatttcatctgacgataagcactttgaggtcagggagtcaagtttctcttatagcacaaagagttgccaaatgtttatggaatacatgagtcgatgaaaaataaacacatttgataatgagcccctggagatgagatgttaattctcacggggtaccttggttaaagttcttataagaaatgccttaagttattgaaaaaagtagggctcaaatcaattatatttttaataacatattttctttgtcaagtgcacaacatgcccctctgagtgttatgctttttttcagtttaaagagtgaatggtatcattaaactcaattgtcttaagatgtttgctgagtttgtatacatgcagaggcatgcaatttgcagaaaattaagacattcagacatttaaggaaggtatataggcaacatactatttatccggcattgtattaagagaagggggtagggacatctacatggatacaaccttacccgaagatacattagataacattcacataaattcacagttattttatgcacatgtaaagatttgtattgatttaaagaggagagagctttacttcccgtgttggaaacagatatagttgtgtcttacagttttattgaaacattacaaaacatccaagaaaccctttaaaaatacattatagattcctggtatataaaggctctgttttagacatattttattcctgaaaagcacccaaaatggtgacttttgtgacagtgactctcaataattaattgtggaatcaacgaataaatgaggaatcagcattcctgatgaaggctgcaaatcctcattctaatttttggaaaagccaagttaaagcgtccataatcatcatttggtacatacataagtttttttccttgttaatgttaatgacaacttttcaatgaacaccaacaacagaaaccagaaattttatgtgcattatttctaaccttcagaataaagattaggaattatatttcacatgcatagatgaggaaactgaggctttagcaggttaaataatgtgtttacattgatactctggtaagtggtagaagctggatttgacatcaggctgttctgtgcgaaatcttcaacttattattttacatcacgctactaaaatgtgttagaatattattcagtgaaaatgtaatagtcatgaccccttgttgtatagatttgaatttcataatcttctagtttaataaaagcactgctctttgagttttgttcagtaaggaatacaaaattatgttactgccacagaaggatgggtgcacttaacatattgttcatgtttacctttcctataacctcaaacctgaaacataaattctagactatgtcaacttgtctttggagaagatcatcataaaaatgtatcaatttgcaaaaaaaatgtatcactttgaatttgtaaacaacttaaaatataaccttttggtttgctaccatggctatttcattatgagtatgatattcacttttataacaataaaccctagcagaccatatatttctttctgattccaattcagtcagatttacttcatccagttgggttgtacagttaaattcattgcagtctgcagaggtaggagaatcctaaattttaaagctatgcaaaccaaaagctttttgtggataatttaagttttacattctgctcagaaaagcagaaagatgtgttttgaaatataatgcaagtttttcattactaaggacagatcaaagatctctgattctaagaggtggctattttaagctcctgctatcaatttcctattcacacacagcaactggtggcaactaaaaataatccgctttactaccagctaagaatctggtcatatgtggctgatggacagtgtgcacgaagaagatttaggatccttctatccgtggcttctctccagcccactcatcagcttagtttgctgccatttgaaagctattgaaaagccattaacaggcaggaccgggagagccgcactgcagcacacctccgtgcagcagaatgtggctgcatgtgaacaccaattagagctgactattcccgggattgtggtactcggggctgtgtcaatcaagggtgctacaatagcacgtgcaccagtggtgcctcaagacccaccggggagaggcttatcttaactccagctgccgaatgagaatgagtttgaagctttttgcaggatcatggaacagagcctccatgcaatagtgcatcctgaggtaaactgttacctgagtaagggctttaagtaatgcatttcctgggaacgacagttgtgacagaagagaatgctggaacccgtagcaagattcctgtctgagatggaaagatgtctcactatcattttatcaagtgctgtaagtaagcttgatatcttgctcatgtggttatttgtcttgttgaagtattattttgtgcagatgccaaaattaaggcagttctcctggtataccacattcagatgagtgacatagactggtgacttagaagaatattttacaggctggatatatttccttttaattttagattgtgaaataattccagtgtgatccaaatgctaatagcacagagatctttaaaacttcagctttttaaaaaaaatgattcatagacacagcaaccagaaaaaaaaaaaaacaccagaaacacatggaaagaaattacaaaagcatatttttgctcattggcacatgttaataaagtacataaaaactaagtttattaatatatggctgaggtcatttagctagtattttagtctcaagttttactgcttaagcctctattcaatgctttttgtaagtgtgatctttagggttatccttgactgtaaacttttgtccttgtatcattcaccttgcggtgcttagggactccagggactctgtaccaaatgctctccactgatgttcatatggtgaaatttagtttgtcaccaggttctcttttgggcttatcaagggtttctttagcgtctgaaattttggcagaattttctgagctagagaatacttccatctaaaccaattctggatggtaataatgaagaggaagacatatttatccaaaaatggcttgctggatatacatttttgtcccctgcagcacttctgaaaacttctgtacatatatatcatgatcttaaagtgacagatgacatttgcagaaaatggttttcttttaagcttaaggttttgctgccaaaggacatcacaatgttaaattgaagcagcatattaagggaacacatgtgttgaatgaatcttgagctttgcactaaaggagactaaaaaaataatgatgattgagaaggtgaaaatatttacctttctcttatttttggtagagaatgtatacaggaattaaaactatgattaatggaaataaaaatgccttactcttaagcattgccaagaatgtcatgctttcatgttgcagaacaatttcaattcccaaaaggattcactggtcatctcgtaagtttgcagattagctctttaactaataagaattagaggcatgcagcgtatttaagaattttgagaatagtcttctgctttaatctgttaactcttggggttattttcttggagaaatagacacagggcaatactctgactggtttttgtattgcctctcgtgttttactgcactagcagaatgtcattattttccttgctgtgcctctgcagaggaaaaactctgcatctttcctacaaggaacctggatgctcattagacacattgaacacacctggtggagggcagccatggagcatgggtggaagcacaaagggacagtgacatggacgtgagagattcagggagcagttggtcaccaaacacaatatgagtctgccctttcctgccttttgttctgttttagttgaattatttgattgtagaatttcggaaaattgtagacatttcagaaaattggtgatgtcaattggagcctgtgagatatttcttttagcatgctagtataagagatgaaatctaaaattaatgaatttaaacattcctgatgcatttctgaaagtaattagcaactacttactaaagatctgactgctttctaagctttgagtgtgacagtctataaaatggaaaggaagcatgaatattatgaaatgctaactttactggagaaatggtgcgatgtgttaaggagttcagaaattatactgcattctgtgctgaactagtgaagggtgttttatgaaaaaaatgcatcttgagctatatcttggaaggatgaacaaaatatagaagaaggccgggcgtgatggctcacgcttgtaatcccagaacattgggaggccaaagcaggcggatcacctgaggtcaggagtttaagaccagtctggccaacatagtgaaaccctgtctctactaaaaatacaaaattttgctgggtgtggtggtgggagcctgtaatcccagctacttgggaggttgaggcaggagaattgcttgaacccgggaggcggagcttgcggtgagctgagatcgcgccattgcactccagcctgggtgacaagagcaaaaccccaactcaaaaaaaaaaaaaaaaaaaaagagtgaatgccctcatggtatcctaagggtttattgataaggatcataattcatggtttaatggttgttcctgatgcgtaagattttcccaaattgttgtctcccatattgggctgatctgctggcgaggttcatcggccttcgtcacactccattccttcttcgcctgtcctgcatttctaccacatatctgtctttcattctgagccagatttatcaccatagcacgttcactttcaagccagacagcaatgcaggaagtggatgaattccagggcaggagcaggaccttctgaaatgtgcaacattagcatcccatgtgctcctagtgaatcacaggaagccttcaggtgggatgctgggtgaccaatagctaatgctcgcaaggaactgttagtcacctgggaaaatactcatcatctaaggtgaaaaaattatacgcttcaaggtcgaaacttaatctaacagttgttatctccagtttatgataatatctgttactttgtaaaacatttttactttattttagagaagggttaaaaactagagtgtaaaaatttactgtggaagcaggatatagcaggaaagtgtaggaacaccacagcaaaaagtgtggccatttcatgtatcttggtagctgagaagtagctttagacagatctgcagtgagagccagtctcagagccccatgcctgttgagaggtaacacatgaacatgaccaggccccagctgaggcgcaagcagaaatgagaaatggaactcaagggagtcatgggctcacagaactttaaggccatgtgagacttgaaactacttttgttttaatgaactgaagcggaggcttgaggtctacctgtggagttcccttcacgtgcctctgggggtgaagcattgcaataactacacctgacctatttctctcctggttcagctcttctctaagcatacgggtttggggcagcattgtttgcagcaggaggaaggttaaagttatttaaaatgaatattctccagagctgagaattcatttacaacacctaagaacgaattgtatcagaaaatctgttactttatatgttgtattagtcagggctttcttgaggggcagaactaataagatagatgtatatataaaggggagtttattaaggagaattaactcacacaatcacaaggtgaggtcccacaataggccatctgcaagctaaggagcaaggaagccagtcagagtcccaaaatatcaaaagtaggaaagctgacagtgcagcctttagtctgtggtcaaaggtccaagagtccaaaagcggaagaacttggagtctgatgttcaagggcaggaagcatccagcatgagagaaagatgtaggctggaagactcagccagcctggttcttccatgttcctctgcctgcttttatcctagctgcactggcagctgatcagatggtgtccatccagatcgagggtgggtctgcctctcccagtccactgacttgaatgttaatctcctttgacatcacccttgcagacacacccaggaacaatactttgcatccttcaatccaaccaagttgacactgagtattaatgatcacacatattaaacatgttttatgataccaaggttaaaacccatttttttcctcaagccactcatgctgatgaacaccacctccagtaaaatgctttcctcacttttctagctatcgcacacactgttcgctcattcaagaactttcactgcagtgtttctgcaatgcactaacacacccagaagctgctccctccatgtcctcactctcccatatcctgctctccgcctggtccagcgcccatagtccattgctgaagccacttcactccttgccctcacctccctctgttccactcgagtgacgaatacctacccaaggtggaacccccctttccagcatgtctgtccttgccccagaggagctggatgacccttgaaggaggacatcagagcaaaagcagactgatttcatttaacatcatgatcaaacatctcacccaggcaggcagcactctcctgtaccctcgtcttgtttctacggtaggcacgactgctcatgcctagagaccccttcttctaactccaatctcccaggctgaggagttacaaacctaccctcccaccattaaatctgcagagtgtctgcgcatgtattcctctttgcccacttctcacctgcagtcctgaatttcctcctgtgtgtccaaggccagtgcgcttgcaattctgtctccttctgcctcctgcaagcttgcatttcccttcagctctcccctttctctcctgcatcagcttccaacagagtgaatatgtggccaatccatccatcttccaattaagcaaaagtccccccttgttctctcttccctcgggccaccaccccatttccttgtttgcaggtcataccttgaaacgattgcccatgcccgtggccttcgaccctcacctccttgtctcctcttccatgactgcatcccgctgctttcctttaccactcagtggaatccactttacttaaaccacctttatgtggcaaaatccaatggacactagacctgcctcatgttccttaatttctgatgtgattaccacgtcttcttctgcagctcttgggggttttctcctaattcactagcagcttttcctccaccccagttgctggctttctcttcttcttcgggcgtggccctaactttcttttgacaacctcatccattctcatggctttaagcatcatctatattttcccacatatgaacctttagcccagatgtccccttaggcagccctcccttctgtctcttaacaacatggacatcttttctggcaaattatatatctaggcattgtttcttgatagctaagtagtgtaatagtctatagcatttattaaaccatctatttattaaactcttcttttttgacaggcattaagacattctgtttaagtattttggcttataggaatattgattcacaagagcagtaacattgaatcaaatggtatgtgtagtttaaggttttgtagaaactgctagatttctttcagtgaggagtagcacttcagattaccacaaccagcaatcaaaggactcgcatcactgcacctcagccaacccggaaacgtgccttcctcccaaaaggatgtcaactccatcgtcgaaatatggtttcctgtggggctctccattttatataataaatagttaagggtgttccaccacttttaactagtcaaatttcttcatatgtgttttcattatttacactgggtttttaatccttttacttatcaatttcatgtaaacctttatgtaaggaaatattaatgtttctcttgatatgaatgtggtgtagatggtttacctatttatttttttttttttgagggagtctcactctgtcacccaggctggagtgcagtggcatgatcttggctcactgcaacctctgcctccctggttcaagtgattctcctgcctcagcctcccaagtagctgggactacgggtgcgtgccaccacactcggctaattttttatttttagtagagatgggttttcaccatgttggtcaggctggtctcgaacttctgacctcaggggatccacccgcctcagcctcccaaagtgctgggattacaggtatgagccaccgtgcccagccagttttcctgtttttgacttttgcctttgttttgggtgttggatggcatctgattttttactaattgtgtagaaaaatatgtctctgttctatggatttttggtttcatttattgctttgggtagcctatttattctaaagctaaattagttttctacatcttaatctaaactttcatttttgtatttgaaattttaattcatgtggaattaaggtgtgtgtgtgtgatttaaggtaagagttacttctttccctgtttcatttctgcatgcacaatacctactgaattgaaatttgcttttgtcgcattctaaatttctaaatatatttgcatccatttctggtttatgtttttgttacattgatccattgatttagtttaaggttacactgtattcattatcttagcttttgataacttttgagatatgataaggtaaatctctcctgattagtgttcatgacagtcttagatattctcaaatatttacttttctcttcaatattaaaataatttcaactagtcttaaatgaaaaaatatttcccttttttttttttttttttttttttgtgtgtgtgtgtgtgtgtgtgtgtgtgtgtgtgtgtgtcttgctctgtcgccaggctggaatgcagtggcacaatctcagctcactgcaacctccaccgcccaggttcgagcaattctcctgcctcagcctcccaagtagctgggactacaagtgcataccacaacaccgagctaatttttgtatttttagtagagacagggtttcaccatattggccaggatggtctcgatctcttgacctcttgatctgcccgccttggcctcccaaagtgctgggattacaggcgtgagccactgtgcctggccccaagttgtttttatttttgttttgttttgtttttacaaatgcacccagcgtttcaaatttaaaaatgtattataataagatctagagctttatagtacctatattctactaaataaattagtttcaatacatagtgtgatgacttcaaactgagactaatctttatgacactgtatctctaattataggaatcttatattacttttacccacactattttataatagtgttcaaataaatgatgtcctcatactagtgtgaagtctaggatgtgtaaacataatgcaattaagagaaagatagaaatcatcaaatatgctgctaagggaaatctttaacctcagatatccatatctgtgtccatatccagatctgttctatgcctccctctctatatatgtatgcatatatacacacatatgatatataaaatcgtaaacttatagtatatgtctcttgttcagcctttatacatttgacttttatacagacttccaagaacatcatgggctgctggtgtactgatgacctaatgatatatctttgtgttttgctccgtgttgacgttgcattatttaaggcttgccattatatctggagggtttcacactaacatccttacttggcatctgttgttctacttgggtacccttccttttaggttgtttggtggatgggaaaggattccttatgctttcaatggttggcccagactcagtatcacattaaagatataaacatgccacagtaacttaactgatagacctggatagattaagtcaattttagtttccttttattttattcatttattcagtatttaattcatgtatttattattcatgacttcaagaaatattatttaactcctggtccttttcaaggagtaatctaagggctaaagatataaagatggctgggcacagtggctcacgcttgtaatcccagcactttgggaggccaaggcgggcagatcacttgaggccaggagtttgagaccagcctgaccaacatggcaaaaccccatctctaccaaaaatatataaattagctggaggttgtggcacatgcctgtaatcccagccacttgggaggctgaggcaggagaatcgcttgaacccaggaggtaaatgtggcagtgagctgagatcacaccattgcactcgagcctgggcaacacaaataaatagattaattaattaattaattaattaaaaataaagatacaaagacgaacaagcaagctaacattcctactctcttgaaatcaccataccagtgtgtgagacagagtaagtaagtaaagagatgttataagaacttttgatggcatcaactaatgtgagaaaaataaaggtgtttaacgaactactgagtgacctggaagcagagtggacttgaggggtaattttaaataggttgttaagggaaaatcactctcaagaagtggtctctaagttactgaaaggagtgagtgagtcagcaacgtgaagacctgtgggaacagtgtgccacacagagggaacagcaagttcgaagaccctgaggcaggaatgagcatgttccacattgttaagccagagaatctaggctgtcaaaagttaggttttttgtttcactttttgttaattcctcccaaactaataggtcaatactactttttatttcggagttacttactcaagctaatagccctgggctccacttacctttacttccaaactttttaaaaaattcattgcttcatgctcctcaaatacctttccactcaaatatagcatttcatctcccacactgttactgtactgaaacatcaaactctctttttggttccagtttatctcaaattatttgcacattttcactcagtgaccacctctaacttcttaacctctcgctgcttgcttttctgaaaataattgtccttgtaacactgacttgtttctgcccctctcacttttcccacctatgcccatattttaagttttttaatcattcactcacgccagacattctgctatgcactcagtttatatgtataaatagaatttttttctacaagaaattcacaatcgaggaaaaattgaaaatgaataacgaattttcaatttccatctgtaagtcagtattatgagacaagacagggaaaggcacccagttgttccatgaggaaggtgtgtgcggagctggggcaagctcatcagagtaggcagaaggcatttcaggatgaggaggcatttactgaagatcaatggatgaggagcccagggagggaagaaggcctgcacaaagcaccatgttgtgactgcgtagtgcgttcaaagcaaagagatggagaaagaagaacaatgtgcagtagttggacaagtctgatgtgtttctgtgttactcattatgcaagggagggagttccttgaatgattttcaagagcgagtgatgtgatcagctttgcattttagatctgtcattctgatggtactgtagagtgtggattaaaggagagactgaaaatgggagaagccttgaaatagcccaggtgacagcttaaatcaggagggtggggacagggaaggggaggcgtggtctgactagagaggtatttataaggtggaattaacagaatttattgtctgattagtgaaaaattctgtgttgctttgctcttttaaaaacatgcatatcctacgtagggtaattatttcatctccaacatctctgtggctgggttccaggaaaatctaccaggctgtgcccttcattgggatctcctgatttgcgctattcaaacccaagcagaccctgtatcttatcagcacttcaaacctgcactgtccagactgaatctatgctcttccttcctaaacctgaatgtctcaaccctgaatgacataggagccataggtcaggtttagaattttctaaggactttttctgaaagcaactggaatccactaagatggaattcttaggaattcctaaaagtggaaagtaaagatttgtgttagaaagattgactatagagaacaaatgggagggagcagtggcacagtctgggaggccaggtaggtggctcttaggatgacccacatgggtgaagagtttgtgttggtgattgacctgagcatggagaaaactggatgaatttgaaaaagacttcagtaccaggaccttaaggccttgggacgacttcggcattgtggagtatacgataaatggaatattcaaggcacttaggtttgtgtgtgaacagctatgtgtatggtgttactaagtttcagatgggaagagcaggcttgggcatgccaagtcccacggtatgcaagaagagctgtccagtatgtagccatagacacacagctgcagctcaggtgagagatgcctatttgaaataggcatgggagttgttagcatactggtttcatttaagccacaggaggaaaggaaataggtgacaaggaaacagatggctcaggtcagaaattttagaagggcagataaaggatgagtggtttgcaaaggagttaagatgtcttcaatcaacagctcgggtaacactgtttcaagaggcagtgtctgctaagcaggctggcatgaagtgagaagatcacagtgcaggcaggaccagcatcctctggagtaatcgatgaggaggccattagtgatgtagacgtagagcagggccaggggagaggagggaggagttcttgcaatgacttgagctgcaattggaagggaatgaagagtacagaacacatatgagctttggctactaaaaggaaaaatacacacagggcagttggtggaggaggttgtgccactccaaaatgcttcatttttttggagaggaaacacatgagcagtgttaaatttactgcagcaaaagtaggtcacatgtgctgatatgtgcatcttcttcctcatctttggaaagtgaaacccatctatcctttcacattcaccctctgccggtggtccaaagccctcaacaatttgtcctgtatttacagagtgaaccaaaaatcatcaaaggccatgtgttgggcctgggttttgtttttaaaacttttggcatcctacaatggtttgagaaactgggataacggtaacgacaaccataagagcaacaagacaggtttggttgaggtttgacataaaggaaactttgtttttcactaattttcataaattaatgctagaatagaacacacaacatcatggtttaagagtgactgttctgtcaaaatgagccttcttggcagtactatgaaaacctgttccaaaccacagttcagtgatgctttgctttctaaggagaaagcttcatactgtggagtccattgaaataattcttaaactggagtttcaaattgacttgtgcattcagaaaatgctcaagaggtcactgttgaaatttcagtcaatatgtcatctccacatatatttgtggttgcaaaagcttattggacgcttctcgatactttaaaacaagataagaatgcaaacggaaatttgagacaaccttgtgtgaatcaatgctgcattctaactactctaccattttggttagttcagcttaacacagtcttttgctaatagaaaggggttgagagaaggataactaaaggcaaatagcttcagggtcttctgaataaggaaagatgaaagagacttgagttattgattatctagaaatgagaagtgacaggaaaggcaggcacaaattaacgaatgcttttgtggaaatcaattggccattctccttcattcaagttgttagtagaaaaagaggaagagagtcgttgaagtgggccagcaacaaatataagattaaggaaagacattcctcctgctgcctcctattttaactatattaaagtcattgctgcaaagtattattgggggaaaaatgccattcaaaggttaaattatttcctacatgtctagttcattattctctactctgaacaactttacttattaggtttatctttggagaaccgagttgagattgaaccccttccacacagcactcatgagctgaatttatgcagggcaacattttgcttcaccttttccattcttagggaatcctaaacaagtcttaatttccctttcatctcacagtgatacctaaagcacatcacctgtgatgtacccacaaaatcagttcaagtgaaattcagtaaatcatggcctggcatacttggccagtgtgagctgtgataacaaacacagtcatgtaggttggacagggaggcagcacatccctccatgatcattaggggagactccactgctacttatgggaccacagggtcaatcctagggtctcttagctactttgcaatttttatcatcacttaactcttctagggcttggtacttaatttcctcatttgaaaaatgaggccaatgataccatcccaattcatttcctaggtagctgtgaaagtcaatcaatttattaataacttctccttaccgttattctttcctttatccattttgcagtcacccaactatacaatcagctcttactgagccactgcaggagacagtgcaggtacaggcactgcccgtggcatgagactgtggacgtgaaaggacgtattttttgactgaaccccagtctgcagtctagtaacaacatgtgaaagctcttggaaatgtgtgatgcaccatgcagattgagagactagggcaggaatggagttactatgctcttccccactttaatcagacacgttggtaactttgggtgtttttgtttgtttgtttttggagatgaagtctcgctctgtcacccagactggagtggagtggcgtgaccttggttcaagcgattgtcatgcctcagcctcccgagtagctgagactacaggcatgcaccaccacgcccagctaatttttgtatttttagtagagacagggtttcaccatgttggccaggctggtctcaaactcctgacctcaggtgatctgctcgcctaggcctcccaaagtgctgggattacaggtgtgagccaccgtgcccggcctttgggtgtttcttttatctgacccctctgatttatagtaagtgacagaggctggcatctgttcacaagacttcttttctatcatttaaaaaataattagttttatttactaatcctacccccccaaattttgtcttattaaaaatgttcattatgacagcacataactgaatcccctcagtattttgtagatttatttcaacactttgcctcttaactttctgaaagtctggttctagatgtaactcttccattattgttttggtctattttgttaagtcaggtttatggaggtataatttacatacagaacttatttttaggtgtatagttaaaaaaaaatttgacaaatgagggacccaccatgtaagggacccacaatgaacatatagaatatttttctcactccaaagagttcccttgtgtcctttatagtcaatctccttccataatcactagcctctgtcaatcacagatctgatttctgtttttatagctttgccttttccagaatgtcatgtaaatgaagttgtacaatatgtgatcttctgagattggcttttaaaattcaacatcatgcccttgagatccagccaagttgttgtctaccaatgcttcttccttttaattactgagtggtgttcggtggtgtggatgcgccatggtttgttgaactattcacctattgaaagacattccggttgattgtagcttttgtctattacaagtaaagttactatgaagaatcctgtactggttcttgtgtggatgtaagttttcatttcctttagtaaatgttcaagagtgcaattgctgggtatggcaagtgtgtttagttgtttaaaaagattggctttcattcttcagcatgatgcatctggcaatcatccatgttgatgcatatatcacaggtttattcatttttattgttgagtaggattctctttgatggatatatcacagtgtgtgcaccccattcactagtttgtgggcatttatttgtttccagtttggggctattatgagtagagcctttataaatattcaaagacaagtttgtttgttttgcatgggcgcgtggttttatttgcctcaggtaaacacttaaatacttaggactgggatttcccttgtatcttgagacactgaaattcttggcctgccatggaggatttcactagcagaaatcataaaagtgctgtactcaaaccattgtgatttaattattaagccatgggatgggaaatattaggtaaaccattctactttcaaaaaatctcaactgggcaagttcaacacagaatatttctgggctttctccttccactgtgtccattatgtcctgggcccagtttcctgggtccagcctggggttcctctttctttacctggctcttgagtttcggatcctcagctctgagacggggagaaattcctgagctcattctgcttacataataggcttctggtttccatggctatgtggtctagcagtgtcagcccagggatgctcccacagtgtcacttttgatgtcttccagtttctgatttccagggttcttacactcccaccactccactccctttccaggtacctggtctaaaatggttggagcatttattctaccatctatctgtctgtctgtctatctatctatctatctatctatctatctatctatctatctatctatctatcatctgtttaaattactgcaacccatgagctgaaataataaaccttaatcctctttaactctgttaacacaatgggaaagatttgctctttaaataattagtagcaatggtgttttttaatggaagacccatagtctgtttacatttcaaactgctttgtaaagaagaaattcttaatgaactcaagctccaaattttaattaacagtctctaaaatgcatagcatttaacatctttttttttctcattttcttatctaacattcccttatcttcatcattgattcaagcataaatgacatttcaaaagtatatttaaataattagctttcggtagtgtcaatgaaggccatagaaagacaaatctgtgttcaaccctcacacccatgaacaggccagaagacactggtttaaaaatatagtctggagtatagtctgaaaatatttttaggatgtttggttaagagtgtttgatgaagttaatagtggcaattttattccaagagtataagtaggataataccagcagcattctttactggttttatgaaaatttagaagttgcagagtgttgttttgggctggtttctagcagttctgtgccttatccctgcacccccaggaaacagtagcagagacatcaggggtggggacaagacaagaggcagtggccatgacaggtctcctgagtcttccttactcatgatgagggcttactttggaccagatctaagctaggtctggaacatcaggccaagactgatcatataataaagctggtttggagttaaaaccaaacttacattgataagatctgacacattttcatgctacttacaatagtatttggtaaaagagattgagtcatcaatagtaatcagtacacataaaagacggtcataaatgttctttaatgaagtcatgtttcagcagttcttttcttgattccccagtgtctacgatagtttgcagtgtcgaaaatgacctctacaccttgtaagtttggtatgtacgctgtctcctgtagctttaaaaaggctctcaatgtgattcctaacattcagagaactcaaacttgcctactctgtgccccgatctccttccaccaacctccttccaccaacctccttccacctcccacaaaataaggagtatggtctcgttcatctacaaggattctggggaaaagatcgccagtggttttccccttaccagctgtgactttgctgaggaaacatactgagttgcagaagatgatggatcaatgttgactggaattacatggagggtgatagatcaggaggaggctatgagtgtctgaaaggaatgcataatggcctcaggtggcattaccacccaacactgcctatcccacctgttttatcttccacatctaccttgtacattctccacctttccctatgccaaagacttgacgctggatccacagaggaagcggaatcagtacctccaagtttcccagctcagactgaacagagcataagtagtcctgccccagggtgcaggaaggtggggactcaagagccaggtgggaaaccctcttagaagtgcttacaaggtatgcacttactcccagccctgcctcagccctgcccaagtttcaggctgactgtaggtgacccctgtcctctggggcactacatttttcctggttccttagtttgtgatcacatgtctgcatgaggagaaagtggtagctcccatgaaaggaaagtaagaaaaaggagggcttttcttgtttgttagtttgattttctttttttcccttgttaaaattttcttaatgtatctggattatatcatccatgatgtagtttttagcatgcttttctttctgtgttcttcaattaatttttaacacatgaccaaagattttagaggcacacagatgaaccacataaccccattttattaatatattcagaaaaatattttagttgactcaattcaaactcagctatgaaattgttgtattaaagggtagtaatcaaagttatggaaaaaaatctgttatgcattaagggaattcctcgtgtctctcttcaactcatgattaagcaatttatgtcattctgtagaatttgtaaattggcattaagccttcatctttgaatttcaaaattttagcctttatcaaatttcagatcaaaaggcatgaaatctaacttgaccttctccaagcactaaattctccttccatctgagtgaactgagcactatatctagtcctctcctttagatataggtatatttaggccattgtgctatgaaagtattctgtgactaatctgtcaaaaagagacaatattggtaattttgacattatttagaaataattaaatgcacccctttgaaaatcacatattgcaatattttctcatttttacagctttaaaatatataataggatgaaacttctgcttgtgtatataaacttacagctagtttaaagaaactgtatgcagctaatatctgtaaactattccagttgcttgatggacatttcctacttgaagcattgtcagcgaacactatatatatgtactctgatacatatgaattgataattgatacatttgtatcacagtcatatgcatgcatatatttgcccctcttctaaatccatggcattttcccttgtgattgatggttttacctttattcttgtcactgcagtttgaaagttcagagacttttctttctctaccttctgactccactttctcccttgtcacccagtagggcaattcaccatctctcaaaggttctttctcttcataatccctatcatttaccccggcattgcattttttttgttcgaactcagactctcctaactttcacccagaattagtgcatatgcttcgggaagatgctccctaccatgtctctctatgagctgctctagaagcctccagatttttgatggactccactatttttttgtaatgctgtttgcaaatctttaatggttcctgtggcagaactgaaaatgatgaaactatttttactctctcagaaatgtggagattccaattcttgttttagctttattttcaacttttcacccttatgtatctttgcttctgccaaactgataagtgcttgaaattatcctataacttctgccttttttccatttttttctcaacttaaaattgagaaattttttctcatctttgaatttaaaatttttagctgtgattaaatttcagatcaaaaggcacagaatctctaagtactaaattctctttatgtatgagttaacttagcactttgtccattcctcttttttagatataggtatatttcagtgactatcttctttatcctacttggtaaacagtatcaatgcaaagtaacttattaaacttgtaaccatcaaatgtctaaatacaaagctttgcatatagcaaattccaaataatagatttgaatgattgaatacattagcagatgaatgaatgattggatacattagcagatgaatgaatgaatgagttcctttaacatgacaggacccttgatatgctctgtaaatgcaactgtaaccaaaacagagatggcccctgtattcatgaagtttatggtctatagggcagagggaaaggaagaatactgattaaagtctccctttcatcataagagcataattatgtggtgagccaactgctttacatcaacttttcagatacattcagatattaaaaagagtacagtgcaagaattgggctcaatgggccataatgggacaaagatggtcaaacttaacttacatgatccagtaatatgctccctggtccttctctggctttaatattccctgggcatggtcagtggtgtctccatatcccaggaggagaagcactgaatactgattttcactgcctctcaactctttcttacatgtgtgcacactcaaccccatggctatgtcttcatgaccagggattttatcttctacctttttatgtcttagttcacagccaagtgcagagaggacattcaatgaattccttgtttatgaagaattgactgactgaagggaattgttgttctcattataagcacagcacatactgaacacaaaatatgaagctttctgatatcagaaaatgtattatttaaaaataaataatatataataaatattctatataatacaaaatataaactcttgtcctacttgttgaaataagctatacattcaaaagagggcagaactagttatgccaaagacatatgtcctttggcacaaagaaatcgatctttatggatttttatattacacgagtcacttggttgccactggcagaaatcaactcataatggtttaaatacaaaagggaatgtattggcttttatatttggaaaatggcccttatactcagaaaatctgaatgccagtggcttcatgtattgctggatcaggggtcaggggatttgactgatattttccattctaattctctctctctctctctctctgcatctctttctctctctttttctgtctcagaagagattgacattgacagccatgatatcctcatgggctgatatttaaacaacagagagggcattaaaaaaatattccagtgtcccaggaaggggaacatcacacaccagggcctgttgtgggatggggggaggggggagggatagcattaggagctatacctaatgttaaatgatgagttaatgggtgcagcacaccaatatggcgcatggatacgtatgtaactaacctgcacgttgtgcacatgtcccctaaaacttaaagtataataaaaaaaattccagtgtccatttatcaaacttaaaggaaagatcctgaattgtcccactagggccaggtcctacactggaatcagtcattgattgtcagtgtcagagccattatggtgggctcagcccagttcagatttccagtcccgtgggcagttgacttggacaatgtttctactaactttcaggaccacatggagtgacagatatgaggtgcttctccaggggaaggatgctcccagaaaaaataatggaacactctagatggttaatgaaaatggcagaatctgtataatggagtagcaggaaaataggaataaggatggaagatatatggaaaaagctgactttattttgaatacaaattagtattaaccttcaataagcaaggtagaaccattgactatttctataccatttctataccattatttgtataccattattctgaattggtataataacaaacttgtttttaaagtctacatagtagagtgaagtggtgagagaataaagccaagggtgtttaatgcaataattaagacttgcaatgaggagggttcttatgttggacacagagaaacttatctgtgaattggtttctgtgttcttgcattgatctttaaattgaccttgcagaatttctttcatctgaatgtgtcttagaaattaataaaaagcggaatgaaaatcatgaaaaactataaaatatatgtaaaacctaaaaatgacaatagagattttagcatcttatttttcccaaatgtatttacagtgaaaagaaaaataaaacaggcattgtaaagccaaaatttaatattaaatgtgaactttagttttgtctcaggccttttagtactgaaaatgttttatatcaaaaaattaaatagcaaatattttatatcaaaataatattttaaataaaattattgtcaagacacatgaaaatcatgcatttttttcagttttacttgcaatcatgaaatttaagttacacacatacatacatacttttaaattaaaaacaaagaaatttaagagaaatcattaatataaagtatatgctcgttagtcttgtatctaaaatgtgtaatgttcattttgcaatgttgcttcagactcagactaaaggcatccaggaagctgcctgaatggagccagcaagggcttctgtttctataggagggaatcctgtctgagactgtctgagcaccagagaatttgcctattaaatacctttctggcaggaacagtgagctgagtctcttccaaccggaattgaagatgttgatcaaagatgaaatatgtagatatggattcagagcagaaagatcgttcaacatttgagggttcaaaaatgtatatttagggtagagcatctaaatttattttactgagtataaaaccaaagagaacttctcttttgggatatagcctgtttgggccaggaatccaagcttgtctgagactgtcttaattccaaagcatcatcctctcttggaagaaatagagcaacaatttgagctcttacatcttgaagacgctcagtagtggaggcatggtgtttagaatggcaggggcatttaggaaaagacaggttctggtgtgcagcatatgacgcttcatctgaaggcatctggaaacagccataggaggcagttctgatcttaaagggccagattttttagagaaattgtcatctgataagtcagtagctacgatgggatgtgccagacccttggctgatgcttcacatgcattttatcattggatcatccctgtgaggtagacacgagacacagagaggaaaaggaatctgcccaaagtcacacaagcaataaacggttgagtgaagatttggcactgtgcagttggttcccagggcagggcttcaaatcagcaggctctccagagcctggatgtagctggctggtctctgcagggaacctggccggtgggtgccctgcagcactctgtgcgctggggccttagcacttggatatgactttggagctgtctgtggcacaacctgcagggcatagtacactctgtcagccataggtttgactggacagctgggtctactgggataatgaagcagaaacatcacatcatgaggagaaacttcagttttattattaccctgaaacgaaccctagaaagaattatgactgtaaatctatatccactgaaagcttttgatcatgaccaaatcacttgttgtttacgaaatatggtaagggaaatagtaagtgtcagaaagcatagatggatgtgcaaaaagtaaatataccttacattatacagtaatttttatgtcatgtgtattggtgttatttccattttaaagagaaaatacttactacattctcttaccagataaacatgcccaaataattggatggaaacacaagaaatggcctattgatacataatttaaagaattaagagatagctgtaaactagtgaaatgaaaaatattgttgactttcttgagaagaatttaaattatttaggtttatttctctgtctttcagagaagtgtttaggtgcaggattatgtgtagaactaaatcctcaaatattttagggcatagcgtctatatgttgcacacatgtaatttctttcaactatttattgctctataaagagggatatagacctgcagcttgattacaaggatggtaaaatccaacacattttaaagacttcagtgcttaaggaggggttattttttttaggctctgggggagtaggttgaaattgattatactcttgtctttgagaatccacattgttcctttgtttcatcgtcattgtatatgcagtaaaaaaaaagtctttggaagagtgttataacaatggattctgagaataaaacttctgctagaggagttgttaggagcacagataccaatgtgtgtgtgtgtgcgcgcgcgcgcatgtgtgcgcgtgtgtgtgtgtgaatgtgtctgtgtgtctacagcacctgcatgtaagcatgctaattcctgaacaactatcttttggcctctcagaattcctagcaaatacttttgtaaaatagggtaaacaataagtttgtgactacattatttgtgaaatacttcagctatgtatatatgtttttaaagccccataatctagctgcttgtgtcttatcactttctttcatgttcctatagtggtaagaacacataacataaaatgtaccattgcaaccatttttaagtgtacagttcaggaatgttaagtatattctcattgttatgaaacagatttcctgaacatttcattttgtcattctgaagctctgtacccattcaacgtcaactctcatcttgcctcagtccctggcaaccatcattctactttctgcttctgagtttgacctctttagaagcctcatataagtggaatcctacagtatttatcttttagtgatcagtttatttcacttaaaaagtgtcttcaatatccatccatgttgtggcatgtacaagaacctcttccactgtaggctgaataatattccattatacatgtataccatgttttgtttatccattcatctatggacatctgcttccacttcttggcaattttgaatagagcttttgtaaacgtgggtatacaaatatctctccaacaccctgctttcaattattttgatgtatacccagaagtagcattgtcagatcatatgatagttgaagttttcattttttgagaatactccaaactgtttttcacaatggctgcaccactttacaatcccaacagtgaacaagtgttacaatttctctacatcctcaccaatgctttgtattttctgtttctttgatagtagctattctctcagatatgaggtcataacctgttgtggttttgacttgcatttctctgatgatcaatgatgttgagcatatctttatatgcttgttgggaatttgtatatcatctttggaaaaatatctattcaagtccttttcccatttttaatcagattatttgattttttgttgctgagttctaagagttctttatgtgttctagatattaatctcctattaggtgtataagggtaaatattttctcccattctgtaagctgccttttcactgtgatgcttatgtacttttatgcacagaagtttttaagtttgatgtagtctcattcgtctatttttgctttttctgtctgtgcttttggtgtcatagctagaattcattgccaagtccaatgtcataaatgtcataaagattttttccctgtgtttttttctaagagttttacaattttaggtcttcaatccattttgaattaattttgtatataatgtaaaataagtccaattttatttttttgcatgtatgttatttttgttcttttattattatttttcagttttgaaaactggtatcatttagtatgttcaatctttgataacatttgtttgtattaaaatatattcttcccccggtgtaaaacatgaatgttgttagaaaatggaagaggatatatatgcttatatgcacacacacacatgcatatatatacatatatatatatgtgtgtatatatatatatattcttatatagactgtgtcccctagaagcagagaatgaagagtcaggtgcacattcctatgtattgagacagctcaacagagaaaacccataagggagtgaaggaagcagggcatagaacagaaaagagcagaaaaactatgtagtctttggcagagtctattatcattccaatccactttgctttagggtacaagtcacagcatggagtgtctctgcttgagtcaaggggacatgtttttgtatccttgtgtaggtctctcagtgactatggcttatgggatggggttagggtattccattccctaggaggctgaggctgacagggcaattgtctagaggaggggacagctgtgaatccttccagccagtaccaaggtgacacgctttggctctgtgttcccacccagttctcatcttgaattgcattcccataattcccacatgttgtgggaggaacccagtgggagataatttgaatcacgggggcggtttcccccatactgttctcgtgctaggaagtctcacgagatctgatggttttatcaggggtttgcatttctgcatcttcctcattttctcttgctgctgccatgtaagaagtgccttttgccttccgccatgattctgaggcgtccccagccatgtggaattgtatgtccaattaaacctcttttccttcccagtcttggatatgtctttatcagcagcacgaaaattgactaatacagtaaactggtatcagtagagtggggtgttgctgaaaacatacccgaaaatgtggaagtaactttggaactgcataacaggcagaggtttgaacagtttggagggctcagaagaaaacaggaaaatgtaggaaagtttggaacttcctagagatttgttgaatggctttgacaaaaatgctgatagtgatatgaacaataaggtccaggctgaggtggtctcagatggagatgagaaacttgttgggaactggagcaaaggtgactcttgctacgttttagcaaagagaatggtggcattttgcccctacactagagaattgtggaactttgaacttgatagagatgatttagcccatctggtggaagaaatttctaagcagcaaagtatttaagaggtgacctgggtgctgttaaaagcattccattttaaaagggaaacagagcataagagttcagaaaatgtgcagcctgatgatgcgtagaaaagaaaaacccattttctgagaagaaattcaagctgactgcagaaatttgcataagtaacaagcagccgaatgttaatccccaagacaatggagaaaatgtctccaaggcatgtcataggtctttatgatagccgctctcctcacagacccagaagcataggaaaaaacaaaggtttcatgggccaggcccagggtccctatgttgtgtgcagcctagggacttagtgtcctgcgtcccagcctctccagctattgctaaaaggggccaaggtccagctgggcccatggtgtcagggagtgcaagccacaaaccttggcagcttccacatgatgttgagcctgcaggtacacagaagtcaaaaattggagtttgggaacctccacctatatttgagaagatgtatggaaatgcctggatgcccaggcaaaagtctgcggcagcggcgtggccctcatggaggacctcagctagggcagtgtggaagggaaatgtggggtcagagcctccactggggcactgcctagtggagctttgggaagagagccaccatcttccagaccccagaatggtagatccatcgacagcttgcaccacacacctggaaaagtcgcaggcactcaatgccagcccatgaaagcagccaggagccggggctataccctgcaaagccacaggggtggagctgcccaagactatgggaacctacctcttgcatcaatgtgacctggatgtgagacctggagtcaaaggagatcattttggagctttaaaatgtgactgccccactgtattttagacttgcatgggttctgtaacccctttgttttggccagtttctctcatttggaatggctgtatttacccaatacctgtactagcattgtatctaggaagtaactagcttgctttcgattttacaggctcataggcataagggacttgccttgtttcagatgagactttggactgtggacctttgggttaatgctgaaatgaattaagactttgggggattgttgggaaggcatgatttgttttgaaatgtgaggacatgagatttggaggggctaggggcagaatgatatggtttggctgtgtccccacccaaatctcatcttgaattattctcccataactcccacatgttgtgggaggcacccagttggagataatttgaatcatgggagcagtttcccccatactactctcgtggtagggattaatctcaggagatctgatggttttatcaggggtttccatttttgcatcttcctcattttctctcgccactgccatgttaagaagtgccttttgcctcctgccatgattctgaggcctctccaaccatagggaactgtaagtccaattaaacctctttttcttctcagtcttgtgtatgtctttatcagcaacatgaaaatggactaatataccaggtcagcgggggatgggtaaagggcattgggcaggacatcaatagtgcccacttccatattccaaatgtctgagatcttcgatataaagcatctcctaaattgaaaatataaggagaagtgattgaaacataattcatccacatcagataaataaatatacattcttactcataaatgataaagtcaattttgttttcctttacagaaaatattccaacaattattttatttccttctgttgattcattttccttttggaaaaaaagtagggcaataagcagtttatttccattcatgcccataatagattcatactgaacctttcaccagaatccgcttcattctcagctttttgagttctactcataaagggtgaataataaccaataaatccagtacaaaagttaaagaaaaagcaatcagtgaaaacaggtactccatcctaattgtcccgtttccttggtgctctatggagacagctgactcagcaccagacagcaggctgccagtgtccaccacacatccctctaagaggctcacctaagaaggcacatacgcctgctgcagctgaagcttccaggcctcctatgttgaatatcatcttgaacggtcttaatgaaccacataatttcatctagaaatgttactacatactgtagctacagaaattgccaaaatatttttctcaatagctgtaatattttaattgtaatcataatctgaatatgctccctccattgtctagctctttggacctctgtcaccaatcaggtggctgtgtttgtgtagagcttttgctttgttctgtgttctgttccactggtctaagtgtctattcctctaccaaagccacagttaggaaatgtcgaagagagaaggtgacctaatagatttatatcctccaaaaatagaggagaagttatgaaaggtttatttttattacctgtaatttttttaatgaatgctatactattttgtgtttgtttaattttatctgcagcatatttcgagaggtggaagaaatatatatcttggttgtaggaaagatgattctacattttattaaatatttccagtttgctttttaattgtaatgacatttgtaaacttaatcaatgtttttttatcttcttacattttcctatatgttaataaggtggaacatcttttgttaggtttgaaaatgtagctctcttcttctgtgtgtattttgacttgcattcagcaaagttccggactatcactcctaatagctgactcatagggtgtgttggtttctctatgtagctaacagtatttacaataataactgacttttttcctcttcctacccacattttatgctccttatatatttttctatttttttctatgctaagaccttcattttgaggtagaataaaagcagcaataaagggccttctttttctaaattttaaacacaatttaatgttttaaaataagccaccctttcattctgctgacaaactatacattcatgggttcattttgctaatatgtatgcacgtaggctatttgcatgtgtttatacaagagattgacctgtaatctcctttttgggatggcctcattttggtatcgagcttatgcttgtctcagaaaatgaactgaggtaattttcttctttttctattgtacgaaagaactggatgaaaatgcaggttatctctgccttaaagacaggttaaatcatttgggtcattttgtttgtttgtttttatttctggtctatagatttttaaaaactgatttaatttatacaatgattgcataaattggttcattttccacttcttcttgagtcactttttgtaagttatattgttctagaaattgtcaatttctcacgtctttcttcacctttcctcttttcttgtttcatgtctattaattaatagcatcattttattttcttccttcttttttttgtttcaactttgtgtgtgtgtgtgtgtgtgtgtgtgtgtgtgttttctaaattcatgtgccagatacttcgcttattgactttaaaactatattcttttctaaaatgtatttaaagttaataatttatttctatgaattgctttagttttatccacaaaattgtgatggatctcctttcatcaatggttaattctaaaaatgtattatttctgtgatgttttcttctctgaaccatgctttatgtagaattggctttgtaagtttctgaacatatggggaggtatggtttcatttctttagttgatattccattttcaattatgttaagaaaacgcctgtgtaattttggttcctcagaatttattgagatttgctttgctttatggcctaagagacagttaatatcataaatcatctatgaattcttggaaaagaatgtttcctgcaaattgtctgcaagtttctataaatgtacttagatcaaattttctgtgctcttagtaatgttttgcctctttagcaatcacagagagatttgcttaaaaatcttgaacactgagagtaccatggccacaggaagatttttattctagatgacatggggcatttccggtagttgtacagcagaataaatttacatattctttttttttttagttcattttcctcttcactttactctttatatttctagttagttataacataatgtctcgacatcatgacacagtgcatagggtcctccaaaccaaggtgcatggaaaccatgtgtgtatatatatgtgtgtgtgtgtgtgtatatatatatgatatatatatgctatatatgatatatatgatatatatatatcatatatatgatagtatacatatatatcatattatatacatatataatacacatatatacacacacatacacaaacacatctatttagatgtctaggtatagatatataactagatgtcagatatttcctggctttcaagtttagtcctacagaggtacgcactcgctgagcaggggcttctggccataaacttttatctggaattgcaggataaccatatatgtagaatccctgccacctcccttgcccccctaaaaaagtgtaacactggagataagaaatccattacaaagatgagcttcatgacactgcctcaggccagataattttgtaaggaaaagcagttagatgggaacacggtgtcatcttgcatttctgtaagagcaggactaagcatttatctgccacatgttaagtgctggattaggtcctaataaagagtgtgatatttcttccatcaacataattgtccgttctgcaatttcattcaacaacaacagcaaaactattgactacctcctgttccagaggctgaaagtaagcaggggaagaaacagcccaagttcctgcctttatggggcttactaaagcaataagaaaatatatagaattgtattttaggaaatcgattagtatagatattagtataatgtacggttgaaggatagtaattgatattgtaggagagccgtgtgtggtggtaaatgcctgcagtcccagctacttgggaggctgaagtgggagaatcacttgaggccaggagtttgaagctgcagtgagctatgattatgccactgcactctagcctgggcaacagagcaagaccccatctctaaaataaataaataattagataggtagctattgtagaagtataagagtgataaatactaaggagaaaaataaagcaagcaataggaattgaagtgtttttcaggggacatttgccttgttaaaagggaattttgagtgacccccatgaggaagggtatctgttgaccagtctttagctgtcagaagtccacttgttccaacgtatagtttaaatccattgtttctttgttgactttctgtcttgatgacctgtctagtgctgtcaatggagtattggagtcccccactatcattgtgttgctgtctaatttcttaggtctattagtaattattttataaatttggaaactccagtgttaggtacatatatatttaggattgtgatattttcctgttgggcaaggccttttaccattatataatgtctctctttgtctcttttaactactgttgctttaaagtttgtttttttcggatataagaatagccacccctgcttccttttggtgtccatttgcatgaaatgcctttttccacccctttactttaagtttatgtgagtccttatgtgttaggtgagtctcttgaaggcagcagatagctggttggtgagttattctacattctgtagttctgtgtcttttaagtggagcaattaggccatttacattcaatgttaattttgaaatgtgaggtatcattgcttacatcatgcttgttgttgcctgtgtactttggttttgttttttgtttttgctttttaacttgtatttttgttttatggatcctgtgtgctttatgctttaaagaggtcctgttttgatgtgtttccatgatttaaatctccttttagcagttcttacagtggtggtttggttatggcaaattctgttagcatttgtttgtctgaaaacaactgtatccttccttcatgtatgatgcttggtttctctggatacaaaattcttggctgataattgttttgcttgaggaggctgaagataggtccccaagcccttgtagcttgtagggtttctgctgagaaatctgctgttaatctgataggttttctttcttaggttacctggtgcttctgtctcagagctcttaagattctttacttcatcttaactttagataacctgatgacaatgtgcctaggtgatcttttttgtgatgaatttcccaggtgctctttgtgcttcttctatttagatgtctaggtctctctcaaggctggggaaattttcatcaattattcctccatatatgttttccagtttttcagaattttcttcttcctcaagtacactgattattcttaggtttggtcatttaacataatcccagacttcttggaggctttgttcatattttcttattctgttttctttgtctttgttggattgggttaatttgaagactttgtcttcaagctctaaatttctttcttctacttgttcacttctattgccgagactttcctgagcattttgcatttctaaaagcatgtccaaagtttcccaaatgtttgattgttttttctttaagctatccattttcatgaatatttcccctttcatttctcatatcagtttttggatttccttgcattgggctttcactttctctggtctctccctgattagcttaataactatccttctgatttctttttcaggtaaatcagagacttcatcttggtttggatccattgctgatgaactaacgtgatttttttgggatgttgaagagccttgttttgtcatattaccagggttggttttctggttccttctcatttgggttcctctgtcagaggaaaggtctagggctgaaggctgttgttcagattcttctgtcctatggggtgttcctttgatgtagtactctccccattttcctatggatgtgacttcctgtgagccaaactgcagtgattgttgtctctcttctgggtctagccacccagtgagtctacccagctccaggctggtactgggggttgtctgcacagagtcctgttacataaattgtctatgtgtctctcagccgtggataacagtacctgttctggtggaggtggtgaaggctgcagtggactgcataagtgtccttggctttggtggtttaatattctatttttgtgctggttggcctcctgccaggaggtggcattttccagaaagcatcagctgtagtagtgtggagagggactggcagtggacggaaccctagaacttccaagattaatgccctttgtttgccactaccagggtggatagggaaggaccattaagtgggaacaaggctaggtgtgactgagcttagactctccttggttgggtcttgctgtggctgctttgggggatggtggtgagattcccaggtcactggagttgtgtacctaggaggattatggctgcctctgttgagtcatgcaggttgtcagggaactgggggaaagccggcagtcacgggccaggcaaacctaagggctgatctcactcccaccgtgccccacaaaccaacagccctgagtctgttcccaggtggagggcaagatgggtttgaaaacttgcccgaggctatccaacttccagctgcaagagaaaagggctttagttctttccctgcctgtgaagtctgcatgcctgattcacaccctcccccgagttctggccaggatgcttctcatcctgttaaaaaatgttacaaagttcagctagagaattccttctccctctggccaccctcccaatgaatccctgtggtgccaggcaggaatgggctgcttggggacacagtgagctcccaggacctttctgctgcttcctctacccatgtattttgctcagccctctaacttgactcagccccaggtaaagttggaaacttctcccacagacagaccttcaccttctccagtgggggtgtgtgtctgggaaaggagggtctctctttccctcttctgcagttggggcactcatagtatttgaggtttctcccaggtcctgcaggagcagtcctcttctttcagaggatctgtgggtcctctcgggattgctggtttcttcttgaagtcaatctggagctaaaattcacaatgcaagcctctacatgctgctctgtccgcagctgcaatccagtcctgcctcctgtccaccatgatcccctgaatccctgtgttatcttatagattctttctttattttttttttgagatcaactggtcatattatatatcttatcgattcatagacatatacgtacatgacacagctgacccacttggacttagattaaaagaaagtcaaaatgcgcaataaattttcagattacaaaagaatcaatttataaactaatgttttagatcaaaacatggggaattatttagcaaaaatacattaaaaatcaagatttgagacatgaatggacttaaaatttaacaattatggtctttgagttttccaaatcataaaggaaaataagaaaattgatttaagagccaccctctacattccctcttgacagcctgtgagggaaaactcaatgaatcatgatctgtcactgtggattttttaaaagttaattgaaaatttcaccaagagacgcttcttaagagttacaaactagaggactgctatgtttattcaattatcctcagccatcaactgctggctaatcaacacatggcactctgtgatgttatttgttttaattctttaggcttttttttgtggccctgttgatcccctgggcacctaatgacaagccagaaaagtcacagaagtcaaagtgtcacaagtatcaaagtcaatcaatcaagccctgtgcagttttctacacagatgtgaaagcagaagacagttatggttctttattaatgagctttctcatacaatctgtttctggcagtgatcatagcttttatcaaataagtgtactccagagcaatttgtcatcgtttcagaaccactgttgtctatttgcgtttaggttactggacagggaatattttatgtatagttagttgatatttctcacatcacttttatgaatacttatgaagagtcttatgaaaacatatgatactaaaacgtatagcttctgtcaaatgcaaataaatgaacacaaaatcccccaacatggcttctttttcttcctacatcctatgtaaaagtacttatatattcaatacctggcattagagaatcatggtgctttggtttgtttcttctctatggagcattttttattctgtttgtctaattgcctctttaaccttagacaagtcacaacctctctcaacttggttttctttatatgctaaacagggatgtttatgctggtgcacctggcggctgtgagaataaagacttggaaagtgtcacaagaaacagaagtggaaatagtgttgtcatgacttgttgttccttcaaaggaccagggcatctttccaaagatgaactatacccttagtatataatcttcttggatatggcatatgatcaaccacattttgtgcatgcatagttactttaacctccttgagacctgatatcataaatagcttaagaatatataaacacatctgaatctgtgtttgcaagccagcttctagaatttttaatgctttaacattgattttctgccaatagtaaaattttaacctagtggtaaatataagtgtttatacaattccattacaggtgctttgactggtgtttataggaagtagccttttgaaacaagggggatattttaagtttcagaaatgggaattcactttgttaatcactatataaataaaacaagaaccgtagcagccaaaattctctccacaattttgagaaatatctctgtgccaaccctcagtctttatacttaaccacaggtttcttggaaatgaatgtcactgatgatgagaaaaagagtttagcaataaattaatgaaaaatgtccactgtatcatataaggagttgatagcacatatattctcctgttttccccactctgttgcccagactggagtgcagtggtgcaatcctagctcactgcaaccttaaactcctgggcttatgcgatcccccacctcagcctccaagcagtcgggactatagccacatgccaccatgcctagctatcttaaaagtttatttattatttatttatttatttatttttggagagatgggggtcttcctattgttgcccaggcaagtcttaaactcctggcttcaagtgatcctcctgtctcagcctctcaaatcactgggattacaggcttcagccattatacttggcagcatatatattctattaccttaaattaacagcgtcatgattagtcatcatgatacgcaaaagcaaatctattaggttgttctgaaaaagtttggaatgattttatgccaacatttaacatgcaaaattagtattactcaattagaaggaacttgacacagtgatgaaatctggaggcttttgggatggattgaaagaaacaggaagagatggatggttagtaattgtgttgagcttaactacatatgcatgtctaattccatcatttgttttattaccacagaatcttgagaaacacacgaactatttttccccaatctataaaaagggctttggatttgcaatatcaagtgcaaggagaattgttgcatttatgacctgtgcaatggacaatataaaatcaagtgtgctgtggtgcacacttatagtggttataataataggtctggtgacgctccccttgcatttcttccaggttgctttcagctatgtaacgtttttcgatcccatgagatggaaatcgaccagtgcttgctagagtcccttccccttggccaacggcagcgtctagtgaagcgcatgcgctgtgagcaaatcaaagcctactatgagcgcgagaaggcttttcagaagcaggaagggttcctgaaaaggctgaagcatgcgaagaatccgaaagttcacttcaacctcacggacatgctacaggacgcgattatccaccacaatgacaaagaaggtacatgataagaaagaaggacccgttttctgatgtgatttttcatgattgatttttgttggtttgttgtttttttgatggagagatggggcagaaaagtccttttaaatattggaggctactatcttttaactgtttgtattattcaagaaaaaaatgctctttgcaaagaacatcattaaaagtcctaccacctagtaagataaaaaaatgtaaaaattgtggtgagattgtatttttttttttaaagaattagctatcagtaaagcaagtgagttcctttccaattgtttaattctaattgttagggaaactttttatcaatgaatttttttttctatttagaaaatttttatagagacagggtcccactatgttgaccaggctggtctcgaactccagagctcgagcagtcctccagtctcagcctcccagagtgcaggaattacagagaattgtttttcctgatgatgatttggggctatggaatttgttcatccttagctcatgctttgatagatgcagcagtaatgtcactttccccgactctcaggagtcaatttcttttctcccttaaagttgtttggcttgtggtatcatgtttttctaagattacccaatgcaaatctcaattgtcttcacaagactgttaaattttttcactttttatatactcttgtatgtgaatttttctgttttcctatatagaacccactttcccaagttcaaatgtgagataaatgttccagctctggatgtaattgttgtaattgtacaaggcttcaaagaaacagatataaatcaatttaccttgactggctctcaaatcagtatttggatgaatctaaaatgagcatcttcacaattcattactcacaatttggaatccaaaaagctccgaagccgttattttgatagctcatttagtggcaaaactttcactgacctacttatggtttataacctgttcagtttggaaaaataataaattcaataacatatgtgctttgaaggctttcaaatggggattgtggatctatagctaagaaaacctatagcacattatatacaataatagttatacatggtaagaagactcaagtcatttttttcatggttttgtatgggctttttctagttaaactgtaatattctgagaatttctgttttgttttttttttttttttgtcttaaactgcaatgacagtaacagtgaatctttgagctggaaagtacctaaaaacatttggtgtgatccacttactttacccatgaaggaactgaaattcagccattgtatcatattttctggaaagctgtctggagcactctgatctttcattttattattctcttctcacctatggctgttcattgaatggccatctcctctgtgagtctgtgagcacatcgaaggtagggagaatgcccattagggtcattgctccctcctgcccatctcataccttccagcagcattgagcaaaagagagtaaagtgattggttcttgttcaacacacagtagttgttacaacaaacttaaataagaaagcagatcttaaaatttaagccctattttgatttaaaagtaacaaaacacaaaaaataattggtgccaggtatggtggctcatacctataatcccaacactttgggaggcataggtggaagactctcctgaggccaggagtttgagacaagcctgggcaacatagcaagaccccatctctacaaaatattttttaaaattagctggacctggtggtgcatgcccagctactcaaggagttgaggtgagaggattgtttgagcctggggattaaggatataatgagccatgatggtgacctgcactccaatctgtgcaacagagcaagaccctgtctcaaaaacacttcttttaatgtattggaaatgttttaaaatttcttgtaccaaatatctacagtgcaccattgtgtttaggttagggttaaaagaaaactcatagtagtaaattactaactaaaaagccaagaagcagttattatataagttacgtttccccaaacattcatgtcatacaatctgaattaatgctttctaagcagatgttgtaggtgtgaaactatgcaacctagtttctggtggcaagctaggcaagagatgatggtggcttggacccaagcggagctagggtgtggtgagaaatagtcaattttaggatttatttttaggatagagctgacaggaaatgctgattacctggctatagggagtgtattgattttctattgctaccaaaacaaattatcacgaatttaatagtgacaaacagcgtaagtattaccttacagttctgtaggtctgaggtgaggtatgggcttcggtgagatgaaaacaaggtgtcatcagcactggttcaacaattccagcttccggaggccacctgccttccttggatcagagccccctcctccgtctccaacatcaacagtgatggatacggggcagggacagtgctccttctcacgcttcagtttgcctgtttctttgtccatccttgtatctgactgaatcttctgcctccctcttgcacctttaggggcctatgtgatgacactgggctctcctgggctatgcaggttcatctcctgttccagaggcagctcactagtaaccatgcatccctttctccagatcatcttgcatagccgcagatgtaactccagagggtgaaatcgggacagccaaaatgctccctactacagggagtgagaattccaggataacatcaagcttttggggccttgacaactagaagaatgaaatgccattagccacagtaggagtgcctctaggagttgtgaatgagatggggtggcatcctggctggagacgtaaattgaaaactcatgagcatatagatgataccgaaaaccccaaaagtggttgaagtgacgtagagaaagagtttaggtaaaacgatacgaagtctaagaactgagtcccaaggaattccaatattaataattcagtgaaatgaggtccaatcacaaggaatgaccaggaagaaaggatgaaaatgagggagggtgctttcttgggagccaagatgagttttcaaggaggagaaatttttattgatcaagcaggaggaagcctgagaactgaccattgcatttaggagtatggaggtgattagttttcttgacttgttgggagcaagaattttaatggattaggttctgtacagagtaggaaaacaggaatggacacagaaagtataaagagctctttaaaggaggtttctgtaaagaggagagaaatggaaagattactgaagagggaacagacgttaagagctttttttaatgatgggagaattaacagcaagtgtatgtgctgataaaaataattcatttgcatttctctaatgaccagtgatgatgagctttgtaggccacataaatgtcttctattgagaagtgtctgttcatatccctcacccatttgttgatggggttgtttttttattgtaaatttgtttaagttccttgtagattctggatattaaatgtggtacatatacaccatggaatactatgcagccagaaaatagaatgagttcatgtcctttgcagggacatggataaagctggaaaccatcattctcagcaaactaacacaggaacagaaaaccaaacaccacatgttgtcactcataagtgggagttgaacaatgagaacacacggacacagggaggggaacatcacacactggggcctgtcgggggatgggtggtaacgggagggagagcattaggacaaacacctaatgtacatggggcttaaaacctagatgatgggttgataggtgcagcaaaccaccatggcatatgtatacctatgtaacaaacgtgcactttctgcacatgtatcccagaacttgaagtaaaattaaaaataaaataaaaataattcatgtgagagggaaaatctggtgacactagagtaagagaaggcaattgatggagcaagcctgtgcacatgcatactgtgatgagttcagctgcccactggatgggcttggcttcagctgggatcacctctagcagtcattctcaatcctggctgtataacagaatcacctgggaagattttattttttaatttccatgtctaagaactgcccataaagatgctgatgtaatgagtcttatatggggccaggatggtttttaatggtgcctaggagactatggagtacagagagaactgagaacttctgatctagagaatggcagatgtggtatgaacctgtggttattctcctcctggttttgatactaatcaatgaaagaaccatggcccttggctaacagtgagggtgtggaaaatgaactgaaagtaaagcaaagaagggaacatgcaagtatgggagaacaaatggaccaaggcaaatactgtatatttttaaatgggacctatagaaaaaaagatataaaaaataagaactacaaagaaggatcaaatgtgattcaagaatttcagtaatggttcggcatggactcactgctcctttgtccttattcttaggacatgaagagtttcccatcctgaaactttctatagtttttagaatacatctgtccttaatttgtcttcccagaaattatttcacatgtatatatggatgccattttggtggaatataatataatcttatcaataggcagtcaatatttgttacataattaaaatctgttgataaccacagacgcctggcaaggctttcttaacatgtatttttaagtgtaataaatggataagtgtattatgtatagcagtttgtttatattatgaatattggtataaagacactaaaatctaagcaagcagtcagatctgatttttcaattcaaaagaagcagagagtaaatttttatttgaattaatacatgattaacttttagttgtgttttattttatttaagaaattgctcttttgtgtgtttcttttttgaatggcaaagaagagaaaggactggatagaaaagtctcacattttgcatggtgtaatgattatgttaaggtgctcaaagtgataggaacaacaggaagcagacaaaaacaatcacccacacacaaacatacacatgtgcacacacacaatgtgttttgcatgctttctctgtgtacacagcaaactgtatacacccttcctatatgctatattgttaatgccttgtgagagaaataacacaaaaatttctgaagatatcggagggaaatatcctcagcaaggcaacctatataatttcatctcttttagtgaatagtttccattactaatggaagcagaagtgatggactatagtgaaggtcatcttcagcatcaaatgatgaagaaatagttgactcctagaactcaatgaaagagtctgaatttgtaacaattattataatttcaaatgcattattgcaatgtaaaaattaaaatatttggctctagagggtgtctgttcagctcagtctgctatatcaaaatatcacagactaaacggcttacacagcagacatttatttctcacagttctgaagacagggaagtccaagatcaaggtacctggcttgctgacagccaccttcttgctgtgtcctcacatggtgaagaggaagctctgatttctcttcttttaagagcactaatcttatcatgggacttcatctcataaactcatcgaacctaattccctcccaaaggctacaactcctaataccatcacatgagggttagggcttctacatatgatttttgagggaaaggaacatttaatctgtaatagggcatatttatttggtacttggagctgacccaagtataaaataatggatatacatatattacttcccttgagtttctcatctaccttggaaataccctcgtgagtactcatatacctcactgtgctaggggaaaaatatgaatttcttacaatttaagaaatttggattgcaaatgaaagtaatctctttagaaacagtataacgtctctagcatatgtattacttctcccaaaaatgcacataagaaaaagttttcacttcatagtggtgatatttttatttatctttaagctattgaaatagtcaaatgcacttgtttatgcaattgagaaagtaaaaaaaaattgccataagaaaaaagtttccatttaaattattgtttaaacttgcagattgtatatttgtatgaaattttatctcttatttccaagtacttttattggctggctgagtataaagaatcaaatatactttttcaaaggacaatatgtctgtggtttttttcatgttaaggtttatagtatgtcatttaaaagtaattcaggattttttttgctttataaatgtatttttttgtcagtgtaaatttagtgtctttgatgtttttattgttctgggagttggtgatatttcagtgtgtaatttgtcattttaatatgctgcatcaatctaaaatgtgttcaacaactctttttccctctaaaaggaaaactgtcctaaattttcttttaaggctgtaaattcaactctatttgagttacgccacatgaaagaaaagggaagtctgagggagagagagatagagaaatagagtgagtgggtgacttaaaaatcagagaggaagtacatagggaaaatttaagaaggaatgtgaattcccctattggaattgccactcccaaatattgcttcgtactaattagtccacaatgtgtttccattaaaagtaactgctgatgttattatctggtgccttgcaggtatgttctgcactctctgagctctacatgccttgacttactcctttcaataacatatgtagtaggtacatatgttattgaaagtaggtaggtcatgcaccccacttggtgggtgaagcaatgcagcctttgaagaagaaactgctacctcagggcttcctgagttgagagaccatgtttttatagacaacgtcatactgcaaaagtgatttatgtggtatagttagagaaacttatcttcacaggttgatttaccttccttgccatttgaaattctttattcctgctttctagtggagctctctgcctgctgtcaagggaatgtccaaaggccaggagaagtattctttatgctttggggtttttcatcttctttccctgatcaatccctccccgttcttcttccttttttttttttttcaaaagcaatgttatttatttactacttaatatgccaaatgtttactaagggcctgtttcagtccagtcacacaaagaacttgtaagcatatttacagaactataatatcatactttatttatatctccattttatcacaaaattctaagtaatctattaggaaaattgaaaaatatcaaaatgtaacactgggatacctctgttttcttctcctactcctcagatccttgtaccagcttccttagttggttacctcttctattgatctcagactctgattctaactctgtttctacctatcttccctggaagatctcattttcccccactgcatcgacctcacccactctaattatcttaaatctgtatcgagacttttttcctgagttccagtcttaacttttctgatgatgttgcctttattaattgtcgtgttcaaagctgaatataaccaccctcatcttcttcccaaaccaaaacttcctctgtgattctccattgatgtgccatcactcccctggtcttccaggacagaaaccttgaagtcactttgatttttggtgcaattttgtaaagtattgatggctttacctcttctgaataatctacaggacatatcaactgtctgcgtgtcattcagagccctctaaatagatgcctaaaatatgtcgatgatcaatatacattgaatgatgtattcattgataggctggacatctcttcatttagaagttcataggtaaatcattaggaccaagctttctctcccctatgtaccccattcccaaaagtgtaggctgaggtcaaagaacaaatttcatatatgccttaagtgttttacacataaaaaagtgaaataagactgcccatttaattgtgattatttagtccagctgtttccttgtatttactagattgtctcagaagttaaaattccacagtagttggttatcaagtaagcttatttaaaaaaaaattatctcctagtatctagggtataaagatagaaggagcctgttataattttcacaactagcatttagtgagtgctgtttttatgagtgtgacccatctgggctggcactgtttccacaggggtggtgatggcgttttattggatgcagctttatcctctctccctgacctcccacaaccagctacataaattggcagtttgaaaatgcgatgctctataagcggatttaagctgacacctcggaaattgaaatcagaaccctgccacctttagaatccgtcaaatctactaggaacatgaccaagcctggatccatatacgcatttttaaatgaacattactggatgtgatgtatgttaagtactctgcaaggatgactatttctccaactcaaaattaggagtgtatttgacatggaatgtatgtagactctccccaaaagagtcagatttaaccactacgaatgtctcctatattagatacttcggattgtagagcaaatataaaatatcagcctgtcctaaggaagaaatggggaggcaacattcccagcaaaaacacattgacaacatggtgctgtctgcatcttccctgttccagagtggcaccaagcctagcagagagagggaagtggcagcttcatcagcgtcactcccatttcattaactgctcaataggatgggaacataccgccctctgaatgtgaagctgtggattcatcctttcctcttaacttagcacaggaggggaaggatgcaggaagaagtagctcagataagatgtttgctggggcagctacaaggtacaaaagaatgacttctggattttagacaaaaagggtgagttttccaactccacatacatacctacatcagagatttgtatggttaaatatgtagagcgcaggcacatgctgactctagccctccggggcaggttagaatttcacatagatacattcagtgcattatgatgccttcaattaatagggaacagctgctaggtaattaaagatgcccatttccaaatcagatataaaattacaaaagcttgcaaattaattgcatttaaattctgaaggatcctgtatgaagtgaatgtatggcttaatatttcatgaacacaaattcatatttctaagaaatattattttaattgtctgctatatagtcacaactttcataggtgttgtgagaataattgaaaaaagaggaaaaaaatatacctagatggaaagatgcaccattcattaaaagggagttgctgtgggcattcactggggtgaggtaggatgacacgaatctgaaaccgtgctctcttcaacattttatgagtttggtaggaagagagaaagggactttttggctgtaatcaatagcgtgagagcagcgatggagccggaagaaagcagatttctgatatgagaacatcatgatagaagcagcattacttaggtttagcatcaaggatctaactctggagttcagtctgggggttgatctgtactctgatacttaagagctgtctgtccccggccagggcactttctgcacctcatatttctgcagataaggttacgaggtaagtgctcgtgaaggttagttggttagataatacatgcaaatacctgcaaaggaaatctgccatgtattgccacatgcataataaatgttagctactattatgatttgaattaagagatattatcagagtcgtaaagttgctaaataatgacattgttatataatcagtgatcgtcaccgtgagtgtaaattataggaataacagcatagctttaggaacgttttaggcaatcatattttaaattatgataaaatggaaaaaggctgaagatagacacataagctaagggcactgatgtaaacaagataatgagaaacaggaatttgatagcacctttggaaatgtattaaaagggaaaaatttacattattaaggagcgctgagcaatatttttattcattgttttctgctaatgtgtgattatatgtacgcgtgtgtgtgtgtgtgtgtgtgtgtgtgtgtgtgtgccagccatctctctaaacactttatacatattgtctcatttaatctgaaaagaatcctatgaggtactgtactgggttaaaaatttatgtctactgagaacttctatgatgtgacttggaaatggagtgtttgcagatgtaatcaagttcagataagtcatcaggatcagggtgggtccccatccaaggacttgcgtccattgaaaagaaggggagagtgtgggcacacacagagggagggcagcatgagaatatggaccaaagcccatgtggagtgagtgacactgctgcaagttacgggacaaacctcagcagccccagaagccagaggagaggcgtggtttgttactctggtagtcccagggtcagcagttcccagaatgggaaatgtacttgctttctgctgtgtctactgtgtctttgctccagggattccccaacccgccaggaacacccttcctccattccttgcagatgtacctctcctctcccctgcggagccctccccgacatcctcaggtgaaacacacgaagcccttcccctgcagcattgccaacacgaattccttgaagtgtaatctctgtttgcgagcccatatctttcactaaaatgtgtgttatgcaaagaagaggatcaggattccttaattattcattcattcattcatgtagcaaatgtttattgaatccttgtcatcttccatgtactgttctaagtgctggggatgtgcagaaggaggaggggattcagggaagcaagaaaagcttgagcaaaggaacagtgagaaagaatttttctttcctgccctaatgaacttcatgatatttctatctctattcctagcacagagactgtgtatgagtcagagttctccagagaactagaacccataaggtgcacatgcatgtgtgtgtgtgtgtgtgtgtgtatatatatatatatatatgcatatatatatatatatgcatatatatatacaggtatatatacagtgtatacatatatattcaggtatatgtgtgtatatataggtacagatacacatgtacatatatgtacctatgtatatatgatatatatgtatatatacttacatatacctgtgtgtatttatacatgcacatatatatttattttaacccagtatttttgtatattttagggaagggggaaggaaggaatgaataatgggttctgctctttataattaaaaaattgtctcctgattttgtagtgtcacttcctctgtgtcaatttctcgcgccatacaatgttatttcttagagctgctcccttctcataagccagatgtctaataaggattaatggcaaaacatgaaatctgtcatttctgtctcttcaccatcaagttttgattaaattgaaactgaaaaaaagcaaacattttagttagctgaatgaatgctacagctcaggtctccgatccatcgagttttagacagtattgccatagctggtataaacctagagttttctgatttattgtgctcacaacagtctatgagaaagaagaagaactggctggtgattttcataggaaaaaggcacaatctgtcagcagcccagactgctgcttagtgtacaagtgcagctggaaaacaatctgtagatgatcactgcctctgacagtgccaccatagtacacacagaagtaaaatgttctacagggaagatgtagacgtgccatttataagatcagagaaatcacttactgagtgcaagaatggacagaacagaatatattttctgggtttttctctgagccttttcaatacacagagaatttctaaaactggacatgcataaacactgcttcataaagcagcatttgcaaacagtgttaaaactgccccactggagccagtgcctctgaccttctcaagatcattactctttcagcctttcatgatccacagaacagaatcatattcacagaaggggaaaagaattttaatgtttcccaaagtagaaagaaaagaaaaccaaaccacctccccttcatttcagtttccctcataaccaacacgtctcggaaggtgtctgtactcatgagttcgaacttctctcttccattgtctcttgaaaacacccctaccaggctttttcccagtgattccaccaaacctgcctgtagcaatgatctctttgttgccaggctcagagggtacatttttagaccttgtcatattcatctacaagcatcattgactccattatttcttccttttccactgacttctttcactctgttttcttcagttgactttctctccttggtttttcatctgcttcactgatccttccttctcagtctcccatgcaggttactcttcccctctgcaaattctagagatggtacctgtattggtttgctagggctgacgtaacaaaataccacaggcccagtggcttaaacaatagcaattcatgctctcaaagggctgcaggctgggaagtccaaggtcgggggtctggcaagtttgatgtctggtgagggtctgctttccagttcatcaatggcagcttcttactaggtactcacagggtggaaagggcaaggagcattctgtggtctcttttataaaagcatgaatcccattgatgagcaatctacccacagaaaaccccaggtaatcacctcccagagaccccacctcctagtaccatcacattgggaattgggcttcaacataagaatattttctttaaatacctctagcctgctcctgccttggggtctttgtacttgctgacccagattctgcatggatcaccatttgcatctgtcagctctccactcaaatgttgcctaatcagtgaggcttgtactactgacctacatcaacccaaccctctcactgtctccactcacccgcttccttctttttcattgcacttataaccttgaagcaaattctttatttccttgattttttattgtctatcctctcccaggagactgtaggtttacatgagtaagagctttctttgcttagtttatactgttccctggcttctagaacaacgacttgcacaaagtaggtgatcaataatatttgctcagtgagcaaataagtaaagggagcctcttcctaagcatctttattatacggggaccctcagtccccactgtcatgacctggttgtggccatcataattttgcatctggtttattgcaactgcccctaaactgatcacattatcttcagtcttgtcctcccttagatccattcttctctctctaatgaagataatcctaaatgtactgttcttggttctgcaaaaaaaaaaataataataataataataataaataaaaataaataaaaaatcttgtaataatgcttagtttccaaacttcttttcaagagagtagtccttgttgatctttaatctttccagaatgattgttgacataaccagacttcacccttcccatttcacacccagcccacctctcacaccagcacttcccactgtacctaggctcattcagctcctcaagcctcttctgccatcccctatctagaactttgtatgttctagtcccaatacttgcagctctttctgtgtagatcatccccattcatcacttagatcccagtttctgtctgagctctgaacctagagcacttcttcagagaaggctttgctgcctcccagtttggtcccacagtgcctggagctgctccaatcccagcagatgtcacagagtgtatcagggcattgaatatttgcttcattggatccagaactcacagcgggctccatgagagcaggctctggctctcatccaagtggctggatcccagtgcctggcagagtgtagtttctcacatattacagatgtttcaattactgtccatgttattttttgcatatttgttttgcaaattaacataagatgtcaatttctagatagctagcaactgtttctacaatgcaaaataaatgagttttttccattcatcttattgaatgtcagattgccagctgtctagtctattatttgcccacatatccaaggttaatacatggtgtctggattaacctctccaaaactctataatgcaggctttgcatagagtttggcatgttttaaaaatcatccacatagagagagaagcaaaattagctctatgagcacaatcaagaatgccactttttaaaacaccttgaggcactttttaatccatagcttatgtttctagttattatacacatggagaaattggtcttactactatgccataggacaaggaggcataaggttggtaagaacccaaatttcttcattgcatatctcctctcaccattgtggacccccagtggatccagcctacagatggggagatgagggagtgtatgggagaggttcagggctttattagggtcccagatttcatgcatgaacaatggtgttgtagcttatattttgcatttgtgtagtgacttcttatacatatatagtgactttattaaaatctcaatggccattaacaaattcttgccaatatgatttttgagtcaaacatgtcaaatgtccttctcatggtcttggtctctttcatgggatcatatccaaattttatttttccaaagtctggtcactgctctaaaatttcctcttgcatttttaatcaaaaaccatgcaagcatgtaaaaccatttatgtctaacgtgaatgtgtttttccacacacccactcttgcttcctcacaaaaatatgcttctctttcccacatgtgtgtgtgtgtcaataatatggctatttttttctagaaacttcagtctgaaatctaatagttatatttgatattctctgtataaactgaccatgggtctttcacgtctcccttccagactccactaaggagtttcagtaaaaggctttgctcttcaccctgcatgtgactcggtgcctaaagtgatgcttgtaacttttacatcatccttctccattgcctactattcatttccaatgttgtttcagctctcattcattcatttgtttgccaaatatgttttctgtggcatatatgtgcccagaattgtgttctgtgtgggaggttgtactgagccaaggcaggtgaggttcttgattcgtggagcttatggtccagaataaatacccgtcccattggtcttgtttttctcatcttcctcatctttctttttttttccatcaagaaggtgaacatgtgctccttgttattactctgctagtagtgctgttccacagctatgggggtgggggtggtaaataaagagagagagagccagagttttgtttctctcctaagagatttctaaagccatccatgtttctcttttatgtttctctctaagtcttgaatggaatgtagaaatgtagttaggcatttgacttcagagactctttatccgtataactacattgctattcatggtcctccacaatctcattattccaatatgactttccatttctctatgttatactccataaacaatggtgccccaagaccgttcccaggacagcggcatcctcctcatctgagaacttgttagaaatgtaaatgatcaggccccatcacagacctgctaaatcagaaactggagggtggggccaggaatctgtttcagtaacccccaccacgctccaatttgagttagattctagtggttttcaacttcacatatttgctaaattactcttggataccactgatattatccgttcaggggatagacatgctaaacattgtgcagtctatggcacagtgctaaacagaaaaatgcctgtcccattccaaatgcctcaatcatctctgttgagaaacatgatgaatatgatctaatagggaccttgccgttccttgaatacagtggttcattttctgcctattgtgagcagtgcaatgtcagagataacaagaggcccaggtttgtgtcttcccacaatgtcaggcttttactgacgttacttcaatcacgggctgcatggaattcccagggagacaattctcggtggtgcttcccattcacttgtagtcagagccgcgggcacacaggctcaagccactccacacatcaatcaagattgcaaaccatatatactagtatatgtaatcaatagataaatgctatagattaaatattccacaacaaacaaagtgacatttaacatcaaggggaaagaaaaagggttaaggaaccagtccagggagagagatgtagacaaaaagaatatcctggtctggcctgggcagaccatgagtcgtgcatggaagggtcagtgatgtgggcagagccttcggtggtagattctgggtgcttatcacaagggacagtaagatagtgtctgttaagaggccgtttcgagctgctgaagtcttgctctttttatgggcaagagtcccctggttaggactgatagtggaagaatgtgcttggtcatgtctttatctggctggatgcatctttattgatcaggcaaaatatctgatccctgctggcaacgtgccttatgaaatgtaagatagagtctttttctaagatggagccactaatgtcaagggtgctgtataaatggcctctgtgtgtttcctctttctgtttctcatccttacccccatctcaaaatatctaaattctattcatcttaatgcctgaattaaatagtatctccttcagaaatctcccctggtttcctcagctgaaggagttgtatttctcttctgtacgcctacaggcattttatctgtggatctataattcacttatttatacaattatgattcaattctcgatataagtgccttatccttcccactttaagcaactcagatgtgagattatgtcctcaatcatttacaatcccaagcagagttgctggcttgtgacaggctcacaggagaagcttccctttccttccttcctcctgttctatagtagcctttgacgacagacagtaagaattactgattaatttagcaatttgccaaaaaaaagaaagaaagaaagaaaaatacccaaaccttatagtccatgacctaactctcatgggaagcatttacaagcgggaaatctgtgtctgataaatgagctgctttatgcagaattggtgtgttatctgagaagctctaactgggctaagcactgccgcgtgattgtggaagccatttttgaataccctgggacaacatagatttgacaactgcctctgtttccttctcaattgaaaattattctataaagaaaaagaattaccttcttgttctaataaaaataaagatcacaaacacaattttacatcccatttgaattgtagaaagataaggtttagcattaagcctgagaatctggggccctggtgtgtgtcccctgaacttcttttttgagtgggacagatgataggaagaaacatgctttatgcctctggcgattctgaaggagtaagatgtgttgccttcttttcgtttttagaaacagtctcgctctgtcgccaggctggagtgcagtggcgcgatctcggctcacagcaacctccgcctcccgggtttaagtgattatcctacctcagcctcctgagtagctgggattacagacatgtgccaccacacccagataatttttgtatttttagtagagacggggtttcaccatgttggccaagatggcctcgatctcctgacctcgtgatccgcccgcctcggcctcccgaagtgctgggattacaggcgtgagccaccgcgcctagtcagatgtgttgccttcttagatgccacaggaggggtgtgcaggctggattccaagcaggggcaacccctagggcattctcttttcatcttatgagattgtttcaagcatgaaaggtgtgttttggcttgtgtctccttttagcaagcctgggttagtttggatccactgagaagtgaacacaaagaggaggttagatatacaagagatctgtgagggcaacaccagcaagaggaaagggggtatgtgctattgtgatagaacaagatatatatctcttattgtgtgtgtatatatctgtatctgtgtctatttgtggatctgtggatctgtatatatatttgatctctgaccttagtttctgacacagagttcctatctgaggcagagctcctaatcccttggaatttcctgggtgatagggacatgttttgttctaataagggagcccctggtggcttctggctgggggttggtcacccagccatgattatgagcttggaattctcagccccaacccctaaactttggaggaggaagagaagttggatgttgagttaataagcgaacatgcctatgtaacgaagactccataaaaacctctgaactatggggtttagagagttcccggattactgaacacactggggagctgtgagggccgcctggtgagcctggaagctccatgcctggccccagacccgccttatgtgcctctttgccagctgttcatcactctgtgttttagtaccctttatagtaaatggtaaacgtaagtcaagtgtttccctgagttctgggagttgtcctaacaaattattgaacccaagaagagggtcatgggaaccaccccaattttttttttttttttgagatagagtctcggtctgttgccaggctggagtgcagtgacacgatctcggctcactgcaacctccaccttccgggttcaagccattctcctgcctcagcctcctgagtagctgggactacaggcgcatgccaccatgcccagctaatttttgtatttttagtagagatggggtttcaccatgcaggccaggatggtttcgatctcttgacctcatgatccacctgcctcggcctcccaaagtgctgggattacaggtgtgagccactgcacccagccgagaaccccaatttgtagctggttggtcagaagtactggctacaacctggggctcagaactggcatctgaaatgggaggagtcttgtgggactgagcccttacctgtgtatttacctgtgttaaattgaatggaattgctggtgtccactggctgattgcttggtgtggacacaacacctacgcatgtgatcacagaagtgtttgtgttgagtgtttcaggtgtagtagaaggaaaaccagttgtttgttcttgttatacaaggaaggtcccagatgaggctgggagggccttcaaatatcccgttctggtgtgatcctgctgacggtctatatggctgcccagactgctatcacaaaataccacagcctgggcagcttatacagcaggcatttattttctaacagttctgaaggcaagaagtccaagatctaggtgccatgtcaggaagtttggtttcttctgagacctgtgtccttggcttacaggcagtggtcttctcactctgtcttcacatgttcatcctctgtccttgtgtgtctgggtcctaacctccttatttgtgagggcaccaggtatattgattggattagagcccaccctaatgacctcagtgaattttcatgaacctccttaaagaccttctctttgaataaacggtcactttctgaagttgcttcagtgcaggaattttgggagacacaggtcagcccatagacccagagcaggagagaagaaagcagcagacctggtaggaaatgtttcaggacgtagcagagctctaagaattctccagtaggctgaggggtagtcctcatccaggcagagttggctatgggaggatcccacacctggcaggagtggagccgccttgatgagcatccctgtcatactcagtcgagtgggctgggagcagctggtgatgtgtggtcaatgtgtgattcgcacagcagctggggcctgggccactcagactttttgctacaggagatttaagtaggcctttccatgtgcagtgcaatcctttttgtcatattttaaaaatactttaaagatatcacacgtattaaaatatctaagtattttaaagacaaaggcctgtaatatttacactgagaactgagatccaggtaggaatataagggcaggaactgcaatcggcacatccagcgaaggaagctgtgatgacaccaggccagaacagggtcagggtcccagccaggggatatggaggtgatcacacgtcagctctgaatactctgattcagagtcacaaaaagagacaggcaatgatcgttcctaaaactagttgagggcttaaaccagaggagcgaatgtctgaaccaaaataattccctaaattttttatttttactcataggaagttctaacttcctgaaatgttacaaaattggtgctggaaatcatgacgaagagaaaagacaacaattttcctggtcgatctggatgttcagcggcctgaggacaatgccgcagcagtgggaagaggggtggtgtgtaactggggagtgaaatgcttcctggaaagtagtttatttgctgtgaaggcaggggaaggcatgggtcatgggtggtacagccaacagcagcagcccaggcttgacagggtcctggaacaacggctgcttaccccatcagtcccctacgattccaccatggtcaagaataattatcaagttcaaatggttctgctttggtttggctgcctattctaaaatttaaaagggagctatataactttgcattgttttcagataacaaggattcacatataatgactgattccacacaatggaagaagattatgcagttattaaatatggatttatgttaagcataaatatatgcatagcaaagtataattagaatataaatctcacttctctgtagattagtagactaattgcagtgcagtgtcttctcgccaggggtttgataaataacattggcagaagtggtatggataagcccctggttctggccttgtgattttcagtatcctacataattataatcacacagtccctcctgtgtgttccaggctgatgttttcttcaccttaaaccagaccaggcttgtcacttctccctccagagctgatctaccaactgcagaaaaatcacagcctctcatagttgcacaaattttactttaagattcaaaattcctgtagcttcctgggttctgctctgcattcattttaaaccactcatttctgggctatatacattttctaagtctgtagctggaagaagtggaaaacacattgaatgtagaaggagaatctaaaaagaacttgatgtatttgaacaacgcacttaacccacaatagaaaaatgaacaagggcgaatgtaaattccaaaatactgattagttaaataatttataaagtgtgattttttgggaacagtgtaatattagtgctaccctttcccaataaataaatccaaagtttgcattggtagaagtacattatctaaaacgagggaggcagaaggactgggataataaaatataatttgagagccttggtgcatctagctatagaaaggagattctgggacaaaggatatttggactgtgagaacgatgaggagcctaaaaccatattacatgaggaagaggcagagtgactataggtttttcactcaaagaagagaaaagctcaaagcaaaataactttgagtatctgaagcatttgccatgtagagtttactcttagagcttattcttcttattgtgacttagtttgttcagtattggagctgggtaaaagaaggcctttgtaattctttctcttgtaaaaaaataggaaattacaagaccctaattacaagggccttaattacaagagccttgtaatttttttccccatgtaaaaaattacaagagaaacagaatgtagctccatgcaaggaaacagatttacacatagaaaacaggatgccctaggaggtcatgaacaagtcggaaacgttaactaaactttctaaactttctcatcggtaggaatagtaccgatgtggtagatcatatgaatacgaatttgaggctttaaaactagaagttacaattctcattattattttattattttgtacataactgaattagttcatctttaaaatttcacccgctattatcgccaccctattctccaggttctttatactcaaatgattacatgcttgcactggaactgcaggttgagctagagctgctccacaattcctgagtctgtcaggaacagacttcccataggtttcttcataaatagatgttattttcagtgccaaagtaggcgttaatttaggcagaaaacagacttcctgtgaattcttccttcttttctcctgaactttttatgcaggtgggcatttgaagggccatgggttaaagaatacacagttgtataaatttattaaagtgcttcatgaaaatatattttagaaagaccgtcaattttggaagcagtgatgtgtgagttacaaaagtcacacagtgtttttatgtaccctaatggcatgatgcaagtcaagttaatgtctttgagcctcggtttccttactaaccaagtggagttagtactggctcatgagcttgttataaagatttgacaacagctaaataattgttaaatggtagctttcttatgaataaactgtcaagggatcactgtaagtatgtattgtctttatatttaatacaaattataattattacaaggaagaagagatgattaaactattgctgtaaaatactgtgacaattttaaaactttagttgataatctttaataacatacattgttgatatgacaacaatttgcttttcaaattgaattttattttcgtagttcaaatgcatttcaaatctgctaatcctaagaaatagtttgtattttgaattttccaattttttaatatgccattatttttatcacaaagaaccttcaaaaatgcattgtggacattaaaatacattaaatagtataattatttagctacattaaataactgtacatttagttatctatgtccatgtttgcctttaaatacatatacagacatttttaatcatacttgctaattaaactaataattgtaaaggaacccactttattatgatattgtattataatagttaaatcattttacttgagtgacccataaggatttctaagtgaataatagagatttttattatctttgcaattatcatatttagtaagaattcaattaactttcattgtcaaaacttagctatgctgaactcagacaaataatctatttccttgcctaattttattaactgccattttgtagaaaggtaatgaatgtacaaatacagagtctctgaaatataaaagataaaaaaaaaaatagcagcaaagaagttaaagccgaaaagctcaaacaataccaaaccagacttttaaactccaccacagcctacatttttctagttgtttcatttccagcagaaaataatcgattaatcaaggaatgatatgttataaaaatagtattcaaaacaagattctacatctaacaatttgtagtgggaactgtagcatgtcacttgctttttgtataatataatgagttgtatatgtacctaagttattttgccaaatgtatatatgaaccagctctcatctgatgtcccactacttttcccacttattgtataaaattcctcatttctcacataagtaagcccaatgccttccaccagatactctcaaattctgtttaccatgaaggtcgaactcagtgattcagaaggtggataccatgcaaaacaaaacaaaaatgcacttgtacaagatttgtgaatcctttggacttcagtgggagggtttgggagctgcaaccatcaacaactgaacagccatcctttattcttttctcaccttttctttcttttctttattttcctttgcacaaaattaaaattcctgctattttcttttgcacgttatttccattttttcatcttaactgcccaactcatttcctacttaagaatgggaagtctccttggtcttgcggtactcaacgtcgtgctgccaccacgagctatgggggtgctttggagcagaaacattgggaacaacattttctgtcatgctatggccttaattaagttgcagctgtattcataagtttaacatgaaaaggacttttaaatatagatgtctaactgacttccagaagggcaaaatcttcctaaataaaattgaataaatgccatttatttattttacttaaatttctgttttaaagttggcagtgaatctaatatttatgcaaccatttgtctccagcacttttttgggtaataaacatcagtgtggccaaatgtcacctcattccacttgtgtgtcaatgacaaatattgataatagacaatgttactgaaaaaagtataagaattttcttgtaattattttgtttctaaaataaaatactattttaaaaatagtatcatagccccacaagacacattccaaaaggtatgaaatttgtggaggtggcgggtaggggaagagtttcagttcaagtatattaattcctcagattgctaaggatcatacctaactgtgatgtaactaagcttcttcatgttctgagtcaccattctctcctgttttaaaaattatgattcttatggtagatgtaggttttgattaattttaacacagcaagagattaacaaattattattgatatgggcttttcaatttgctctttcatgtgtcccagttagaatcagcctcaaatcttcacagcatgtacagttgcaaggcattgcccaaaggtctgtttttttattgaatggaatatatgcttatgtagcctaagtaagtatgaggctcatgaaagtgtctcggtgccacttcatttacttcacttattctttacacaaaggatttatttgtgagcaatctgccaggtttttgcctattagattgtattttaaataacggaaggaaacccagaaaaccagggtcatctgagtcctgtagataaattagaggtgtaggggtgtgtgtctgtgtgtgtgtttgtgagagagagagatagagagagagaaatattaagaggagaaagagagagagaaagagtgagatatttgtactagaaacaattatttcctagcacaaatgtactgtttacttgcttttatgttttgttttgttgttttctttagagacagggtctcaccgtcctgcccagcctggagtacagttacggatcatagcttactgccaccttgaactcctgggctcaagcgagcctcccgcctcagcctctcatgttgatttgtaaaataaggattcacttcgtctgaattcaaggggatacaggatgtacttattcagtaatacttgtcactttcttagtcactctgatttctagctcaaccaattcttttgggtttaaagcaaggtgacttttgcagtccaaactaagttgatgatatatttgatgaacagaggtaagccgggaaaatagctgggactattaaaatggtcatatttctgaatctttaggaaacaattctctatatggggcaagtccttggtttagaggtcacaactcagtgacaacacaggaagcgccccctttcccaacaaagcagatgcatttttactgtccctaagttgactgaaagacatcacttccaataacaatattttgaaatcttcctaaagtctgactcattccctctaaagtttttgacttactgtttacatttaataatgaactttagaaaaagacatcatgaatcaaatgaaaatcttcagtatatttaagctaatcagacttgggcaccaggaaaatactgctcttgagccagcacttgctccttaaagaatgatcttcatcatgtgagctttctatttccttgatttttcatgaaacagaaatgtcctcagcacttttgaaactgactgaggtatttggtattcatcagtataacctagctggttcacacaaaatgggattttaagaaatgtttcaggtaaaaactgaaagtgagtaaattaaaataaaatgctcttcatgcgaggacatcaaatactgttgattttgcctttgtggggcagttctctcctgtgaaggcctaactctgacagatagattgctcctgcagcttccgtggtcttgagcagcctgggaaggagtaggctttggcagttttgtcaaatcctgaagcctctggcaaacgttgcgattggaattgataatgtcctaagggccagcatttatctctcttccttaatgtgtcacacggcgcatatctttctacatgagcttctctggggacaacagttatgaatgcttaatggggcatatgtctgagggttaaaagaaaaatgtgcttattaatgaagtacaaaaagaagggtagtgattgaactaggaacctgggaaataactgggtaaattgtcaacttctgagcatgtgacttatctgactctgagtagagaccgttaaaagctgatgtccacactgtggatgggacttgaactagctccgtctccatggagtcattctaaggtgatcagaaaccataacaatgaacttaaagccactctcacgactacatgtacatatatcttgcatgtcagaaaaaaattccagatgaatattatacagataagaaggcttaattatccccaaagttgctgtctttatacctcagaattactgaaaaacctgaacaggatttatgcaaataaaattatttaacactagattttctatacagatagtcttataaattacaatgataataaataatatatgacttaagaagtttataaagtttaagaacaccattgtcagggaattgtggctctttatggtggtaaaagacacctaacataaaactcatcattttgaccattttgaagtgtataattcagtggcattactacatggagaatgttgtgcgtccatcaccactatctggccccaggacattttcatagccccaagtagaaatattgtgcccattaattagtcatttttcatctccccacttcctctagcttttgacaaccactgatctgcttcctgtctctgtgaatttccctacttttgatattttatgtaagagaaattacaccatatataacctttgtatctggcttatttcactcagcatatttttaaggttcattcatgttggagcctgcattggtacttcattgttttcttataataacattccattgcatagatataaaaaacttggttgatgcattgatcagttcatgagaatttggtttgtttccactttgggctgctgttgatagggcttctataaatgtaagtctttgttggactacctggttttcttaacttttaagttcagtggtccatgttcaggtttgttatataggtgaactcatgtcatgggagtttgttatacagattatttcaccatccaggtataaagcctagtacctagtagctgtttttttgattctgtccctcttgccacctttcaccctccagttggccccagtgtctgtttttccccactatgtgtccatgtgttctcatcatttagctcccagttataagtgagaatatgtggtatttggttttctgttcctgtgttagtttgctaagaataatggccttcagctccatccatgtccctgcaaaggatacaatctcatccatttttatggccacatagtatttcatggtgtacatgtaccatattttctcaaactattctaccattgatgagcatttaggttgaatctatatctttgctattgtgaatagtgctgcaatgaaaatgttcctttttctccccaacctcactagcacctgatattttttgactttttaataatagccatactgagtggtgtgagatggcatctcattgttgactgccagtttttaattattttcagtttatagccaaaagtgggatttcttattcatatgtaattgcatgtttaatgtttttaataactactaaactgttttctacagtggcgaaaccattttacattctctcctgcaatataagaaggttccaatttcttcacatcctcaccaacacttaatgttcctttaaaaaatttatttattataatcatcccatttcccaagcatctttcatgtcttgttggtcgtttttatctcttctttagagaaaagtattttgtctatttttgtttgactttttgttctgcagttctaagagttcttggtatacacattttatatactagacctctatcaaatatatgctttgcaaatattttatctcattctgtgggtttttaacattcttttgataatgtcctttaatgcacattttttaaaaagttttgatgaagtccaatttatacatttttgttcttttgtgcttgtgttgttggtatcatatctgagaaacaattaccaaactcaaggccatgaggatttccttctaagagtattagagttggccaggtgccatggcttacacctataatcccagcactttgggaggctgaggcgggtggatcacctgaggtcgggagttcgagaccagcctgaccaacatggagaaaccccgtctctactaaaaatacaaaattagccgggtgtggtggcacatttctgtagtcccagctactcaggaggctgaggcaggagaatctcttgaacccgggaggcagaggttgcagtgagctgagatcgcaccattgcactccagcctgggcaacaagagtgaaactccgtttcaaaaaacaaacaaactaaaaacagagtattagagtttaaggtgttatatttatgtccttcatcctctttgagttattagttttatatatgttgtgaggtaacataccaccttcattattttgcatgtggatatccagttgtcccagcaccacttgttgaagacacacttccttcctcattgaatgatcttggaacccttgttgaaaatctgttgaacattgatgtatgggtgtatcagttctgaattcctgattccatttcattggtctataggtttattctatttcagtaccacactgttttcattaatgtagctttacaataagttttgaaatcatgacaagtaagtccttaactctgtttgtctttttcaagattgttttggttattcagcttcccttgcaatctcatatgaattttagggtcagctttttaatttctgcaaaaaaaaaaagttttggggatttcgatagggtggatcatggcttttttcatggtaagcaaaatatattagttattgtaggtcaatttaccaaaaaatgatattacttagtaagcagttacttactaaaatgttagtactcattattttaacagtaatatagcaaaaaattttatattcacttggtataaataaaacacatcaaaaattcaccaaaaatgtgtaactatgatttaccagaaagtgaacatcatataaccaccactgaggaaacaaagtagaacactgccaggatccttggaatgaaaggttgatttaacagttgaaaactaatgtgattttctatgttaaccacataaaggaggaacaaccatatgcaactgatgcagaacttctaaaaatcagaagagaaaccactgctaaaatgtatcacaaaatatttaactgcatgttaaagacacagagtggttttttcaattgtttgaatttaaaaaataagtatggtttcattaaataatcaataatccatggacgatagcattgctgtgaacgtgtagcagctgaaattctcttgtattgctggtgggagtataagacaatatggccactttggaaagctgtttggcagtttctaatacattttaatttatgcctatgttccagcaattccacctctaagaatgtgtctatacaaatgattgcatgattttacaaaaagacttgtgcaagaatgttaatagcagctttatttagaatagacaaaaaatagaaacaacacaaatgtctaccaatggggaattggatgcacaaagtatggtatacttatataatggaatcctacacagccaaaagaggaagacaaaccattgctacacagaacaatatggatagatttcacaaacacaagactgaaagaggccagacaccccaaagaggacatgctgcatttttctctttaaatgaaattccagtgtaggcaaaactattatcattgatggtggatttcttcagaataacgggttgtccctggggatacctgcggggaaggaccaggagggaacttcctgggatgatggagatttccttttatcttgagctgaatgatagttacacaggtgtatatacaggtaaacattaattagatgcatattaagattcgtacattttactaagtataaattacactgtaccccaattgaaaaacaaaagactacttttcgactacatggaactgcatagttgcaggaagtcagaagaccctacctgtgtgggcctcattctggaccttattgtttctttcttctagttgtctgttcttggatcagtgctcaaaggtttcaattgctgtagctttctaataaatctgatttctggccatgtaatactttgctctatttttaactcacggatgaattcaagcattaaaaaaaaaaaaaaaataccctgcccttctactcatcttccatgaatcagttgacacaaagcatgtagtctggcagggcaaactttgctcctgtgaaatttcagttttaaaatgaatttaaatgagtgaatatctgtgatgtatcctatactcagtgttgtgtctgtccatttacctggtgagaaagacttgaggacaacaataaaagaaaagtaaaccagacaagaagtactccaacaacaataaatccatgaatgttcagtacactatccatgtggctctcctcccttcattctctcttgctgctagatgccctttctttacttccgggaccacccactcccctcgacagtgcttctgtttaccttccactgtgatcacgaagttggctaaagtcctatccccagctatctgcagaattccacccaaaagaggtctagagattactcagcacgggaggacatttcttttccaggaattccagttgcatcttgaattgaagttcaattgtgtcattgattgtgacacaaggatctaatgtagaacaaaggcattagctcacatgaaaactgcatagaagttctgatttaaatttatgcctatcactgctgctgatgaaataaaaagaaaaataagagtatttttaagtatcaatttgtatgattttacttttagtgtctgatttatgatcagttatattgaactttatttacaaagggatgtgtattactctttttctttctttttcttttttcttttttttgagacagaacctcactttgtcacccaggctggagtgcagtggtgtgatcccagctaactgcaacctctgcctccagggttcaagcaattctcctgcctcagcctccccagtagctggggctacaggcgtgcaccaccacacctggctaatttttgtatttttagtacaaacagggttttgctatgttgccaaggctggtcttgaactcctggcctcaagtgatccacccgccttggcctcccaaagtgctgggattacaggtgtgagccaccgtgcccgacctcgctctcttctttctccctctgccttcattcctcctctgcagattgtgctcttatttgcatgtaagctattatggcacttaggtcaccttccatgtccagcaccgataattaagtaactagtctctgtgtcccaattccaaatttccagctggagaatccatcacgcccaactggggtcagatgtccaggtccactcagtggtattcagagaataaagatgctagatatgcaggaggacccctttctgaacagctaaaggaggtaatgttcagaaaaggagtgtggacagatatgtacagtggttattagagaataaatgagataaataaaacttgagatgtgatttccgttcccaatttgaaatgtatcctttgatatttcacatggtgattgtatcttattcctgagggtttgggaaatcttgtgatcctgtggatttttctcaaatctcacatcagacaaacacacaaaggctatatgagcactaagactccctgattaattaaaacctgacaagataaggatgtcatagaattatctaagataaaaggaaatgcatgatgaaactgcagggtggggtgtgacctcagttccataatgacatttttcagataggactaaaagacatgtttgaatggaaaggagagtgagaaacaaccagtttaacctgcaagttctatttgagatttctaccacagaagctttgcttctaaagccacatgctcaataattctcgcctttttgaaaagctttctcaaagagtctctactgcctcctttaagctttcgtcctgtccccaaaattgactaagcaataatcatccataatatttatatggtaccttatttctcacaataatatcatactttcatcacagttttacaaatgagggaactgaggcccacccaaaaactcaaagagcatagtaagtgccacaaacagcactgtgatacagtccttttgattcccaggttagccttaaggagtgggcagtgacatactgagatatttctctcccacttgacttacttttaaaagactgtctctctctgtctctctctctctctctctctatatatatatatatgtgtgtgtgtatatacacatatatatagttattacatatatgcatatgtataccatatatactatatacacacatgtatatatagttattacatatatacacatatatgtatttatgtatatatagttattacgtatgtatatatagccattacaaataacattttactcacattttaataacttccacagatattggcatggtgttctttatttttgtttttattatctcaagatacaaacaaaattccagattagtagttatgtcagttctttttgtttatttgtaaaagtgagtcattttttgaaactgtttatttctaaaatttggcataaaaaagagcattttaaacttacataacataaattgtcagagcattatatagagagaaaataagaagggaagcatgtatttatattgcatgcatcctggatttactacttctacatcaagagctaaggaaatatgccatcaagtttatgatgttataatactgtcactttacatctgtcctggaatatatagagtcaatgatttatatgactggtttcggtaagcagaccattcctgattcccgccagacaatttgtaccacaattggatatgttaaaagttctgtagaacatgtaagtttgacaatagccttttgaatattttttccatcttacagaaacttggaaatttcatcttcagcaaaaaataataattattactatcaatctaatgttagctaatttcttcttctcaatgagagatacatatttttagggactcttctgtcagtttttaagataatgggggagactgctcctggagttacagagagacgaccactgaaaaatttgtccttcataaagcactgagaacactggcactatcaactttttcaggactttggagattaatcaaaggcttccaacaatctaagaagcatttataggctgggcatggtggttcatgcctataatcccagcactttgggaggctgaggtgggtggatcacttgaggccaggagtttgagaccagcctggccaacagggtgaaaccctttctctactaaaaatacaaaaattagccgggtgtggtggcagactcctgtaatcccagctactcagaggctgaggcaggagaatctcttgaacctgggaggcagaggttgcagtgagctgagattgagccattgcactgcagcttgggcaacaacagcgaaactctgtctcaaaaaaaaaaaaaaaaaagaagaagaagaagaagaagaaggatttattcaggaacaaatggttgaacttcggcaagagcagtgttttgtggtcctttgacgattgtagccacatcctctcttccccggctctataatagccctaaaacccagcagccttgcaatcttggcagccacgaaaaccagcagcctcggagccactggtggctgcagactgggtttggatctcctccaaaaacaccattcttaggagaattatcatttgacatatctggcaacttccactcacaagatttgtttttatataaagtgactcagaaaaagctcactacaaaccttttccctggggcatttgtagaaaacaaccagcaggaaccctttagtattgcaacaattggtacaaacaggaagctggccaaaaacacttagaaggaaaacctggaaaatgagaggtccatagagtacttcgaaaaactgcaatgtgttcctcaggaactagaaggctatgcacatgttcagagctgtgggtatgctcataagatacctgggaagaccccaatttctctcctaggactgaccttaaggctttgcacaaataggaagtgcagactaaggaaaagatgtaaactgtctccaagagcaccacaggaatgccccagcatagaagcccagatcctaagcgaaggctgagaggtttattgtttcaagccatttaaggaaatatgtttactcattgactactacgataaatgagcagagatttcagtggctacacatgatacgtaatatagacattgcagatttagttacgaaaaataatgaaacaaacaaccaaacaacaattacaagcagaaacagcaatctacccaggagcggagagggaatcggattttcaaagtctccacattttattattcatcatgtttagtgctatgtttggaatgtttgtcacccccctgcaaactcatgttaaaatttaattgccattgtaatagtaataagaggtgattaggccatgaggactctgccctcatgagtggtttaatgctgttatcactggagtaggtttgttatcgtgggagtggcccccttttaaaaggataagtttggtcccttttgccctccccttcttcctaccttacaccattggatgacccagcaagaaagttctcacaatatgctggccccttgattttggacttctcaggatatagaacagttagaaaataaactaccatttttaaaaataaattaaccagtctgtgcattctgttatagcagcacaaaccaaactaaaaaacatagttgtcaacaaaaaattatgagatattcaaataaacaagaaagtgtgttccacagagagagaaaaaagtagtcaacagaatctgtgtctgagagagcccagatattagatttactagagagggattttgaataaacgatcataaaaatgttcaaataactaaagaaaattatgtctaaatcgctaaaggaaagtatgaaagtggtatctccccacatagagaagaacaattataaaaacaaacaaatagaaattctgaagttgaaaagcacagtaactaaaattaaatatacattagcagaaataaagtgtatttaagctggcaaaacaagcagtgaatttaaagatagatcaattaagatgatccagtctgaggtagagaagaaaaaaaaaatgaagaaaaatgagcacagcctaaggggcctgtagagcaccaccaagtgtaccaatgtacataatggagtcacagatgagaggagaaagacaaggcagaaagaatattggaggtactaattggtgaaaacttgctgaatttggtggaaaatattaatctacacatctaagaagcttctcaaattccaggtcagataaactgaaacagatccatacctagacacaacataaactgtgaaaagccaaaggcaaaaattatcttgaaagcataaatacagaagttatgcttcatgtacaagggttcctccagaagattaacagctgacttctaatcagaaaccatggaagccaaaatgcagaaaatgacaaattcaaagtgctaaaaaggaagactgccagccaagaattctatatccatgaaaatgacttttcaaaaatggaggaatattaggacattcattgcaaacaaaaactaagagaattttttactaacaggtctgcccttcatgaaatagcaaagggaaactttcaggctgaaatgaaagacattagacttgaatttgcataaaagataaacagcacttggaagttaaacacataagtaaatataaaaaaacagtattgcctatttttgttactctaatttttaattatatttaaaacataattacagaaataaatgaatataagtctgttataaatgagcacacaatgcataaagatgtaatttgtttaaacataatgacccaaagttagaagggtagtagtggtagaggggacagctgactatataacagcaaagtttttgtacactcttgaaatttagttgacattaatttgaactaaattattataaattaatatattaattgtaatccctagggaaattatgagaaaataaataatatatgaaaataaatgcttgagaatcaaaatgacatgtaaattagtacctgtttacacaaaagaaggcagcaatgggggcatagaagaatgaaacaggtataatacacataacaaacaaaagcaaaatggtaggcataaatcctactttatcagtaattgcattaatataaatggatttaatactcaaaaggcagagattagcagaatgattaaaaagtcatccagctatattttgcctgtaagagacatctattggattcaaagacacaaatttgttgaaagtcaaacgtgggaaatcatataccattcaaaaagtaacccaaaaagagctagaatacatatgtaaatatcaggtaactcaactttaatgtaaaaattgttattaaagaaaaaataaggacattatatagtgataaaggaattattccatcatgaagtcatacaaattgtaaatatatatgtgcctaacaacagggttccaaaatacatgaagcaaaactgagagaattaaaaggaaaaatagagcattcatagatatttgaatatttcagtacctttcacagcaatggatggagctagacaaaagttcaacaggaaaaagaagacttgaacaaccatatacagcagaaatttatcaaacatactcttccacaacagcagaacactccttcttctgaagggtgcatgaaacattctccaggacagaccacatgcaaagccataaaacaagtgccaataaattttaaaagaattaaaatattacaaagtatgttctctcaccataatggaatgaaaataaaaatacttactagatggaatgttataaaattcacaaatacacaaaaattatctattatgggctaaattttgtccttccctgtcccctcccctcaattcatatgttatacccttagcccccagtaaatcagaatgtgactgtatttgggaacagggcatttaaggaggccaataagttaaaaagaggtcattaaggtgggctcaaatctaatatgactggtgttttaagaagaacaagtttggacacgcacagtgtgtgccatcagagagtcacatgtgaggacacagtgatgacacagtgagaaggcagccatccacaagccaagaagagaggcctcagaggaaatcaaactgccaacaccttgatcttggacttctagtttccagaactatgagaaaataaatttccattgtgtaaactagccatccgaggtatcttgttatgatagccctagcaaactactacattaaccagaatactcctaaataaccaatgtatcaaaaaatgaatcacaatagatattataaaataatgctagataaatgaaatgaaaatactacatactaaaagatgtaaggtataactaaagcagttcttaaagagaattttatagctataaacactcatctttctttaagaatttcgtttttgctgggaatgatggtttccatgatgagttaatgggtgcagcacaccaacatggcacatgtatacctatgtaacaaacctgcatgttgtgcacatgtacccaagaacttaaaatataataaaaatatattttaaaaaagaatttcatttttaagaaaatctttagattcacagcaaaattaaggggaagatacagagattttccatatagcccctgctctgacacatgggtagcctcccctgttattaatctcccccacctgaatggtacacgttttacaattgataaacctacattgacacaacctaatcacccaaagtccatagtaataaatgcctatatttaaatacataaaagtatcttaaattaacctaactttttatattcaaaaatgaaaaaaagtagtgaacaatatccaatgccaataaaaggaatgttacaataaaggtttgagtagaaataaaagaaatatagaggaaaacaatagagaaatcaataaaaccaaaacttggctctttgaaaatatcaacacaatgaaaaaccttagctaaactgacaaaaaaaaaaacaaaaaaaaacctgaccaaaccaaaccaaaacaaaaattactaaaatcaggaatgaaagaagatacaatagtgcccccttacccatgattttgatttccatggttttaggtacctatgatcaatcctgatccaaaaataaaaaatagaaaattccagaaataaataattccagaaagtttaaattgcacaacattctgaatagcatagtgaaaccctgtgccatctcactccattccatctgggacatgaatcaactctttgtccagcatatacactgtgtacactacctacatgttaatcatcaacatcgtctgctcttgttatctaaccattgacatcatcatggctcagtgatccgggatcacctggaacacaggagccttttctgacctatcatcagaaggtcagttgtagcctaatgcaacatcgcggtgtctatgtcatcttgtcacacaggcattttattatctctcatcatcacaagaagaataagagtgagcaaaatacagtaagatattttgaagagagaaggagaccacattcatataacttttattacagtatattgttataattgttctattgtattattgtcattaatcttttgctgtgcctaatttatgaattaaattttataagtgtgtgtgtataggaaaatcatagcatatatacaattttgttctatctgcagtttcaagcatacactggagatcttggactgtatcccccagagaaaagggaagtatactgtatattagaatcaaacttaaaatgggttaaaaggtaatactagtaaaattatatgccaaaaagttagataaaccacatgaaacgaaaaaattcctagaaagacacaaatcatgataggcttatatcgaatagatttaattaataaaatctttccacaaaggaaaacccaggcacacatggcttcatggaggatttcttccaaatgcttaaagaagaattaatactagttttcataaatgcttttaaaaatatgaacaggaaggaatacagcctaacacactctatatgaccaatcaaataataataatatcagtaactacaggcatactgaaatataagatcaagagaaaccatagtaaattgaaactgactcatagctgatgcacatgatatagttatcagatttgatttcgtaataactccaaccaacatgtacaagaaataatgataaaaccttctaccaggtaattaaaatctatatgaaagtatcaaatggaaagtgtaggactaaaaaataatgtgacaaattaaaattgaattgatgggctgaacagttgattgtacgtggctgaaaaggatttcatattgtggcagggcagtagaaaatatccagggtaatatattgagagaaagcaaagaaaggcctaagagatataaggaacatgatgataatgctgaacatatatctcagtgtgatccttgaggaggagaaggaatgaaatgggttacaagtaacatttgaagggaaaaatggtaattcggttttcagaacaaattcaagatatttagccagtgattcaagaagcactgcaaatccttctaatatgtaattgtgatcccttttgtcctccgtcttctccagtaccagtgccaactagattatacactctatgaaggtaagattgttttctatttcttctctgtacatctgcacctcttgggatagtgctaactattagtacataaaggatgctcactaaaaatttgtttcatttgtcataactgcacactggattgggattggagaatctgggtcaacctggccacgaagaccttggacttggcttacagtcttcaggatttagtcaggtccagttttgatcaagttgagtgggaaaaaagaagtctgaaagccatggccaaagtgacatgaaatgaattttaactggttgaagactgtgaggtctctggggctaaggtgggtctcggctagtgcttgattccggggtgcttcaagctaattggcccaaattcccttgccaaggctggaacctaatgcagccttgacttcatgcccagccctcatgggtctccttgtccaggagggtggctggtaacagtcttgagcatcctgtgagtgcatgtggatctgaatcaaatcagaagcaatcacataaggtgtgattgagcagctcacttgaataaagacttcaggcagagcacaccaaagctccaacaacctggctagaccctcttatcatgaccctgttgtttccaggctggacggaaacaagctaaacagtccttggatgctgattcccatggctgtctatgcttctcagtattataggaacatagggatcaatggaatatagggatcaatggaacatagggatcaatgacatagggatcaatcaatgacgtcaaggaacatagggatcaatggacacatctttgactgcctgaatttaataacctggtgacagaacaatttgtatctttacgaagtttgggtaaggatcttaagcatagtgagggtcgagggtcattgcccagactcagtctttgattgcaggcctccccatccactgcagcatgagcacctcctgtgagctcaccctgattattccggatccatgtaagggaggtctagcttaatatgcatgtattgagaatactgtgtgtcctgagggatcctgtgggacatgtggtactaggggccaaagtctcaatggcaaattaatgggaaaggatcttctatcaagtctttgccacttactaattctgtctcttccaaatgaggcgttcagaggtaatttcctgagattgtaaaatcttagcagtttttctcagaatgtcttaaagggaccatctgcaccagaatctcctgcagtgtgtgtgcatgtgtttttttaaacacacaattttagatcccacaacaaagctcctaaatcaaaggattgaagagatgggactagggcctgattctaatgggggcagaaatagctcccaaaggtgcaaaaatgggattttggaggacaaaaactcagctaaagcaatggttttgtgaccctccatccggtcacattccgtaatcagatatcccagcctgtgtgtattattacaatttcacagagggtgagggggtgataataaaaaacagattgagaagcccggaactagcaacattcatcttaataaaatcctcaagttattcttatacatcctaaagtttgagctctacttaggaaaggaaatctgtatttcagcagcattgctgtgcaaatagacatttctgtggtgttgataacataatttctatattcctgcttcttgcttctcttcttgattgacatgttaatgagataagatacaattttcaaaggctttctcaaaggactatcaactgtatggaaattctcaggcatacttttttagaagtcttcacattgatgttttcattatcatttcaggaggaaaaaaatgacactggcttgatactttgttgttattcattgtaacttctttatttagaaataaaatcaaacttacagaaaactttcccaggtaacacaagaactcccatatcccctctaaccaggtttaccaattgctaacttcttatcacctgtgattgtccttccctctgtctggaaactgtcttctgcagggcttataacaggaacagaattgagaacgcaggtatgcttagttttatcttcctttcctctgttgatgttaaatgtaacacctttgtgaattcaagagccactgtggtggagattgtgtgagaggaggtatagattgctatgcagtcacatgtccacactagctaatggggtctccaaagaccttacagataaatggtggcaatacagtatctagaaacacaaaataaatgctgacaaccaggtggactattgtgattggttattgttggtgatggtgggaagcagctgtgtagtctattaaagctacttagcaaattttatgatatattttagtccattttttaccctaatagctgaaaatttggagaatgaatgtttctttttaaatatcaaatcatgcccccccaccccctcccacaggcatctcgatggagttctgctgcagcttgatgatgaagccacaaatatacaataaatgctgaatcccttccaagcggcaacactataaaaggaagcctgcgcttcgttattctatttggtccccagatggctgttttccttaggctgtttccttgccgattttgtcataacagaaagattcagagtggtgctgccgtttcacttgactggccgctccaatcatgttattacaaagttgctatgaacccgtacctttttggataaagtattttaacagaaatttgggtaatttcccacacaattagtaattctgaggccaataaaatggatcttgatcctggctgtgattttgaagttttactctctgatgccgtttggggttaagggcacaatcactggagtcctgttgctacacttgagttctagctccatcatgtacctacagcttcagggaaccacgtaatgtaacagagcctcagcttccttattagtaaaagaaagagtgacgattatagtgtctgtattatagaggtgtggagggaattaaagtaattcttacacgtaaggtactcagtacagggttataccaaagatgttcaacatgtattcgtttcataattttcttctcaaaattattataaactaattattacacaaatgatattttcttcattgtatcttcacatttaggtctcttacaattccagtttttaacccttagcagagccatagaatttagttcacactactatctttatatgcgaagaataacctatttctctatttggccagtagtcgactttgtcttattcttgagtccttactcatggtaatgatgggcaagccagttaatatcgagtctgtggttctaatatggttccatcttgatcatgcaaacagccctctcaaaaaaactgtcctatctaggacaaacaaaactcagattgcccttttctcactaggatgatgccgggctggatggaggaagaagcctttcttcctagcctgtttctctgtgatgaaaaggaccttcaaagagcttgagtgtagccctgctctcattcctgggcattcctgtgcaatgttctttatgagtttcatgattgcccactgtagtgatctggagctctcccttgccagcttctgaaagctgactggtaaaattccaggaattttgtgagttggttgtgaaacagttaaatactacctatattaataattaaatgacacgaacttacaatgcagtagattgtatttaaagcaaaggtaataaagattcactttctccatgctcagcattctcctttgccttgtatatttccccctttgttctacttttgtttgataaattatacactcatcctccaggttaatatgctaaatttgcctcacgtatgttctgcacttaaattcaacatttagtaaccagaaagtttggaaaacattcagaatagatcttaaagtgtggattctatgatatattattatggggttttattgcacgtagtcattccagtcatttattgatccttaagaagtgcctgaagcatgctacatatgttgtctcatttaattctcacaaacccccatgaaatgagtacaactgtccattgttctactgacaaaaaactgagacataaagttcagtagctttccaggtctcatgctgaaacctgtgtaaccctaaacccaaagaatatggatcactgatttctattatgtataattcactgtgtgtctgcataatggactctgcataaaaatctgattgcattttactaatattataacatgatacaatctacttcacactatctttgtagtgagatcacacttatgctatttctttgcagaatataaaaagtcaatattagttaattcatgatggataatttcatttgctaaaagaataaatactagagtaaaagtgctgtctatcatctgaggaaaccattggcaaatgtatgaaatgaactttctattctcatgaaagggattttaaacactaagagtagtgagtacatgagtttgcaagaggtgccttcatttattctatatatatatagagagaaagggaggcagagaaagggtggggggaagagcatctccataccacgaaacaggacggttcttagaaatacagtgaagaacaagagaaagatggccttggcctcctcaacttcttgtaacagcagagaaagaagataacccagttggcaaatgaatacgacacgagctgtcaggttacagctgatactacaagtttgccacctttgagaatgtttttgtaacacactactcaatgttagcagattctaggttatgaaaataattaaatccttgattgcagaaagaacatcatcaaaggaaagtcccttggcaatgagtagatgtgaacatgcttctatttaggaacttcttctggatgtgctccaagggtgcgctgatgtaaggaaagcgtggccaggatgcacggggcagggcaggctgacctggctcacaggcggaggcctgtctccctcatcacacccactgcacccaccgtcaaagagcttggccttcctggagaggaagctttgcatagtcacgatgtctgccaagactcatgctgccttctgtgatatgcagtgagatttggggaagatagtcagagactagacattggaacacataaaagaattggagtgccataggaaagaaggccccttcaggcaacatttcaagttacagataaagttaatgggaagacagtatgcctcagtgaggaatgagtttgaacctgagccattttgtccagttgtgtgtaataatgaaataaaagagtaattgttgctttaattttgtgtgtgtggaaaatgcattcatggtattttattaaaagtatgatattgctgttagtagtggaaacaattatagtgccttgggggattgaagaacctttctatggggcttgtcttatagcttcattttaagtagcagagaatggaacacaatcaatcaatctcttaatactctgtggcattctgtgtactaatgaattcacctttgctgttcaaatggaaatacaggtcacctttcaactgtgaatttattcgagtaattggtatatagtttgatgtatttgacttaactaatttggatatatgtggctttgttctgacgtgctttgtgagaatggtggaaacattgccaagggctaatggcaccagtggaaggttaatgtgcaaaagtaaacttttattgctttaagccaatgggccttaatgaattaaaaaataaaaataaaaattcagtgacctaatgcccgtgtgaacctagtgaagtaatttctatcattttgcttttctgttctacaatggatgaatacacaagacactttgaaacagtaaactttaaaaaatctgtttcactttctcattcatttgcatgattgtaatacgaaattatgttgcccaaccatggaataagtttgaagatgacaagaaacaccaccaatcatcataataaatagggtcagatggcacagaagccgtagtctttggttttcacagctgtttgcattttagatattaacgaaagcctacacatttggttccacacgtggaagaaggactctctgtaactccattctcctctctgttgttttcagtgcttcggctcctgaaggagggggcagacccccacaccctcgtctcctcgggagggtccctgctccatctggtaagaaccgcgacagtcagtgccagtgcatggggacacccgggggagagtacattacaggttcaaacccaggaacgaaatgtacatctcacagatgatgatcagaaagatgatgtgtttctaattaacaggcttggatgataagctgcaattattattaattactgtattgaagtttgtaaataatctagagtttctaccctaaagaaatcacttttaaaaactaatagcattcaaaataagtaaaataatattgtatcaattatacagtattaggcaatcatcctttcttttttcctacaagttgtccttattcctctaatgaaattttactatactttgctcgtgatccagctcttataaaggcaaatacagcctgccttgtagtattttagaaacaaagtagggggtaagtgaataaacaaataaataactacatttaaaaatattatattataaataactgcatttaaaatatattagattcgtgtgcaagaaattgttgctggttctgttcagggcaaaaatgaggtaaaagtcaacaagtattcgatttggtggtctttacaactaatttaaagatagaaacttaattttgaaaaatatagaaattaatgtaagatatcaatctaatttatgattgtctctcaagacaaaaagtaatgctatatttcttcacattatagcaaactgtagtagagggggtcatgcccttaacttccagaagctccttaacatcacataaattttcaaccttgattgcacctggggatcatgtgggtgttattaaaatactgacacctgactcccaacctgagttgagcccacaaagattcttacttattttttctgggatgtagcttgaccgctgggagttgttaagacttcccaggttattctaatttatggccaacattggggaaaaactgcatgaaagagaaactggtgtataccaaaggctcaagagatctggaatgcaagttattatacagtcagcagaacagaaaaagaacagagaatattgtgatagaagacagtttgccaaagaatataggcgttttctctctagcactggaaatagatacaaagagagatttcaaggtaacgttttccttctctggaatgttttggttatgaaacgtctctgttttacactcagatcctcatatggcttccatgatattttcaaggagccatgtctcattagtccctagatcctaggtttaattttaagcaagcctagactaggcacattctgctaagagtcttccatagattaatattctcttcatggcaaatatcgtaagcctgtttttttgtttgtttttgttgttgttgttgttgagacagagtctcactctgtcgcccaggctggagtgcagtggtgcaatctcggctcactgcaagctccgtctcctggttcacgccattctcctgcctcagccgcctgagtagctgggactacaggcacccgccatcacgcccagcgaattttttgtatttttagtagagatggggtttcaccatgttcgctaggatagtctggatctcctgacctcgtgatccacccgccttggcctcccgaagtgctgggattacaggcgtgagccaccgtgcccgcccataagcctgtttttcgggaggtctagttatcagcatgtttgcacgtcccagtagaaaacagacctcttccatgaacatatcagtgcaagtcattgttgctgttactaggaaagtgttatttctgtgtatttatgtgtgagagagaaagaggaaggaaaggagaaggaagaggagttggaagggaaacaaggagcacaggggacagggagagactgtcacttcttcacgtgtgtgtgtctgtgtgtgtgtgtgtgtgtgtatatatatagagagagagagattagatatgttaatttttatatttttcaaaattaagttcctatctttaaattagttgtaaagaccaccaaatcaaatacttgttgacttttactttatttttgtccctaacaaatatttttctatatatagatgatatagatagtatctgacttttaatgaacacatatatcactatgctcccaatcaacaaatcagcagttgctttcttgatctttgaaataaagccacaccaccaccatctctcatcccctcgacagctgccagtcggttttaaaccaccatccctcttttctgggtacacagctttcttcctcttctcccaggttccatctttgcctgcactatactgtttcccattcacagccgggtcgtgtcacttctgtatctgaaatgctccaacagctttccttctctcataagtaaaagccaaagtcctgcttatggccacaccatgatctgtctcaagccccagcccacagccgttgcaacttctccagtcactttccctctgcgctctgctctgctgacaccggccaccttgctgctccttcagcgctggcccgtgctcctgctccgtgtgctcttgccgggtttccacccagcacatgcctctcagatgtacacggctcgcttgctgacttgctgtgggtctctgctcaacgtgatctaaaggagcagccctccctggcttgccctatggggtatagtaactcaccactgacgcctcacaagcaactccacttccattcctttatcttgttctttcccatcttttatagcacacttgtcaccaaacccatcataggttcatgtgactattttctatttcctagaatgttagctccatgagagataggacttgtcatattttcatgaatattataatgcccaggagagtgcctgatactcggagatgctcagtagatttgttaaggagataagctaattaattaatgttactacttaattaatatctgacactgtgatagatattggggtgaaaagatgcaaaatgcatatactgtgtcatctgagggagacagaaaaataaaccactgattgcagtggactggagagggataagcagatgatagcgaaggaggcaaacaatggggccacaattattttgttgtggctgcttctgggcatcagttacaaaggcttttctcactctcctggtccggcttaataacccatttgtccaagctctcataacatacactccttgcttctctgtagatattgccacaatggggtataattaatggaatatgtggctttttctctctgctagactgaaatctcaaaaactgtgactgtcttggatacttttcttagcaagtgatgcatagtgaatacttgtccaaggtctcataacatacactccttgcttctccgtagatcttgtcacaatagattataattaatggaatatgtggttttttctctctgctagactgaaatctcaaaaactgtggctgtcttggatacttttctgttcttagcatgtgatgcatagtgaattttcaatgcatagtcaacgaatgaatgaatgagctctaaggatataagggtctctttgggtgaagacctaggtaacagtatacagagtataatctaagcctaggtgacaaagtataaagattcataaatggtagcatctgaaggaaaaggaaatgagaaggttaaactgatgaagtagatggaagccactttattaactcccaacccagtgcaaggatattgtatttttatgttgttatgcaaaggttgtgagactaagacaaagtggaggatgaatctggaggacggataaggaaacctcgtggcagctgaaggaggaggtgctcagtgctaaagtctccttttcctggggttaccaaataaataaaaacaaatgaaaaattgcaggttgctggagagatgaaattacagggtttcaaaatgtcttaggtactgaaaaaggcaatgtagccatctaaaatgtcaagtgtgagtatctgtgctgttggcctcaccttttgggcgtcccacattacagagcctgatgcttcatcagcactgagctctaattatagacgatcagcgactttgagggaaagagagaatgcgagtgtgggcatcaagaatcagctgcagaaattacttagttgtgtttaactcaattgctattaaaggtagatatttgagaaacatattttaatgttttggccatatagcatctttagttttatcttatttttaataaaatttcaacaaatacatctgaattaatctttttaccccaccatttattgaatgcatgtgttaaacatatggcaggtatcaggtactctgacagacagaaggggaataattgcaaaaagtaacaatgtctgtatcccaggcagttggtctcatgaggccagtatagaagaaaccttagatttaactctttacaaaaaaaaaaattatgtttatgaagtaaaaaacagtattacatacgttttgctaaaatgttgtccagggttttgttattacctttattcgatgagcaattgagaaggcgctcccaatggtaactgaaccctccacctcagactatagccaagctcaggtgaaatatattagaaataagaactactctttctttgatcaagtgaattctagttgtaacatggatataggaatttaaacagtggaattcatgtagctgttaaaaatattcagctggccaggcatggtgactcacgccctgtaatctcaagcactttgggaggccgaggcgggcagacacgaggtcaggagatcgagaccaccctggctaacatgacgaaaccctgtctctactaaaaatacaaaaaattagccgggcgtggtggtgggcgcctgtaatcccagctacttgggaggctgaggaaggagaatgttgtgaacctgggaggtggagcttgcagtgagctgagatcacgccactgcactccagcctgggtgacagagcaagactccatctcaaaaaaaaaaaaaaaaaaaaattgagccataatgtatctgaaactatgtccaaaacatattatacatgcccaaagcgggttacagaatagtgcatatagcacaatcggatatatgagagagaaagagagaatccttttaacagccaacggaggatcttgaagaccagataagaaattttcaacagtgactcaggttggggaaaaggggaccaggttttgtaattattttctgtttccttttacaaatgacttgaacattttaaataagaaacatgcgtgtttcatataataaaaccaacatataaaattagttaagactgtttttattcaaagtttaaattttgaataatttaataatttggctactcaaacaagaaaatgtgctgcccaaaaccgagctgctctttgctcttcaccatcagtttctctaaaggcttgcatgctataagaagcagagataattagcaccttactacagtaggggtggttcaacagcctaatatcttcaaagtctagcagaaaataatgtattttgtaaagaggcagaatatcaggattctagagaaaatgcctagagaaatatcttatttttaaaaatgtctaggtattaaagaacaaaaatagttgctgtgtggaagttgtccaccagtaaccctgcccacccacctggacattggccattgaactccaagccccttttttgctttcctagaagaaaaagagcaagagctacaagggcagactctagcaagaacatcaatcacagcagaagacaatatcccctctgcacaggaaggtattccacacggggcccccactccacatcctccaaggacctcacaggggctgttcctgcatgttccttggaggatgtggaatgggggccccatggaggatgcagcagcaggaagcagaaggcaggcaaggggcaggaaagagagcgggcacagccaggcaagttgggtgatactgatgtctgagggtgagcgctgcagggtgctgcctgtcgctggcaaacaggcaatggaggggccacggactgtgaacaagagactcttcacataaccccaggggtgcaattcaagattcaaaatcctggctggatgtggcttttttcaaattcattgtcttttgggtccttgagaaccatcacatccataactggaaagtccctagttcagaattttagatcattagtgagatatccagctgaatcttggaagagaatcgtaaccttgacctgcctgcggatgtatttttatcatgactccctgcatgcatggcttaggggacaaaagggcaacagaagagcacattgtgatgatgctttaaatgctactggaaacccaatggatgagttttccattttttaggaatacaccacacgggcctgatttgctctgcatcagatgatctaagaaaggccccagtgaagatagcaactagattttgtgtttcgttttgtttttatatctttgtaataaggaccccaaattattaagaatcagaactctttcctgacagggtgaaggcagataacaaggcattttccacagacttcttatagaattatagctcccctaaggaaacttgcagacattcaccttcaaagccactggtaacaaaatctttcctggagaaactagagttttgtagcaagaaagggtttccttacttatcagcctgaaactcacctacttagaaagtctttctttaagcaaccctaataatttacattactctctagatgtaccaaactgcttataattccacaaatggctgatcccattcctcctcaatatcactcaggctgtttcttactttggggagctctaccgagacgggccagcagctcaccacggtcccatctcagctttctgcctgcgtcatcccccagttgtaggttgttggtcctgaggtgagttcttgtttataatagccctctggcttagcacagcactgggggcatagtagttcctcagtgaatatgtacgtttaactaacagatatatgaatgtctcaccccaggccgcacccacttgttcactgcctcttgatccttcaagacaagctcctgtgttcccgtattcaattatccaattcctatcaggctattaggtaccttctgctgtgactccatagaatgctatgtataccttttatcataaacctcacaatatcaaacagcactatttcttaagagtagttactacgtaattcacctttatatataccttgccaagtacagctggaatatagtgttgcctaataaaatctagagaatttaaaatgcagcaaaccagtgctgctgatgaaggagattggtttacattcacccaaaaggataacaggtttttaggattttaaaatttctggatgtggttcggtgtttagagtctggttcaattggctggaagctgcggctctctgcagtgcaaatagaaataataaatatgattcaactcacagcattctgggtagtttatctatggcaagataatctggagtataatatttgccagagagaagatcatgaaaagcaaaaataagtatgttcaagataacactacagtgaatatgatccttcaatgtgacatggtggcagagaagtggacgagagtttgcaaagattcaagcacaggctgaaagggccggtctgcggtattgctgttgaataaaaacaagcgtatggaagttccagaatcatgttagattttgagaaattgcaataaatttaaatttattttgctactgatataaatttatctattttgtccgctacttttcttctctctctgtcactgtttctgactttcactgtagaaatgttctttgaactactgagaactcataaacataggacaaaaacatggactatatctcactcaaattgtgcacctcacgtcacttcttcttcccccatagctacctaaaagttcagagttttgttgttgttgttgttttttaatttactggtagaactgtgcctggcacatgacattcacgaagacaaccctggatcaaactggatgtttcctagtaattatttctctagtctcctctgccatgactgctccgtaaccactacagagaagagaaggggaagcttgcattgtaaaacatgtagacttgtgaaaagtcatgttaaaatagatccaacgctcattttaaaaattggtgaaagataactcttatgtatgaaccacagaatttgatttgaatcttcagacttgatgtgtgatttgtaaatatttgtaatgattttctgatttactgagtgatagatttcagggtcattcatgatatgttcattagccaatcagaagggccaggatccagaaaccaccccttacaccaagacagcagaaaaaaaaaattgacaatgcattttaagttcgaagttccctttgcttgtcatttggttcctatgattttcagtactttcagatgaatcaataatgtgcattgtgttgagtttgtatattaagacatattacctttgtttagaaagttacaaatgaaatagtgcagtacaagagaagctgtgaactgctgatgctgtgttgaaaagatttgttgacacattctaaccacacggtcaaagctttggacaacctttgaggaaggccttgctctctcgtcactttgctctctcagtttgtcttaggaggcagaatgaggtattgtagtcatagattgggatgccagaatttaatatttcagagtgaagccagtcttgctaatacaaaccagaggtgtggataaagattggtggagtccaggagggatgacattttggggttcttatgtggagtaagtggtattgttaacgcttcctctgttgatagtgttcaggagggatgacattttggggatcttatgtggagtaagtgatatcattaatgcttcctctgttgatggtgttctaagtggagagaaggatgtcatcatggtccccaagtcttccatgacagagaagagtgaccaggttgggagatgaggtagtacataaggattgggtaaatcttagaaagaagcacatcaatgtaagcgttcagtgattccagaagaatcaatgataagctcagaagatatccaagcttttttagtgctctgtggaagaataagtttccctacactggacaaggctgcaggagagatggtgttttcagagaggctgacttccatttaggttctctggacatttccagaagtggaaattgggctgggttcgcatcattccatggaggggagtaatctgtggccatgaaggaatctaggagcttagttgattaaagggcttggtaattcagggcaggcatcacaggcaggttacccatatagtcacacggggccttctttttagaaaggtaccatgcttgatttcaccctctgatatcactatcttgaaatcgtcaataattttaaaactggaagccatgaattttcattttgcactgggtcccaccttaactagctcttcttggcattttgagaggtaaatgaaggtgacagcaggagcttggggacctggctccaggctgcaggtggaggacctggtggtgttggagttctgctgggcatgacagaatgtgggttcagtcactttcttggtgccataaagtgtcaccagaaagtggctgacataaggaagaacaacctgaattgggaggaatatttcctggcttgaagaaaattctttctagggaagtagatttactacataacaatattataagaacattgtaacaggaatgttccaccatcacactcttttcagacaagagtgactagaaagtatttattgctgtcaaattattattcataatcctctgaaatgtgattcccaaaattatatcacttgagaggggctgatatcactttcaacactggatctaattaactctgtttggtgaaagacagtgaaaatccaagcttcaggtatctgaatataaatgtagattcctgaggtgcaggtcgaggatatcttgacaggcacagaaggaggaggtcacatctttattgattatacgctgagctatcacaaagctaaagagagcagaaaaggaattacttgcatatgaatttcctaaaatgaagtagatccgggcctcacattctaacatcaaatttattgaactttcatactgtgccactcaccttctgtgtccttgtacccaaacctgaagctccaggggatggggcctcagttcatacggtcaaggcactgagtctagtgacagtttttttattgctacacatcacccagaacatcagatacagaaagaccttagttcaaaaccaaaattattctgtaagaattcgcatttgtcattgcacctattgcttacttgaatcctaataatggtgtctgctaatacattcctccatactcttcagcgacctcacaccatgctttttcacggtggttgttgtacactcttgagacgatctgataataggggatggtatgagtattcagttagtgtatcatgattgtgaactgtaatttgaacacccatttttttggtgaagtgagagattaaatattttgccttatctttgaagctgtttgtttcttttgaaatactgaattttgagagttctttgtatattcttgataaatgtctttaacagatgggtgttttgtgaatattttgtcttaggttatggcttgtctttttattcactgagaagtatcttctgaagggtagaggatttttgttttaattaaattcaatttgctaatatttcccctgataggctgcatttttagtatcatactaagattttctgttatgttctttttagaacttttgtaacttttggttttacattttttgcaattttacattatgagtaatatttttatataggacaaaatataggtcaaaagtatttttatacatgtgtgtacccaattgtttcagtataattgactgaaagaacattctttcttcactgaattgcccttgccagtttcttgaaaattagttgtctatacatgaattgatctatttctaaattctctattatgtttcattgattaatttcattttatgccaacaccacactgctttgattgctataacttcataacaagtcttgaaattagttagctttagtccatgaattttgggttccaccaccctaaagttctttgggcaattttaggtcctttgcattaacttatgaattttagattcagcttttcaatatctataaaaaaaaacccttctggaattatgacacatttggattgaatctacagatcaatttgggaaggactggtttcttaacaatattgcatcttctgacccaagaacacactaaatttccatttatttaggtttaaaaaattatctcactaacgttttgttgattttggtgtgcaggtcttactgatattttgtcagatttgtccctaagtatttcaatattcttaatgctatcttaatttaaaaattatttttcaaaggcttaccactagcatatagaaatatctttgttttttgtatagtgatcttgtatctttcaaatttgctatcttaattattggttctaataactttgtatattccattatattttctacatagatgatcatgtcatatgcgaataatggcagttttaatatttgcttttcaatctagattaatttggcttcttattcattcctttttgccatggctagtactgccagtggaatgttgaagggaagtggtaaaagtgaacatgcttgtcatcttcctggtttcagtggaaggggtggaagttttcttggagacaattattagctcttgctttgttatccagtctaatactccctgccttttaactgtgtcatttagaatatttgcacttacttatatggttacttatatgtttggttgaaatctaccatcttccttttttttagtacttgtgtcatttgtttttctttcctctttttctgccttctttaggtttgagtatttttcgtgattcaattttaactctttagcggtattacgcacggtgcatgttattttggtggttgctttagtatttttaggatacatatttgacataaccctcccttgtttcaggtggcatcctacccattcacatgtagcataaaaacattccttacaatattatgttttcatttctccccttcccgcctttgttttattgctgtgatatattttaatctgtatagattataagccttatactctcttgtgatttttaaacaattatattttaagtatactaaatgaaaaaatatatataactcacagtcacaattctcagtgctcttcattttgatataatcttttaaaaagatctctcacagatcactgatgctctgccatttttaaaaaatcatttttctttccttgtcatattttgtttaatttatgttgctgctttggatttcattcatcttttcttctgaaatatctagtctgctgttgatcccatctaagccattaaagttctcatctctgaaagttaaatttgagtctttttaatatctttcatttatgtacttaacatcttcaatagatcccctcactttctgaacatagggaatatagttataaatacggttttaacacctgatttgctcattctaacaggtgtatctcttcttcatttgtttccattatcaatttttctgttcattgtggatcctattttcctgcttttttgtatacttggcaatttttttggtggattctagacagagtaaattttgccttgttgggtattcaatatttttgtaaataatcctgaactctttgggggctactaagttatttggaaacagtttcatcttttcagggcctgaatttgaaattttttagttgggaacagaacagcatttagtttaggactcatatttccctccactgaagcaaaacacatctagtactctacccagtgctctgtcagttacacggttttcagtctggttggcaggaacaggcaccgtttcttgcaacttatgagccctgagtcctctttcttttcaggcagttctttgcctgaccttgggcagtttcctagagtgcaagtgctgatcattattcagctgagcacttgagggaggcattctttaaaactttaaagtttttctctgtgcagctttgtcctctctgctactctgctctgaaatttagccaccctggtctctcaagacatttcaagagccagccctggtcaagccaggttcttctccctgtgctgtagcttgggaactctctcaaggtaggaggctggaacagtagtagggcttattttgtttgctgcccatcattcagaggtcatatattttgtttttcttttttagttgattcaagcaggaaggtacatctggtctctgttacagggaagcagaaattctacaatgatttgtttttaatggtactatccagtaaattggtgggtaaatttgtgtgccagtgcttccagtgggatattgattgacattcctttggggagagaaatctgttctatgcatacacatcacagaaaaagtatgtatctcataacccagaaattttgctgacctatttaataataggtttttaaaaactaattgtactaatatgcatttagcattatgtaacttatagatgtaaatatgaaagatactcgtaaggctgggtgtggtggttctcgcctgtaatcccagcactttgggaggccgaggtgggcggatcacgatgtcaagagattgagaccatcctggccaacatggtgaaaccccatctctactaaaaatacaaaaattagctgggtgtggtggcatgcacctctagtcccagctactcaggaggctgaggcaggagaattacttgaacctgggaagtggaggttgcagtgagctgagatcgcgccactgcactccattctggtgacaaagtgagactctgtttcaaaaaaaaaaaaaaagaaaaagaaaaagaaaaatactcataaaaggactggatgatttgaagaggccaatgcaaataaatatctgggacttttcaaaattgaacattcaagatggtaaaggcagaacatcaaggtacaggactcatctaagtgcagttgcatagattgtacacccgtgatgccagccctgacttatatatacaatatttacctgagtttgaactataaatagtaaataaagttaagttgctggatggtttgatttagtaaattattgaacatatataaaatgcaacattataaaatcattaaaattcattttaggagactcttaaatttcagctgttaactcttacaatatgacatgctgtgaaacgtgactagggtgaaggttacagatgggaatgttgagggattaagttagagggattctgaagggccttgtctatcttggatgccattaaatagttacactttattcttttgacagtgacaaaggatgcatgttttagagtagaagggtattatgatcaactctgtatttttagaaagataattattgtgaatggttcaagttttttttaaataatcctatctacaaatgaaataaaaaccagtaagtgaagtacttttttcgaccttcctactatctaccctgattttcttctttctgtctgctgttccttgacccagttccccagaagtcttgcgtatgttcttttccttgttggttagttggggaaatacatcttttcccaggttagcttcacctctcaactcccaaaattggtattgaagtttttttttaaatctgtggacatttggaataagccatatcacagtttgtaataatttgatatttccttgtattctttcttttagtgtgctcggtatgataatgccttcattgcagaaattctgattgacagaggagtcaacgtcaaccaccaggatgaagacttctggacgcccatgcacattgcctgtgcctgcgataaccctgatattgtcctgcttcttgtattagtaagtaaagcaattcagtttaccatttgaagatttgatggcatgtaaaaggctatatatttaactaatgctattttacaatatgtaatattttggttgagaaaaatctgcatatgttatcatgtatctccctagaacacaagataattagagactaaggttgtgggtcacatagtttataaaacaatttgtgcagatactatgccaaatgcaacttctcttgcctttccttgggaattatatgccttgatacaagtcagtttcaactaaaatggtttgataattttgcttttcaattcattctcatttttaaatttttagccaaagaggcataacattataaggagatatggtttatattgaatctttttttttcttggttacatctagtaaagaagtgtctacaatgtttgtttacatgaaaacgggaactttaaatataaaaagcattggagtttgttgttttggttgttattttcagttaatcttacatccagacgttgatcctcacacatactttattttggaatagtgatctctagaaagtatttcaagaaactatttacaatttttagaaaacacactggaatatatgagcaagaatgatttgcttttattttatttatttaaaaaattaacttcttaatgccttgctattatgcaactggattttcacatttttttatgtagactctcaagaatttacacaaaagcaaactgatgctcgaatatattaaacaacttgccgtaagccaaaagcaaactatagctaagaactcaagttcattgtcagaagtccattttttgtcactgagccgtgctaccaatgttggtttcccatgcctgccataccaattaccgcctagttggtggctgaacacaagcacccttgcggaggttaggagtctgaagtcaaggtgtggacagggccgtgctccccctgtaggccctagtgatgaaactttccttggtgcttcctagttacagtgacccctgcagtccctgatgttccttagattatagcagcatcactccagtctctgcctccatcagcacatgactttcttctgtgtcagtgtgtccaaatctctcattctttcctttcagaagataccagtcataggatttagggcccgccctaaggcaggtggcctcatttaacttgatcacatctccaaagaccttattccccaataagatcgcatctacactactagggagcatagcttttttctggaaaacattttaaatacaccatactgcccctcttccccccctcttaaaattctgaacaaaaatattttgggattaaaggctgtatattgggactgtcttaatcttgtaggaggtttaattttgtctagttttctctgatttgtccttcaagaatatgtacactttctttttttttttttacagtagaaatatatgtcactaaaagtgtatttctttcaaattctggaagatggagggtatattaaggaaagacaaaggaaataaagattatttagctgaaatataaatttttagagggctagtactgtatataaaaaagcatgaaaatctacctgactcatttataaaacaagatttttgttttgtagatacagagcctaagaggcactaaattgccggttcaccataaaggccatagaatttctccagaattgaaaaaaactataaaatatattacagaaaggaaccaaatcgcctttcgagtaatgctgtgacctgatcaactttagacatctttagaatgctaacaactcatagagcacgcagctgggtcatttaaggaggaactacgttcatagtagttgtttgatacattttttgatagttcaactagctgctttaattataaaagaatgagataggcttgattcatggcttttgcagtttttctatgttctgatttctttttttctaaatacttgttttaatttttttcaaagcccatccttatttcttttctctgactaattattattaattaaattaagccgtgccaaaagaagctctttcttcctgcatgcaaaatggccatacttattctcacaaatgaatattcatatggttgtgcttaaaatttttaaatcctgcttccatttcctcaatgcaaatgtctggacacaggcttcagtttcttgagttcagaaaggtttgtgagatctcagtttcactgccagccaggattcccttcctccattctgaatgtagcagtttcttatttctgatcggaaagagcaagaggacttgccttctttctgtagtctctactgagtctagatcgtggtatctcacatgatactcacaattaaatattgcaggaacagccctgaattgatgaaccaaattatgacaaagaaaagaagagtcagatctgagttacatttcaagcaaaatagctcataaaataacagtgtagtgactcaggtgcagtatctataagtacatgaaatgactccccttcagcatctaggagactggtatcacaggtagcatatgataaggttcggccatgtccccactccaatctcatcttggagttcccataatccccacatgtcataagaggtaactgaatcataggcgtggtttcccccatgctattctcatgacggtaagttctcatgagatcctatggtttcataaggggctttctccttcactgggctctcattatttctcctgctgccctatgaagaggtgtcttccaccatgattgtaagtttcctgaggcctccccagccatgcagaagtgtgagtcagttaaacctcttttctttataaattacccagtctagggtatttcttcatagcagcgtgagaacaggctaatacagcataattgtcagaactaacatttatagtctagaggtagcaaaacacttagaccaccttgagcacaagaaggaggcatgtttataaccagagctaggattggggcaggccatcaggactggtatctggcgtaacaacataattataaaaataaattagatatactggcaagttattcagacctttcctatgactccttgtgtaactgaggtaatagacattagccttcttcatgttgaggctaagcagcatcttccaaaggaaatttgattaaaaaatggcaccaatcctggtctcctaaatgaatgtttagaaaaagggtaacaatttggagaagtgttatattgttgtcctaactaggaataccctcacatcattgtcagactcagcgctaagttcattaggatgtggagagttctagacactccttctctgtacttttattttatcttcctattctttgatacatgcccgcatttactattaagattaccagtacattatctgtgttccttgatatttcatcccattacgaatattatacttgtttaaataatgacttctttttctctttgttcttatgagatacagtttctgtaactcctatttgttcccatggcaacaactcaatcacattaatggccagttgcctttaaaataaacgtctcttctgcctggaaaaatttgatgtatattcagtaattctttgtctaactaacaccagcttcaggttaggcatttaataaataattagcttctagcaagtcacagaagtagttagcacatgcatgcattgctgtttgttaaaacggtgcctagcacttgatagatgcttagtgtatgcttgaatatcatctctcaagctacatatatgaatcaacaaatgaatgaaagaaagcaggccagtttttggaattcagcctgaaaaatattgacaatattaactcataggtaataaaagctgccgtataaccacatccatccttttacatattctagacttctttacctcacgtgttctacacttgtattacaagtgcttgctttagcacacaaatcatctcaatatctgatgagtttgcttttccttaccaaacagaattgagggggaaaaaaactagttgtgtttcatggatgatcatagagttaaatgtataattttcaaattattagcaatattttcatggctcagcaatgtcctgtttctcacagtgcagaataatccaacctaatatacaaagtaatatatctattagttgctctcattcaatgacttctactaaccaatcatcatcttcattcacttaattaatataaattatcaccgattatgtgtgaacataaggcctgccctgagggaaattacagtttgtttattcattcattcatttactaaatatttattgaatgactactatgtttgagatgctgcacagtgaatgagaagatattttatactctaatggtgaaaacaaacaatgcaattaatcaaatgaacccctgggaaatttgattaatggattaagcaaatctgagtagctgtattcataccgtgttatagccagcctaagtatccatccacagaagcaatttactctgaataaatgttgataaaatatgttgtcataaaaattctaattattgtaaaaatacattcctgccaataacctcaaaagataaatgtattttacttgccagatgaaacgctattgtccaatgtggaagactgtatgctccatcttctttccattttccagagcttgatgatgggccagagagactgtgcagcattgattcatttattaaatctgtggtagccgtctgtgtgtactcaagggagtcagcagtgagcacaagcagaaaaagccctgccttttagagcttacattctattaaggaaaagcagataaaacacacaaatgactaaaatttatagtatatcaactagtaagaggttttggaaaggtcaggaagaaaggaacagagtattaaggatggcttcatgaaaaaggtgacatgtgagccgggagctacgtggatacgtgggtgcaagtgtgccagccagaggggacggtacatagaaagctatgtggcagggtctgtgtattggagggacagcaaggagaccagcacagctgcagtgaagtgacaggggtcaggggatagatgtactcagaatggcatggtgaggtcaagcctttgcaaggacttgagaatctgctttcaactaggtgattagggaagccctgggaagaaggaggtatggaaagaagtgacgtgatggcttcagtttaagaggatcacgtttgctgctctgttgaaattctacaactgagaagaacagggaacatttaggtatctattgtccagactagaagtggtggaggtggcaagaagtggttgacatctggatatacaggattttgaaggcagagttgtctgtattttgtgtgattggatttagggtggagagaaaggagtcacagatgacttccacttttttagcctgaaacctgaaaagttgacgttgtaatttttgtttgctgagatagagaaagttagaatagagtgaatggcagaagattgggtgtaaaaatgaatgaaggatatattcaagccacatttttcaagttcttcaggaagtcatccataaaaataattttattgatttgtgaggtgatttattctgagttgctaagcagagacatgtgagtgtgtgtgtagagggggcatcgtctacctaacagcactggaacagtgctacttgaattgaaccacaaatgtgttttgttttggaggaggctcagctactgtgaatgaaaactctagcagatactaacaattaacttttatgcagccctccctatgcagcaggcatttttcacatgctttacaattagtaactcccttgattctcacagaattctattatgaaagtgccagcgttttctgctttatgtagctgaggctactgattcaagaacgaggcaaatctacatgctgaagtccagatagtattagtcataggcacaagatttgatcccataaaggccagcatcagaacttggacccctgaccactctgatctggtgctatattgcttataattcattcagagctaagagtccctaagtgggctaataatatcatgattttcactgtaatattatcatacatttatttttaaaacacagctttttaacttgattatttaaaattggggaagaatattaagaaatattacacagtagagggccgggcgtggtggatcacacatgtaatcccagcactttgggaggccgaggtgggcagattatgaggtcaggagatcgagaccatccaccatcctggctaacatggtgaaaccccgtctctactaaaaatacgaaaaattagctgggcatggtggcaggcacctgtagtcccagctactcgggaggctgaggcaggagaatggtgtgaacatgggaggcggagcctgcagtgagccgagatcgcgccattgcactccagcctgggcgacagaatgagactccgtctcaaaaaaaaataaataaataacacagtagattcttcttatttaaggtagtgtgttctatagagtcattatgaacacagatacttagcaaatactgagcttcgctcctagaggaaatacaaggttaggttccttcaaatctctggtcatgatattttcataaacagatcagcatatcaccaaattttatgtgtctgtttgcaggcaccttatttaatatataatattgctttttttttttagcacttatacatatattattaaaaaatctttgatgcaataaaacaaaggcagcatactaaataaagacaaaagcattgccctgttatatatcatacatttgtaatagcaggaagtgtgcaattaatttctatttaccatcccttcttctctagaaaaattgatatcgcttcctcacaatttcagcaagatgcttgtaaattcccttggtttgcttatagaacatgtttaaagataatcatattttcaacatattttcatctctaggaactcttcatgccatgggctccccacctatgttggacagagtttttactagtaggcaacaaaatccatactagttagaataatcggaaagggaatttaaaaatcatattagtttgcttacaggatctccagggaaaccagggaatgaacttggctgccacacagccaagaaaatagcccaagcatacacagaactgttctagcaaaatatcaatgctgccgccacccactgcttggcagcatggcaccagggcactcagaatttcatctcagctgctgagaagagtcaattgcttttgctatcaagctttctggaaggtatcatgtcccatggtgtgggcagggcctcttgctcttcacttcattttccagcgtgtcagcttggtggccactaggtcgcatgtggaattctgtctgcaatggagcctgggaaatgtagtttctagcctcctagaaagtccagtgagaaggaagttggctacaaactgcacacatggtaggagaaaggtagttattagctagaaccccacgccaccactcagctgtgactttttggattaatgtgttcttgtgtccctagcaggacaatagtcttgagagccaagatgtatagagagagaaagcatcttataagttctttttatttattttttattatactttaagttctagggtacatgtgcacaacctgcaggtttgttacatatgtatacatgtgacatgttggtgtgctgcacccattaactcgtcatttacattaggtatatctcctaatgctatcccccctcccgcccccaccccacaaccggccctggtgtgtgatgttccccttcctgtgtccatgtgttctcattgttcaattcccacctatgagtgagaacatgtggtgtttggttttctgtccttgtgataatttgctcagaatgatcatttccagcttcatccatgtccctacaaaggacatgaactcatccgtttttatggctgcatagtattccatggtatataccatgtgtattccatggtatacaccaagaaatgtgccacattttcttaatccagtctatcattgatggacatttgggttggttccaagtctttgctattgtgaatagtgctgcaataaacatacgtgtgcatgtgtctttatagcagcatgatttatagtcctttgggtatatacccagtaatggtatggctgggtcaaatggtatttctagttctagatccctgaggaatcgccacactgacttccacaatggttgaactagtttacagtcccaccaacagtgtaaaaatgttcctatttctccacatcctctccagcacctgttgtttcctgactttttaatgatcaccattctaactggtgtgagatggtatctcattgtggttttgatttgcatttctctgatggccagtgatgatgagcatttgttcatgtgtctgttagctgcataaatgtcttcttttgagaagtgtctgttcatgtcctttgcccactttttgatggggttgtttgttttttttcttgtaaatttgtttgagttctttgtagatcctggatattagccctttgtcagatgagtaggttgcaaaaattttctcccattctgtaggttgcccgttcactctgatggtagtttcttttgctgtgcaggagctcttttgtttaattagatcccatttgtcaattttggcttttgttgctgttgcttttgatgttttatacatgaagtccttgcccatgcctatgtcctgaatggtactgcctaggttttcttctagggtttttatggttttaggtctaacattgaagtctttaatccatctcgaattaatttttgtataaggtgtaagaagggatccagtttcagctttctatgtatggctagccagttttcccagcaccatttattaaatagggaatcctttccccatttcttgtttttgtcaggtttgtcaaagatcagatggttgtagatgtgtggtgttatttctgaggcctctgttcgttccattggtctatatctctgttttggtaccagtaccatgctgttttggttactataaccttgtagtatagtttgaagtcaggtagcgtgatgcctccagctttgttctttttgcttaggattgtcttggcaatgcgggctgttttttggttccatatgaactttaaagtagtttttcccaattctctgaagagagtcattggtagcttgatggggatggcattgaatctataaattaccttgggcagtatggccattttcacaatattgattcttcctatccatgagcatggaatgttcttccatttgtttgtgtcctcttatttcattgagcagtggtttgtagttctccttgaagagatccttcacatcccttgtaagttggattcctaggtattttattctctttgaagcaattgtgaatgagagatccctcatgatttggctgtttgtctgttattcgtgtataagaatgcttgagatttttgcacattgattttgtatcctgagattttgctgaagttgcttatcagcttaaggagattttgggctgagacaatggggttttctagatatacagtcatgtcatctgcaaacagggacaatttgacttcctcttttcctaattgaataccctttatttctttctcctgcctgattgccctggacagaacttccaacactatgttgaataggaggggtgagagagggcatccctgtcttgtgccagtttttaaagggaatgcttctagtttttgcccattcagtatgatattggctgtgggcttgtcataaatagctgttattattttgagctacatcccatcaatacctaatttattgagagtttttagcatgaagggctgttgaattttttcaaaggccttttctgcatctattgagataatcatgtggtttttgtctttggttctgtttatattctggattacatttaatgatttgtgtatgttgaatcagccttgcatcccagggatgaagcccacttgatcatggtggataagctttttgatgtgctgctggattcggtttgccagtattttattgaggatttttgcatcaatgttcatcaaggatattggtctaaaattctttttttgttgtgtctctgccaggctttggtatcaggatgatgttggcctcataaaatgagttagggaggattccctctttttctattgattggaatagtttcagacagaatggtaccagctcctccttgtacctctggtagaattcagctgtgaatccttctagtcctggaccttttttggttggtaggctattaattattgcctcaatttcagagcctgttattggtctattcagagattcaacttcttcctggtttagttttgggagagtgtatgtgtccaggaatttatccatttcttctagattttctagtttatttgtgtagaggtgtttataatattctctgatggtagtttgtatttctgtgggagtggttgtgatatcccctttataatttttattgtgtctatttgattcttctctcttcttctttattagtcttgctagtggtctatcaattttgttgatcttttcagaaaaccagctcctggattcattgatattttgaaggattttttttgtgtttctatctccttcagttctgctctgatcttagttatctcttgcgttctgctagcttttgaatgtttttctcttgcttctctagttcttttaattgagatgttagggtgtcaattttagatctttcctgctttctcttgtgggcatttagtgctataaatttccctctacacgctgctttaaatgtgtcccagagattctggtatactgtgtctttgttctcattggtttcaaagaacatctttatttctgccttcatttcgttatgtacccagtagtcattcaggagcaggttgtgttcagtttccatgtagttgagcggttttgagtgagtttctcaatcctgagttctagtttgattgcactgtggtctgagagacagtttgttacaattcctgttcttttacatttgctgaggagtgctttacttccaactatgtggtcaattttggaataagtctgatgtggtgctgagaagaatgtatattctgttgattcggggtgaagagttctgtagatgtctattaggtccacttggtgcagagctgagttcaaatcctggatatccttgttaactttctgtctcgttgatctgtgtaatattgacagtggggtattaaaatctcccattattattgtgtgcaagtctaagtctctttataagtctctaaggacttgctttatgaatctgggtgctcctgtattgggtgcatatatatttaggatagttagctcttcttgttgaattgatccctttactgttatgtaatggccttctttgtctcttttgatctttgttggtttaaggtctgttttatcagagactaggattgcaacccctgcctttttttgttttccattttcttggtagatcttcctccatccctttgttttgagcctatgtgcatctctgcaggtgagatgggtctcctgtatacagcacactgatgggtcttgactctatccaatttgccagtctgtgtcttttaattggagcatttagtccatttacatttaaggttaatattgttatgtgtgaatttgatcctgtcattatgatgttagctggttattttgctcattagttgatgcagtttcttcctagcatcgatggtctttacattttggcatgtttttttcagtggctggtaccagttgttcctttccatgtttagtgtttccttcaggagctcttgtagggcagacctggtggtgacaaaatctctcagtgtttgcttatctgtaaaggattttatttctccttcacttatgaagcttagtttggctggatatgaaattctgggttgagaattcttctctttaagaatgttgaatattggcccccactctcttctgacttgtagagtttctgccgagagatgtgctgatagtctgataggcttccctttgtgagtaacccgacctttctctctggctgcccttaacattttcccttcatttcatctttggtgaatctgccaattatgtgtcttggagttgctcttctcgaggagtatctctgtggcattctctgtatttcctgaatttgaatgttggcctgccttgctaggttggggaagttcttctggataatatcctgcagggtgttttccaacttggttccattctccccatcactttcaggtacaccagtcagacatagatttggtcttttcacatagtcccatatttcttggaggctttgttcatttctttttacacttttttctctaaacttctcttctcacttcatttcattcatttgatcttcagtcactgataccctttcttccagttgatcaaatcggttactgaagcttgtgcattcatcacgtggttctcgtgccatggttttcagctccatcaggtcatttaaggacttctgtacactggttattctagttagccattcgtctaatcttttttagaggtttttagcttctttgtgatgggttggaacttcctcctttagctcagagaagtttggttgtctgaagccctcttctctcaactcgtcacagtcattctctgtccagctttgttccattgttggcaaggagctgtgttcctttggagggggagaggtgctctgatttgtagaattttcagctttttggctctgttttttccccatctttgtgttttgtctacctttggtctttgatgatggtgacgtacagatggggttttggtgtggatgtgctttctgtttgctagttttccttctaacagtcaggactctcagttgcaggtctgttggagtttgctggaggttcactccagaccctatttgcctgggtatcagcagtggaggccgcagaacagtgaatattgctgaacagcaaatgttgctgcctgatcattcctctggaagcttcatctcagaggggtacccagccttgtgagatgtcagtctgcccctactgaggggttcctcccagttaggctactcgagggtcagggactcacttgtggaggcagtctgtccgttctcagatctcaaactccgtgctgggagaaccactactctcttcaaagctgtcagacagggacatttaaatctgcagaggtttctgctgccttttgttcagctatgtcctgcccccagaggtggagtctacaaaggcaggcaggcctccttgagctgtggtgagctccacccagttcaagcttcccggccatttgtttacctactcaagcctcagcaatggcaggcacccctcccccagcctcactgccaccttgcagttatatctcaggctgctgtgctagcaatgagtgaggctctgtgggcgtgggaccctctgagccatgttggggatataatctcctggtgtgccgtttgctaagacccttggaaaagtgcagtattagggtgggagtgacccgattttccaggtgctgtctgtcatggcttcccttggctaggaaagggaattccctgaccccttgtgcttcccaggtgaagcaatgcctcgccctgcttcagctcttactcggtgggcttcacccactgtcctgcacccaccatccgacacgccccagtgagatgaactcggtacctcagttggaaatgcagaaatcacccatcttctgcgtcgctcacgctgggagctgtagactggagctgttcctatttggccatcttggaaccaccccctataatattgcttttttaacattgaactcattaagtgagtgctatgactcactccgaatgaagactaacacatatagtttcttcattaaagcacatcaaagccttctcaattaggaacactggatagcaccttagcagtacacttgggggccacctttaaaagctcaaaaatgtggaaaaaatggcactacaaagaccacagaaaggacttgtttattctatgagagctgaaacaacaggcagttttttaacctcaaaaaaggtgtattatttgatctcagctgtgaatgtgaaccctggttgaataaaatttttcatcattctgttcaggcttacaaattaccacaaaagtgccatgagaaattattttggggttacaaataaatattaccaagtaagtaaatctgcaaatatggaatgcatgaagaatgagaatcaactgtatttattattaaacaaaactattgacacttttctgagttttaagtatgaaatagaagtcattgaagcccagtatactttaggaattggagtgggccaaaaaatgatgggtttctgcaatacattttcacaatttgagcaaaagagggcctcatcataatttacatcatattgttgaatagggctttgcagattcctagctatattatctcactgggtatgaagaatgcttctgtgccataagcaataaacttataatccttattgtttccttgtctgtttgtttttgagacagaatcttactttgttgctaagctggagtgcagtagcatgatcttggctgactgcaacctccgtccccagggtacaagcaatttttgggtctcagctgcctgaagagctgagactacaggcgcatgtcaccacgcccagctagttttttgtatttttagtagagacgggttttcaccatgttggccaggctggtcttgaactcctgacctcatgtaacccagccaactcagcctcccaaagtgctgggattacagatgtttgccaccacacccggccctaatccttattgttataaaaaatctaatatcagagaggttggcagtggtgtgaaatcccaaatacaaatgttttggctcccccaaaagaatactttaatgcatgataatttttatatgtactcagttatatgattatataattatataaaatttgtccactaagaattttttcacttacatttttattatttgagcatctcaaatatgttttattttacagtttatataatttaatttttaaaatattctccaacttgtaccacatccaagcaccaatgctctataactcgaatgtgttcttctagtttttaaaaaaacaattccaaggtattttacttattctcagattgagaagcctttttgttactcaatattaaattcacaaagctaaaagtgatttattctcttaaaaatcttgacttcatgtttatttcagcatgtacatatttacatgtattatttctaagatgttgaatcaatgcagctatgccctgagttaaatgcttgtaaaatatcctcagaatctgctcagtcacttgcttgctgagagaggaacaatggacttttctttgctattttggatcatgtggtttttatagggaatggtctctgaatagcactgctcaattctcacttcttttctgatacgattttagataaaaggtttccattttgtcttcagcatgccagatctaaattttcacatttaatttgacaaagtggccacagttgctaagctattcggtacagttagcaattctaaagctgtgacaaatatgcacattttaatagttgcatttcaaaccataagaaacaaaatacttttacattggtattaattactttaaaggggtattaatttctttaaattgtgtaaaccaccttatgatgcttgtatttaggaaaatggtcaccaatgttactgactcatcttctcaggcctttgcctttttcttattgaaaaaaacatttggggtggaagtaatttgatacttcctgtgtcctggagtcattcactaaatttttctataaaaatccatcatacataatttcaagaaattgatactagagaactaaaggacaaaatattattttaagtagttttgtttttgaaaagggtgatagggaatatcagattactgaattcttaccattacatacaatgaggagctctttaaagattttttcgctgcttgaaataagaagttgtaggaggaaatattagccaatgtatagtcatctgctgagtgaggctcagcagtgacattatcactcttttacttcagtaacaatggattgattactggaaattgcagggaacattttcttaatccttggccttttgtgtttgaacatctgatattagtaacgtctttgcctgtacggtggagtgtgccctgttctgtaagtaatggacaaagtggaactagatcatcttaatgggtgctgcaggcaactgctggaaccaaagcattctgtcatagctaaacatttcgtacacatatggcttactttacatgaagcggcttacattgatagatcaaaatccaatcattccaaaacttgactcattagttgtttagacaattcctaggttaaatactactacataaaattgtttacagtttggttataaattacccttttcatcacttcaatttcttacatatcaagacacaagctgcccttgctatgtcaggtgataccctttcgtagagaataagtatacatttaaatggttcaaggtaagtctaattttcctgtgaactgtggtagaaaatcccggccaagcacctgaatatcaacttttcatgtaaatgaccacacatacaatatttaatatctttctcatcagttgatcttgcctttgactgcactgagaaaattgaagttttcaggcttgaatgacttcaacttcctactaagaaacgattgattttttcctatttatttgctgccttttttccattcttaaagaggtgtttattatccttttaagctgaatcttttcacatacttgctaaattctactcatagtcacctctccaaggatttctccttattcctcccttgttttcagtcattctataagcctttttcttcaaattcatatttatgtcccagtatctttcattaagttaaaaaaagaaaaaaataatcaaacttgtttctttagttgttgctttattgttcctctcacgtttacactgaagcttctctgaagaacagtatgattctgctgacccaggttagcagctcccagacagttctcaatccagacaatctgacttcagcccactggagcccttcaaatggccttggccatggacacttttgatacttttgtggtgaaatcagtgactgcatcttcatttcattgtttatcttacttcatatatctcacttgatcttaaggcaagttgaccatagaaggaaactgggcaaatgtcccattttttacccacgttcatatattttggcatgaacagtaaaaatttgaaagaggctattcagcctcctatgctgttagtggcctttgaagacaagagccttttggtttttagtttttgattttataaatcagctactacttaaaccttaccatcactagaatctatagtggaaaattattctatctttggtaaaaatgcttacttaatattaacagtgattagaaccataatattagattttagaagacaagcaataaagtgtcactgaaaaaaataaatctgtaagatttctaatttcaaatcagcttctaattgtcactcctgtcttaacaacaagaacaaatctgaactgattgaaaatcggtgatgtttcttggacctatcagagaactaagtttgtaagaaaaagcctatcaactctagaatctgaggggatgaagatggtctggagcggaagcacaggagccctatactggtaggaatatttaaatggcaatgtgttgacttgccagaggctgagtgcagactagtatggagtgaggaaaccctgggggccacagtcttagggggccccacattttcctgggttttacctctaggtaaaacgatagaggttctcgcaaggaactcaccaggttcccacaaggaagattggagagaggtccttttatgtataaaaggattttatccataaaacagatgttttgcagagaagtacctggaagcacaaagtcaagagagagacaaaaacaaagaaatattggaagagtctggcttctagagttacagcaaacattaaacacagcccagctactagccagatcaaaatagactctcacttcctagacctaatgacctcagttactaatacctaatatctggctttcaatgaaaaattaaaagacatgtcaaaaggcaaggaaaacacagtttgaagatataaaaaaaacatcagaaccagtcacagatatgacagatattaaaattatcagacaggagatttaaaagaactattattaatatacagaggattctaatgagaaaaagtagacaacttacaaaagagatggacgatgtaagcagagagatggaaactctactaaagaaaccaaaggaactctataaatcaaaagcactgcaacaaaaatgaagaatgcagccgggcgcggtggctcacgcctgtaatcccagcactttgggaggccgaggcgggcagatcacgaggtcaggagaacgagaccatcctggctaacacagtgaaaccccatctctactaaaaaaatacaaaaaaaaaattagccaggagtggtggcaggcgcctgtagtcccagctactcgggaggctgaggcaggagaatggcatgaacccgggaggtggggcttgcagtgagccgagattgtgccactgcactccagcctgggctacggagcgagactccatctcaaagaaataaaataaaagataaataaaaaataaaaaataaaataaaaatgaagaatgcctttgatgggctcctcagtagactggacataggcaaggaacagtgagccacctctgacagccagcaggactttctaaactgaaatgcaaaaagaacaaggtggcaagaaacagtaatttcaaaaggtttgacatgtgtaatgggagtaccagaagaggaagagagtaagtatacactttcatagaagaaataagatgtagaatttaatagattagtagggtgactgtaatttacagtaatctattatatatatcaaaatggctagaagataagaattagaatgtttctagcataaagaaaaggcgacatttattatgatggatttcccaatatactgatatgatccttacatattatataaatttattaaattgtcacatatactcccaaaatatgtacatctattttgtatcaatttaaaaaataaaatttaaaaacaaaaagaaaagggcggaagacatatttggtttaacaatggccaaacgctttctgaaattcatgacagacaccaagccacacagatccgagatgctcagagaacaccaggcaagataaacataaaaaacaaacgatgaaaacccaaaaaacagctttacttaagtatagcatatttgaaatgctgaataccaaacaaaaagggaaaatcttgaaaaagctaggcaggaaagataccttatttatagaagaaaaaagataagaatcacaatgggcttctctctagaaattatgaaagcaagaagagtggagtgaaatacttaaaatgctaaaaagaaacactgccaacatagaattttatttccagcaaaattatccttcaattatcctgtgaaaaagaataaagtttctcagacaaacaaaagttgagccaacacattgccagcagacctccagccttgcaagaaatgttaaaataagttgttaaacaacataaacaggaaaattgtataggtcagaatctttgactacatgaagaatagagaacattgaagaagaaataaagacaaaattaactccacatgactttcgtttttcttattcgaaattcatctaaaaatgtctatttaaagtaatgataacaatatattgggttattatagcgtaaggataagtaaaacgaatgactgtaatatcatagcgggtacagagaagggtgtgggaatgctgtcttataagatacctgtactacatgtgaatttatatagtgtcatttgaaggtagatttggattagttaaaaatgtatattggaaactttagaacaaccagtaaaaatttttcaaaagtataattgtcgtgctaagacaggatataaaatggaatcatataatatgctcaattaaatcaatggtggcaaaagaagaagagaaaatagaaacgaagagcaaatgtaatacatggaaatagttacaaacacacagattaacacaactatgtcaacaattgcttcaaattgagtagtctaaacacaccaattaaaagaaacagatcattggtactgatacatatatatgatccaactctaggtcgtctacttgaaaaccacattgaatataaagatgcagacaggataaatgtaaatgaaaaaagatctatgatgccaatattaatcaaaagacagagtagctatattaattttaggagaaatagtcaaacccactattatagacttcattacccttttttcaggaattgatagatcaaacaggcaaaaagtgagtaaatgtccactttcatgaacaatagcagaagtcaactctactgaattaacatttacagaatgttccagccaactgcagcaaaacacacattcttctcaatctcacatgaataattcatgtcgagatagactgtctcctgagcaataaaacagaccttaaaaattttaaagtagaacaaacatacaaaatatgttatcagaccccaatgaagttaactagaaatcagtaatagaaaggtttctggaaaattgtcaaatatttggagattaaacagcacacttaaaaattatatgtagcccaaaaaagtctcaggattatttaaaatatattttcagctaaataaaaacagaagtacaacttatcaaaatgtatgggatgcagcaacatcaaagcttagagagaaatttatagcattaaatacgtgtattagagaagaagacagatataaaagcaataatctaagctttcccctttggaaactagagaaagaagagcaattaaagcctaaatcaaacagaagaaataataataattggagcataaataaactaaaaataggaaaaaataaagacattaaatcaatgaaaccacaagctacattaaaaatgcttattataagactacagtaatcaacacaggttttcctgaaagaatagaaggctttcatagagatcaatgaaacaagggagaaagcccacaagcagaccgatataaatatagtccagtgatcattgatgaagaacagcaatgcaaaagagaaaaagtagatttttaaataaacagtcctgaaacaattagtgttgtctatgcaaaagaatgaacctggaaacacatcttaaacctttcacaaaattaattcaaaatgggtcatggacttaagcataaaatgtaacactttaaaacttccagaagaaattacatgcagaatctaggtgacctctgatttggtgataggtttttatgtatatgctaatatcaaaattgtagcccatgaatgaaaaattgataagttggactatgatatgtaaaacaagtatctgataatactcttttttcagtttggcagggtttttttgacatctaaaattgtatatatttatagtgtacaacatgacgttttgatatatgtatacactatggaatggctaaatcaagctaattaacatatgcattacctcacaaacttattattttttgcagtgagaacactgaaaatattagcaatcctcaactatacaatatattgttattagcaatatatagtcactatgatatgtaatcaatctcttgaatttattccgcctatctggctaaagtgttttgtcctttgaccaacatctcaattcccccaactctcagcctctaataaccactactttactctctgttcctatgaatttatctcagaaagaacttatagctgaaatatacaaagaactcgtaaacctcaacaataagaaaacaaacaacccaaataagaatgggcaaaagatcttaacagacacctcaaccaaagaagatatacgatggcaaataagcataccaaaagatgctcagtagcatttgttattagacagttgtaaattaaaacaagatccagtaccaccgtatactcattccagtggctaaaagacaaaacaaggccaaaccaaacctagtgagacattcagaggtaacgatgtggagcaacaggagctctcattcactgctggtgggaacaaaatggcacagccactttggagacacttggcagttcttaacaaagttaaatatagtcttacaatacaacccagcaatcatgttcccgggtttttacacaaatgagttgaaaacttatggccatttaaaagcctatactcaaatatttatagcagctttattcataattgccaaaacttggaagcagccaagatgtccttctgtaaacaagtggatacacaaactgtggatcatccatgtaatggaacaggagtcagcaataaaacaggactggctaacaagccatgagcagacatggatagatcttaaatgcatatgccatccaaatgaaagaagccagttttaaaaggcttctggaaaaggcaaaagctatagagagaataaaaaaatgtcagtgtttgccagggatttggagatcgaagaggaaaggcgaataggtgaatgaagcttaggggattttttagggcagtaaaactagtctgtacgatattgtgacagcggatacatgacaccctgcctttgtgaacaaaaaagaaacttatagcacaaaatgtgaaccttaatgtatgtaaacaaaaacaatcatttaggctgtcctgggatccaaagatggaatacagaatttgacaagataatttaaatgtattgcaaacctatgaaacaattttgctgaagaggatggaaaaaagtaaggtgccgataatgagagggctctgtaaggctaaagccaaacatctttacgtagtattctacttcaaaccacaaagttacttctggtggaggtatgagttaacaattctgggcagggcacagtggctcacacttatattcccagcactttgggaggccgaggtgggctgatcagttgaggtcaggagttcgagactggcctggccaacatggtgatatgccatctctactaaaactacagaaaaaaaaaaaaaaagaaagaaagaaaagaaaaaaagaaaattagccaagcgtggtggcgtgcacctataatcccagctacttaggaggctgaggcgggggaatcgtttgaacctaggaagcagaggttgcagtgagctgagatcatgccactgcactccagcctgggtgacagagcaagactccatctcaaacaacaaaaaaaattctgatactgccacacatgtacactggaagcggacaattacataaatggatgttgggagccagctttctcattgatgcagtgggaatttgcaaataagcaaggggaggaggctagagtgactcatgcggtgatggattagagttgacaatatcagtatgaactcatgtttagcttaatagggttacagatgcttatgcatagaaatatgtatgtgtataaatatatatatatgtgtgttcacacacacacacacacacacacacatacatttccctcccctgtcagttgagagaacccaaatccatgacactttcatagccatgagcacactgacctccaaaatcttggttccccatataattctccaattaaaaaacaaacaaacaaaaacagggatttttggagaaacgactgaatctaggtcttgcatgaaatttacaagaaaagcctgcatcagcttgtagtgcttgaaacttgggaggtgatttttttttaaggagtacatcaaagaaattcagagccaattgaaagaccaatggctcacactggaacgatttaagcaacatgataaaacagtagtattggattattacttaaatatgaaataaatattaatccataaataatataaagaaatgcggtagaatacacaaatcaactgtgctgaagatttccaaataagtatgtagcttctacatcctcagagaattttagcataaacccccactcctgaaatttgggctgctccaagtgacttctttgcagagtttacagtatggaacgggagaaaaacaagtgacttttcaggggagagacttgataaagactacgtcagtcaagtctcaagagtggcaagccataccgatattacacacccttcatgtgatgtcatgggaatggctttctacctctgtgagacacctccaaaatcacacaggcacagtctgactgtaagaaagtgtcatgaataccccaactgagggtcagtcttcaaaattcatcactagggctcttcaaaactgtcaatgtcataaaaaacaaggtcagtctgagaaactgtcacagcctaaaggaacccaaggagataggactaagagatgtaatgtagtatcctgatgagatcctgggacagatataagatgtaaacctagagggatttgcatgtagtgaacacttcagttcatgatcatgtatctgtagtagttcattaattataatagttataccatactaatgtgagaattgggaattgaggacactggtatgaggtatataggaatgctctgtggtatcttcacaatttcttttcaagtttaaaactgtcttcaaataaaatattaatttaaaatgtatttttaaatgtgggttttccaacaaaaattatacataattttatgtttcaggagaccaagaaagaccaagtctcattgtgacttgaggaaaatattatagaagtcaacatctgtaatttatgaaattacagatttctatgaaaatatctgtactaggtttccctatataaacagtcacctacaagccattacatatgtttatatctatttgttagtaaggggcacagattcgtacaaaggttatacttaatttcatgaagcagctataaagacaggactattaaaattcccgggataactctgtaagtgcaaatgttatagtcattcgtcactggcagaaatcctaagagacatttcattaacccactgctcattgacattaagaaagcttatgccattaaacttttatgagactggagatttcctttttgttttgaaagattatatggcctttacttttttttttcttttcttttttttttttgagacggagtctcactctgctgcccaggctggagtgcagtggtatgatctcagctcactgcaacctctgccgccggggttcaagtgattctcctgcctcagcctcctgaatagctgggattacagacacctgccaccgtgcccagctaatttttttttttttttttttttttttagtagagacagtgttggtctctactaaaaaaccatgttggtcaggctggtctcgaactcctgacttcgtgatccacctgcatatggccttaacttatagatgaaaatgattatgtaaaacactattaagtttttgtatatcagaaatgtattaaatatgttaatcaggttgatgtaagagataggatagatgagacattacaccaatatttctactcaaaaagataataatgaaaatttagtagcaataaaataatccaggcatggtggctcatacctgtaatcccagcattttgggaggccgaggtgggtggatcacgaggtcagcagttcgagaccagcctgaccaacacagtgaaaccctgtctctactaagaatacaaaaaaattagccgggtgtgttggcgggcgcctgtaatcccagcgacttgggaggctgaggcaggagaatcgcttgaaactggaaggtggaggttgcagtgagtcaagattgttccactgcactccagcctgggcaataagagcaaaactctgtgacaaaaaaaaaaaaaaaaaaaaaaaaacaataaaatataaccctgtttcttggaaggattatatgttttttgtattcgttaaaaggagtctgtctctttatgagttatttctttttgggaatggctttattgactcattccgtaaccaaaaacattaagaggattctacaagagatatgatctcagtaataacatcaaatcatatgcactcaaggaagcaaaattgattttgacctaggtattaattaaaatgtatttactttttaaattctaagaaaatatagaaagtatatggtgtgtttaagtctgctactgaggcgctcctggaggtgctcttaaggtgcatttctaaaaataaattctttctgggccatcagaatgaacttataaaatgacaattagctggaaaagaatcaagacctacattaacttgcacaaagtaggagtcagcacctttcaaattctgctacctaaataaatggtcactacaaaacatatatttaaaaagaggctatactttgaggatttggctgatctcagacagttgacaatgtgtgtgtgttgatattacaatagatttcatatcaccttatcacgtcacctgcatttatataataaataagtgaagagatcaacagtgatttctggtaaagcagtcattgcgttctagtagaaatgttgctgtcacagcactcagctatagcatgcagaacaagctgtagcatgcaggacaagttgtagcatgcagaacaaactgtagcatgcaggacaagctgtagcatgcaggacaagttgtagcatgcagaacaaactgtagcatgcaggacaagctgtagcatgcaagacaagctgtagcatgcaggacaagctgtagcatgcaggacaagcagtagcatgaaagacaagctgtagcatgaagaacaagctgtagcatgcaggacaagctgtagcatgcagaacaagcagagaatatctaagagattgcttagggagaggaaatgagtgtttacaagctgagcccagccaatggtaaggaataaattaatgcacagattattgacatacatagctctctgacagaaaactatattgacatactgaacaacatttttgagcatgaataaaactgctagttacaggttttggcgtgtgtgtgtgtgtgtgtaataaaaattataaagtcttaaagtaaaagaaatagatttaaaaatggtttcttgaccttaaggtggaaataaaacattgtggcaaatggcaaagattctagagttgtatactccttagtataaatcccaaatcatcctcttcctagctgtgtggctttggtaaattatgttctcacaaataaacttcaaaaaatcaagaactttcttgtctgcctggttctgcccctgcatcctccagcagtggaatgtcacatgaactcctctatccctttcctcaagaagcatttacagtgtacatggtattagtttggcattacactctgcaattttagtgaagaataaaaaatataaagaacattcctgtgttaggaaaacacagcaggaccatatacactgtaaatacgtaataagtatgatgaatatatagagagagagacagagagagagaacatgtggttaatgtcataaaaagttataaaaagtataaagttttgatgacaataaatgtgagacagcattcaggagagaggggacccatgcacacaaatgatctggagcagacatagactgggagagaggggactcataatttaagtgaagagatcaacagtgatttctggtaaagcagtcattgtgttctagtagaactgctgctgtcacagcactctgtggtgtagcatgcagaacaagcagagaatatgtgagagattgcttagggagaggaaatgagtttacaagctgagcccaggggactcatgcaccacacatgatctagagcagacacagactgaaattttgctgaataagtaaatgtgcagcattgaacatagtgcaaatcattctacaactactaaaaggtttcatttttatgagataattctcaatacaatattagatcctttcaccttactaccagtatatttttgagtaagaaaacacatcattttatcttaactttaacataattattaacatcaaatagatgtcttgctagtctgtgatttttctcttcaaattgcaaaaaaaaaaaaatcaaaggcatagatcctaaaaaatataattattttagtaatatttatgattggtgtttcgttcaaatgtagtgacactatatttaacttcaaaaaaatgaagtaattttaaagaatggctggattttatattcttcaaatctgcttttttgatcatttattatgattgccaacatatttttacttaagttactatgtgaagtggtttgtggctaatgacacgtcagtgcactcagtagagactcagcagtgaactctagatgttcttaaagtgctatgggataaaaacttcaaataaaccatcttgtaaagatgtattaaatattcaggaattttcttaatcatggttgccaatgttaggatagtaatacattttgaagtgcttccgttacttctgtgttatattgtggcacaaaacttagcattatagtcacagtcctttacaaggaaaattgtcttattttgtccatgattttttattgtcactgagttctctaattttatttttctgctcagtataaggtgtttacacatgaaaataaaaggcttgtattttcacatagcatatgagttaatttattataacactgttcacatttttaaagactttcaatatttatggttaagattttcttttctagacttatttttcagtagaaaaaaatgctctttaaatataagagcatacaattcaaaaagatgtactttatgaagtttctataattttatataaaatcctttgaattatatatgtatgagaaatgtcaacattgcagcatttcatgggcatccaacacaaatgtgggcaaatgacatttttacctgggtttcataactttgagaaacacatctgtaccatctatgcccaaggtctaagaaaaactttctgtgatttactctgttcatttatttatgcttttatctttaataaattatattccttcttaaaaagtgcttttcaagataatatttttcatttatattttattagaggaaattttaaaatttgaatcatttatgttaatattgtaaagcacttatatttaatttttgaaagttctttttgtaagatgttttactttcctaactacagaaggaattcacatttattttaaaagcattgcaaaatatagaaaaaaacaaaggaaaatgaaaggatgagggtattctgtactcagtctatggatttgaatgctaatctccccagaattactctcatagacacaaccagaaacaatgttttaccaactctcttggcatccatagcccagtcaagttgacacgtaattaaccatcatatattctatggataattttatggagtttatatatggtacctatactgttttacaacacagtctatgggatggcttaatacgacaacttgctgtactaaaatttattcaatagcccttggtgtatctgttctttaaatcacaatgaagatgttgaaatagaatgccatgattgcttttgatatttttgcaaatttctaaaacaatgatgattacaaatataataatacatttaacttttaatactaacttcaaaatttctcaggaacctagagtgcaaaaggcaaattctacctattgaacaaaaatgaacattttagcatggttcataaaagcattttaagaggatatttattgcaggaaaattctgagagaaatgtatttattcacttctgagcacattatgtctgtgatgaattcaccatgagaggagcgctttgaagttttgatctttgagttgtctacggaatattttattcctaatgcgggagaatcatttataacaggagtctctaacatatccttgatggtttgaaggtagagacaggtcagaaatacctttcatccaaagacttacagtcatacttaaagttgtttttatgaccaagctagttttttggggttttttttaattatactttaagttttagggtacatgtacacaacgtgcaggttagttacatatgtatacatgtgccatgttggtgtgctgcacccagtaactcgtcatttaacattaggtatatctcctaatgctatccctcccccttctccccaccccacaacaggccccagtgtgtgatgttccccttcctgtgtccaagtgttctcattgttcaattcccacctatgagtgagaacatgcggtgtttggttttttgtccttgcgacagtttgctgagctagttttaaagtttgattatttttcagtgtttcatttagttatagtaacacattcactgcaccgtcagaccatgtagctacttcatatgagggcaatgctacaaacggagtcctgtggatatgtatgcgacacaatgcctggatgctatggtctgaatgtttgtgtccctaaaaattcataggttgcaattctaagctccaaggtgatggtattaggagagcctcttgggaggtgatagtcgtgaggatagaggccttctaattgagattagtcccctcatacagagactacagagagctagctggccccttctgccatgcgaagatgcagcaaaaaggtgctatctgtgaaccagaaagccctcaccagacaccaaatcttcaggcgacttggtctcggacatccagtctccagaactgtgagaaataaatttctgttgtttataagccacccagtctaaggtattttgctatagtagtctgaataaactaaaacacttgactattgggatttttttggttcaaattgtattttttaaatttttgtttcctataagtcagtaaccggtgccatgtgtggatttgcccgaggtatgtgtcccctaggtagatttttttcagagaatattttgccaccagtgactttttattgaaacatatctgtaagagatcactgttatcaggactatcaggactgttcagttctactattgcttgattttcacacattcttttcagctaaagggaagagaaaaggagcaagtcattcccatgtgcacaggcagatggagaaatgctggtctttcaatttcagtcatcaattatctctcctttatcttttgactccattagaagaacagacatgaccgtcacactagctgttagatgtagatgacagtgtatgttttattcaatttagaactcatcctggggagctgagtggcatgtttgttaatagatcaagctccacaaaatacgatgttcatacacatttaaacttaaagaatcatgtcatcttaaagccatattcgaaaagcatgttataatatcagaatattacattttgaggactcggaaaaatacgtgatacagaatagtggacattcctgatgtatgatttagtgtaatatctttttcttctttcagaattcttgacatccttatttcttttaaaatattgtatctattacaactgctgcattttggtactttaatattaatagaaatgttaggtaatttattttttagctttttatcattttcaatgaagatattatgaaatctgaacttttcagtaatttatgttagaaagcctgagccaaatgaaaggacttgccaaatgaaaatcactctttgacaaagattttgtggactatcttcttttaatcattgtagtctgttaaaaaaaaaaagtaacatctaaaccttctaaagatttctactttaagaactgtataactagagcagatgtttcaacagaattatggaattctatgttgaagtgtgaatagttaccagttgtgtttatgtagatacgagaggaattgctgttttacaaaacacacacatcattctgctgtatttataatactattcctgtacttttggtattttgtcttgttggcatgtgttattatgtactgtttgttaaatcattggcaagttaagacgtgactcaggagaaacgtagcaattcctatcttctttgagataggaaatgagagagtattatatgaaagaaatgaggtgaacaaagtatgataaagaacatatttgggccgggcgtggtggctcacgcctgtaatcccagcactttgggaggccgaggtgggcggatcacgaggtcaggagattgagaccatcctggctaacacggtgaaaccccgtctctactaaaaatacaaaaaattagccaggcgtgggggcaggcgcctatagtcccagctactccggaggctaaggcaggagaatggcgtgaacccaggaggcggagttgcagtgagccgagatcgcgccactgcactccagcctgggcgacacagcgagactccgtctcaaaaaaaaaaaaaaaaaatctgaattcaatttaattggactgctctagggatatggaatataaaagtaaacagtatggaaataatttggtagacaaaagggcttatacttttttattgacatatagtagttcttattctggggatgcatgtgatattttgattcatgtatacaatgtgtaatgatcagatcagggtaactggggtatctgtcacctcaaacatttatcttttattgtgtgggggagattgaaattcttcttttctagctattttgaaatatacagtaaagcattgctaactataatttccctaccacactatcgaatactagaatgtactccttctacctaactgtatttttgtacccaaatctgttggttctgagaaacagttaaagggtgaaacagcagcaatttaggctggacctatttctcacagctccttaagagagctctatgggcactcttacaggtattttatctcctttgtcttgtgtttcctggcagagttatcttatttctaccactaaccttatagtcacattgacaacaccatcacatgcctcttgcttctgttacttttagaaaacttataaatctattccatatctgcttcttcttggctgacagtaaatccttaatgataacttagggtttttttttttatcattttggctttttaaatttcatttacttgctggggcagtaaaaatatttttactagaaatattctttatttatgtgttcatttccacctgacatataatctttgaagttttaacctaaagtttttaaagtcctttagccattacagaaagaagtataagtactttcaatgccatatgttctcactcatatgtggggactaaaaaagtgaaactcctggaggcagacagtagattggtggttcacagaggctgggaaggggaagaggaaggaggaggtggcatgagaactgtttgtttgtacctgttaatcaatcgctttttatcttctctcccacccttcccagcctctggtagccactattctactctctacctccataagatcaacgtttttagctcccgcatatgagtgagaacatgtgatatttgtctttctgtgtctggcttatttcacctaataatttcacctaatataatgacctgtatttccatccatgttactgcaaatgacaaggtttcattcttttttgtggttgaataatattccattgtgcacgtgtgcacacatgcatcacacacacctttttttgccgtttatctgttgatggatacctaaataaggaaaccaataaatgagagagatagtaaagggtttcagggctccaagccaagtgcattttatagtgacctttacagactgtgcctagaacttgcctgctgagcccagcgttgcccagagcatttggataagctcatctgaccttgacccttcccaaaatacagagatgcggcagtgctctgatgtcttatgccgtcctaagagggacctagagtacacaagattccgcaaacagatttgatcatggacactaaaaaagaaaaagaaaaaaaagctctcttacaaagatggtgtgccataaaatgcagataaaagctgagaaaacttattagtgaagccgaggggggagaaggaacacctgttatcatttctgttaccatctatgcacagggtttaataggtagcgaaagtataggagggcagcatgttggagactttcaatctgagattgggaaaaatgatatggaaggtcaccaataaaaggaaaatcttcacaaaaacagatttcaagaaggcatccgcttgagtctcatctcaaagtgaaatgacatttgacctgaacattattacccaagtttacacaggtagtaaaatctgagggctgggattcactgagggatcgtctatttccaaaggtctgtttgtccccacctccaccttctctctgtttctgttgccttccttttgctggttgatactgatggggattattttgtaaatttaactagactcttctggtaagctgtaaacattttttaattgtatacatttatggagtacaagtacagttttgctacatacattgatttcatagtggtgaagttgtggcttttagggtatccatcacctaaatagtttaagttgttattcgttaagtactttcctatcacctagtccatacctttacaagcctccaatgtctatcattctgtgctgtatgtccatatgtacacatgaattagctcccatttataagtgagaacttgtggtttttgactttgtttctgatttgtttcacttaagatagtggcctccagttccatccgtgttgccgcaaaagacacgatttcattctttttgtggctaagtagtattccatcgtctataaataccacattttctttatccagtagtccaggggtggacactcaggttgattccatgtctttgctattgtgaatggtgctgcaataaacacatgagggcaggcatctttttgatataatgatttattttcctttgggaagataccaagtagtgggatttttggatcaaatcgtagttctgtttttagttctttgagaaatatccatactgttttccataaaagttgtactaagttaccttcccgccaacaaggtgtaaagttcccttatctctgcatcttcaccaacatttttttttaacaatagccattctgacaggagtaagatgatatctctttgtggttttgacttgcatttctctgatgattagtgatgttgggcatttaaaactgaaaatatctcgaaggtggcatcttcgacttacagttcttataccacatttgcattctcatttgaaaacagctgataataaaatgtggaagaaaacctcaaaaaatgcaactacattctggaattttagaatttggcagggatcttgtcctgttacctcatttaaagagagacttgaactgtcccagttaaaacaatgtttaggggctaggtttggagaagagcctacgtcttaacctacgagaacaccattgatagatgtggtctttgcattctgaggggtttaccttttccccatggcagtcaaatttacctgcttttcaaaagtcccaacttctggattaacataaacaccaattaatattttagaataagaaattagtccacaatgcattgtaagaaagtctctaatctttctctcaaattcaggacaatactggaaatattattttcccaaataactccagtgaaattatgatatgaattctttaatttgttcattcttttaacatcacatattctttattgagggtctactatgagccaggaatgacgcttgctcttgagagtacaggagtaacaagggaacaaggtgcctgtcttaaacattgatatacttatgtggtatactagttcatggaatggtatatactcactaatgcatttctacaaatatttttatgcatgtcatgcataaaatcttagctttcagtgagttctgtgatggagtaagtaaacaatactatagaaactcacatgggggatgccccacctagtctaatggaccctgagagcagtgtagagtaagattgcaggggaaatctgcaggttccgtccttgcaagaacactgcataaaatcctggaaagtgattgtggtgttcagaatggtgatgaaggaaatgaagaaaatattcatggtagaatttggcgttgaaaccaatagtaatattgatattttaatacagatgttaaagaagatggagggcgagtttaagaatgacttccagatgggagggatggtgcagtttaccatgaaagcaaacaccagttaacgaaatctttttgtgtgagagggccacgagttccttttaggatgtgttagggtcagggtccctagaagacatccactttgagaagtctaagagacagctggtcctggaactcaggggagagagaaaaggagttgtgtgtgtgtgtgtgtgtgtgtgtgtgtgtgtgtgtcgtgtatgtatagtgacagaagtcctggagtaaatcagattaacccatggaaatgtgtaatctgaaataagaaagaaaatttgacatagtccaaagtaaaccaattaagagatttttcgagaaaaaggctacaaaaaagaccgataaactcgattcaaaaggaaagccagatgtttgtatggtcatgaaagtcaagagaaaaataaattgagagtttttttgtggaaatgggagtgatatcattccaggagaagctagccattccagcacagagacacaaactctgaaataaagttgcgaactgcagcctcagcacaaacatgaagacagattcaactttgtgagctttctccctcctatgtacatacattttactgtgtgaaacattataataggaaaagaatgttttagactaaagaaagcaaaagaaatataggtgttggtgccataatgtggtagagatgaagtacacattcgggacatcaatgcgacacattgagagacagaaaatagcaactgctcatatttttaatttgttggtaaacagacctggaaagggctgtatatcctcagagcagatatagagtgttcatattagaaaaatatgctttgtaaaaagcagagtaaacagactgctattgaagaataattaaatgaattattaatgaggtaagtgggcaccggctggtttcattcaaggctttagtcaataaataaataaataccaaatacttacctgtggtacgtatcaggggagatgactggcttagtaggaaatgcaatataaatgactcaaaattatgttgaatttagcctaaccatatggggctctttactagccctggaacccatgatttcttttcttagctttttctcagaagcacttactcagtagacttccttgtgaaattgtatcttttaattggatggttgacctttaattatattctggccattaattgattcaaatgtcactcaagctggctccccagaaaatcgttcgcttgcctaaagttttactcctcacctctgaatttagtagatttgaaacttgaaactatggacacaacagaacagtcatacactttcatcttgtttcacagttttgttcattttgagaaatattttctcaataaatataacatgtttattgcagaaaattgaaaaatacctaaacatgtaaataatacaattcagaatcacacataatttcatcacatagagataatcattgaatcttttgatgtatttcttaatcagtctctctccactctccctcttccacacacataggtaaatcatacaaaaagtaggtgtcatgcatatctgtatagcctatcctttcatatgcattttctgcacttctccagaccttaagattttcttctcaacatgatttttaatggtatgcagttgcattatataaatatcattaagtattgttaattaataatttttcactacttttatatacatttttactacttttttctaatgatattacactattctattatgacaaaactattttcacacatggtgttattgcttttcacttcagatttttatctgtcatacatacccatgttctaaaagtcaggtcatccccagagcttgttggaaaataacaatattcccttcagtgcttcccttctgaattttgtttctagatacagtaactttcaactcttttagatggttctcctgggttttttactcattttacactaaataattatgcttctgttgctacaccatgactttctgtctgcagtatggaggatgggatggctctgttcacacatctcatccccatcagatacacacgctttgcccggggacccatcctccccttttcaccatggcaaacgttttactgtcaatatgtggggacttctgagtatgactgtaaatcctttttgcatcctactcacttaggattattcccttttgttaccttttctttcttacacatttagttttgttatttcgtgtggcagcgtgttctacatcactatttatgtttcctgaggtcataagtactgacctccggcagtttacaaagggagctttaggaatgtgttcaatatataattcaactgctataagattttaaatggctgtaataaaggttttacatttttatgaccataaaaatgtgtcatcacaaacatctcaaagaatattttagccatttattatggataaaattattatttattagggcttggtacatagttccttaatgaataaatggactccccaccatataacctcctacattatctgccaaaaatctagaacctaaagggatactgtgtgcttctagttttttctctgtgaaaacagtgggaacctgtgggaagtctctgttggagaccagagaggcatgactctgctcattcccctttgcttcttgatcacgaacagatggaagctcagcagttatctggttgatttgactcaagtacgatagagatagcctgtcctgagatgttcatttgctgctggttatcaagaataattccctcgtttattttctgcaggtgcacatgctacctggcagcctctcccctgactgccatggggccttcaactgtgacatgtgtcatctgagctttgggaaaagagatagcagttcaatggctttgggtagagaggtttaagcatttctttaccagttccaattagtggcttaaatttcagagcaaggggggttgcttttggaatgacccttataaaatcgccttcataccaattgcctgcatcaacaacagtaaagaatgtaacattttacaaggcagagcgggtaaatagcgcccaacaagatgtgcgtctgttattactgactgcatttggttgccttttggggtctttgtctaatattcattttcagtcattttcagggtttttcttttaaagactcataggtttgcttgtctttttatgaaaacagtttgctggctttggcctgattcatttgaaggtttaacagctctttggagtttgtccttgaagataaagggcagagctgtgaaaaatgctcttttcattctcacagatttggttgtaagcaatagagaaagctctgcagtggttttctgggtgagtagctgggatacacactttaaaaactaagtagggaattgcctggaaatagataaattgaatacatgttttgaagatgtctttcagaggtacctgcaggtttctacttgaacttccataaatatatttttgttcttgttgtatctgggtttttgtttgtttgtttgttttgttttgttttgttttgagacagggagtctctctctgtcgcccaggctggagtgcagtggtgcgatctcggctcactgcaagctccgcctcccgggttcacgccattctcctgcctcagtctccctagtagctgggactacaggcgcccgccaccatgcccggttaatattttgtatttttagtggagacaaggtttcaccatgttagccaggacggtctcgatctcctgacctcgtgatccatccgcctcagcctcccaaagtgctgggattacaggcatgagccactgcgcctggctgtatctgggtatttttttaagaaacacatttataaagggctcttttatacatctcaggacatggtacatttttttcaataaaggtagttatagagggcattttgttatttgttctggtctgctgtaaacactgcactagaaattgttaacatggttgggtctcagtattctgggaataccatttgcaagcatttcttgcctttaattgaaattatgttatttccccattgccagttttgttaaatacattgatggtaagagtgaagggaagaaggcaggtaatcaaaccaaatctactgccttcaacatttcctggagccctaggctgagcattttccagtctcccttcctattttattccaatacatgtttttcagaatatgaatttttacacttagccccaaagtgtgcagtcagagaggaatgtgtggtttgatatattggttcatgattgtctttgcaaaaatacactttaatatggtattctttcccttaccactgttttattcatgtagcaacaatttgttagctgcatactgtattgccaagtaatgggctgggtatttcatgggcttatactgaccatttactgcaatgtgcattaaatactaacagttgtctgtagtttgcaaatggaagcatagagtgaagtgatctgctccgattgcagaaccagcgagtaataaacctgagattccagcccaggcttctcagactccaagccttattccttttcactatgccatgtgtcatcttctccctcttttcctctctgtccgtttgaatcttttcctaccgcccctggctccagcactcctcggctcctttgtgttcctattactcagctcttggagtttccatattccattttctaatagtttcatcagcctactgccttgatgaatgcaaggtagtagaaaatacaagatgaaactgttatgagctgtttccatgtaggaagcctcacttagacttcttgttctcttctaaatagctgtttctttctttgggatctgcatttcttctagaatggcaacttttgttgtttaattaatgagactgcatgaatagctgagcagtgaatattgttgaatttccaaaacatagaataattttggtcaaattaatttgaaaatataatatttgaaaagatcttaaactacttttgtaagttcagggcttttccaagatcttaatatgctaacatgccccaaaaccttataggacacagacatagtgtaaaatattttccaatatacgtctttgaagtgagttttaataaaacaattaatgtgatgcatttgatgagcatatttgaggaaaacataatgaaaatgaagttaaattatattcgtcttatggtttataatgtctgaacactcagccattccaaacagcttgggcttaaaattgacaagtactttttaatattagtaacaagcacaaccctaatatttaaataaatagccaaaacccttgaacagataatttatgaaagaagaaatcaaatggccatgaacatgtgaagaaataggtagcttttcctggaattaaagatgctaactaaaaactgttctaatatattatcagtaatataaatatgttagttaatattattaataatgtatttattcacttacagttatttcctcagcacccaaaggatattctctcacagatcttgcaatccaggagggtatactatcagttagtaaacatatgtgtgtttaaaacattgaatagtaaccatcgctgggaggaaatgagaacggtaagggaatatgaagtgaggtgtgagggaaagaagcccttggacgagtggctctaggaagaagctgtaaaggaacaagcaattccaagacacccttggtggcaccaggatgggccagagaggttggggcagaagggacaaagtcagtgggagccacgtgtgtgagggacaggagaagatctgtgtggccagaatggagcacgctagaggctggtggaagtgtgaagttcagagagagggttgggagcagaaggctgaatccacagagacacttgaaaaccaagggaaaggggagctttcattctggggatcatggtggattttgactgagagggggaggcaatgaaaagtgtcttttaaacatccctctggctattctgtgaaaaattaactctgcaaaaggttttgaggtggggctgtggttttgataaactagaagcaagtaaacctgttaagcaaccgctagagcaatctgagcaagaccgggtggttctggaataacagattagaaagacagttggtgagaatggtcaggtatgattcatcaggaaggaaagaggaggccaaactcgccgattgatttgacaagtatggcaagagagagaaatcaagaatttccttatctggggctaagtaactaggtggttaaaaagtcagtgaggcggaggcactgagcacttaagcagaatgtattaagcaccctaataattttatatgatttggtataatagtaattctagtgatggaaacgctttaaatgtggtaaagggaaatgttgcctagatatatgtataataatgttatttatagtaatgatgtataaaaatcaatgtgtaaaaataaaatggctaagtgaattggtatataaatgtaatggaatgtggcgtagtaatttaggtactgcctagtgacacgggaaagaaaattttgatgataaactactaaaaaatgattatataaaactataggcatgtaatattctcaatttattttcaataaatgcactcaataaatattttcaataaatgaatatgcattgaatgcttacagcatgtctctgaacacataaaaaataaactcattgaaatattaatagtatttacctttggagagattagaaatttgttttattttatttttactgtctttaaattttcagataactgtattaatgtaataattttaaaagctttaaaaaagcaatattttataaaagcaaattatataaactggtaacttttctaaactttctgtaaaatatatattaaatacacaatttcctcatcgggatgttttaaaattatgaggcattcgtgccttttaaaaaatctgtgaactcctcctcagcaatatctcccaaactgtcacattagcctctctgatcatggctgcttgccttttccagttcatatcttaaagctcaaagttaccacctcataactctctttgggggcatgtacataggaaaatgaagccactgaggaaataatgtatttattcacttacagttatttcctaagcacccaaaggatattctctcacagatcttgcaatccaggagagcccaggtgagaaaataagaaccatttccaatataaattccaacataaagaacttttctcacataatgacaacgactacacattcgaatgtggtgagatcagcccctacctagacaacaagtctaggtcatccactaaccaaagaacactctcactggttacaaaacaagttttctaaaatggagtgagctataggctagtggaaatgatgaggttggaaagagttgggtccagatgaagtggatacttgtaaacctctagtatcacaatgcaattccctgtgttattaacataaaagcttgcaaaatgctaatggcgtattttctgatctaaagtgtatatatttaggactataaaggggaggactataaaaacagaggactgtcctctcagtggggagaggtagggcgtagaggatagttctcactttatcagtctatgtctatatagatatatacacggggggagagggtagtcctcacttttttctattagcgcatgaatacaaaatttgctacggagagagaaaaactatgtaagcataaaacatccactcatagagcttattttctacttttccttttatgtgagatgccatcatttatttagactttttttagagcagttttaggttcacagcaaaatttgagagaaatttcacacgtgctccctgaccccacacacgcaaagcctcgcctctttccagcatccccaccagagtagttcatttgttacaactgatgaacctaccttgacctatcgttagcaccctaagttcatagttaacattagggttcattcttggtggtgcatagtctatggatttggacaaatgcagtgacatggatccacccgtacagaaatttgcggagtgtttttactgccctaacaaccctctgtgctctgtccgttgatcaccacccgacccatctcctgacaattaccaagcgatctttctgttgtctccatagttttatcttttccagaatgctgtatacttgaaatcatacaatgtttagacttttcagactggcttttttttcacttggtaatatgcatttaaggtttctccatgtcttttcatggcttcatagctcatttttgtataactgtgactactattccaatgtctggatgtaccacagttttattcatttagctactaaaggatatcttggttgcttctaagttttggcagttataaataaagctgacacagacatctgtgtgtaggtgtttgtgtggatgtaagttttcaactcctttgggcaaataccaaggggcatgatttctgggtcatgtagtaagagtaggtttactttgtaagagataaccaggctggtggggtggctcatgcctgtagtccagcactttgggaagatgaggaagggattgcttgagcccacaaattagagacaagccggggcaacatggtgagacccagtttctgcaaaaaaaatattacatagaaagaaatagccgagcatggtggtgcacacctgtggtcccagctacttgggaggctgaggcaggagagcctgggaggtttagcctgcagtgaaccatgatagcaccactgcactccagcctgggcaacagagcaagaccctgtctcaaaagaaagaaaaaagaaaagaaaagaaaagaaatcaccaaactgtcttccaaagtgcctgtaccattttgcattcccacaagcaatgaaaaagagtgtctgttgctccacattctcacaagcatttggtgcatcagtgttctacgttttggccatgttaataggtatgtggtgttgaaggagactaaagagaaaggacctcaaatgcaatgggtgatcctgaattacatcctaagccttggaaaaaaaaaatgcgatcaagtgcatacttggaaaaaaataatgaaatttgaatgttaactgtggtttaagtaattcaacatgttgatgttgaattttctggttttgatcactgttgtgtaagagaatatccttgttcttataaaatacatactaaaatatttagggataaagaagcatgatgcctgtaacccgctttcaagcagttcaaaaattgtgcatgtgtgtcgggggaggataaaaaagaaaagggaggaggagagagagcatgaacaaaaataggggaaaatataaatgatgggtgagtttggatgtcttagtctgtttgggctgttataacaaaacactataaactgggtggcttataaacaacagaaccttatttctcacagttctgaaggctgggaaatccaagatcaagtgccagatttgatgtttggtgaaagcccacttcctagtcttcatagttggctatcttcgtactgtatccttacatggtagaaaaggcgagggagccgtttagggtctcttttataaaggcaccaatcccaatcctgagagcttcaccctcatgacttgaccatcttccaaaggccccaccttctgacatcataatcctggaagttaaaatgttagcatataaatttggggcagtatctctatacatgtaaacatatagtccgttgtattagataaagagtattgtgatagtttcttaaggttgccataatagaataccacaaactagatggcttcaaacaatagaaatttattctcgtatagttttggaggctagaagtctgaaatcaagatgtcagcactgtgattcctctaaaatctctagggggactccctctctcacatcttcaagatcctggtagccccaggtcttcctcagcttgtgacagcatcaccccaatctctgccttcatcctcacgtggctgccttccctctgcgtgtgtgtccattttcaaatttctctcttcttacaaggatactagtcagattggattaaggcccatcctactccagtgtgactcatcttaactaattacatctgcagtgatcctatttccaaataaagccacattcacaggtacttgggggtaaggcttaaatatatctttcagttcaaaccataacaggtacataggggttctttgcattactcttgcaactttccataaatttgaaattatattttaaaaagttaccaaaatgtgttagcatgtaaaaaaaaaagtggcctttgtttcctaaaatgccattagatagataattcacacttaaaatgtgattattccagcctggccaacatagcaaaaccctgtctctactaaaaaatacaaaaattagctgggcatggtggtgagtgcctgtaatccaagcccttgggagtctgtggcaggagaatcgctttcacctgggaggaggaggttgcagtgacccgagattgcgccactgcactccagtctgagtgacagagcgagactctgtctcaaaaatgaaaataaataacaataaaataaaataaaataaaatgtgagtattaatgtgttagagaactataactaaatgaaacaattgacaagtatattcttggagattaaattgttatataacataaaccaataaattcttggggaaatatacacctcttggttcatatgccatatggcatgtggtaaattaaatttccatttgtagggaatgatatatttgagtttcatgtggggaatgatatatttgagtttcatctccaacactccagaaacatagtttaggacaaattggaagttaagcagtcttccagtttcaataattagacaagaaatttgctcagggctccctataggaactatgcagtcttcagctgcagaaagtatttgaggggttgcattgattttgcacatataacattgattaattttatttctctgatgaaaatcaattatgatgtgattgattttttttttcggagccaaacttagagacgtgccttacagtctatgttgtacaaatacagcatttttttattgagctgcataaggtttttctaaatttggaattacttctttcactaagacaaaggctaacaagtactgtcagtatgagaaatttcacatctagtgattagatgtaagaatatatattatgaagatattacatgtacgtgcacacacatgtgcacaaacccttaaggtttaggctgttagtaggcaccaaatatcaatatgttctcttacatcatgagaaagtatatatgtttttcatttattctcactttcagtatccttttcacacacccacttcctaatccatatgttcttataaagtacagcattcagtcgtttaaaaatattacttaagatttagaaaatgtagagtgattgctaatgctattgttcctgtattatgaagtaagtttaggcttggatatttgttttatattgaaaatcttctctgaaaccctcaactccccctgcttctcatcctctgaaataaaacaaccatgtgtatggtcaaatacacacaccaatacatgaaattaacatcagcgtgaatgtttagtgtggctcttcattctgtacagaaaatattgatccatttactcaaggaatcaatatggacagtgattcagaatcatttttctctcagtttttttattcacagctgaaaaattatatactggagtctttcttcagaggaatgaaatttgaaatgtaaaaagaacatttttaaaagatattttaaaatatcaagtttgtattttggaagagaaaaattatattgtagaacacatagattttttaattctcattataaatgggcaatgtcaaaagaaattattgaatctgattgttttcatttcacaaaatttagtagatagatttgctatgcctgagtggttcaaaatggagttttggttttttttaaataaaagctaacataataccttataaatgctactgattcctaacctcgtgggtcatatcacctttgatatgctgaaaactagattttctgaggttttctgacatttggatgaagtcttgctttgcaactcatcagctccttagttccagtgggacccattaccagctaaaattgcgcatttacttctaagttagctagagtgatgccaaaaatcagctgtgggtcttctgagcggtgcacacagtaatctcaatgtgcagtacaagtaaggaacctgaaatgcaattaattcattcaacgggaagaattatggtgtttgcacatgtgcgagggtgagacattaatcaagttttctggggctctttggagtattcgaagcacgtcaccttagctttgtcctctatcatgccttcgtccagtgcaaaaatgggtttgaaatccctgagtctcaaaggggcgggttttgcctatacaacttccatgaattgttataacctgagaaacagcaaaagcttcacttggtaaaatattttactctagcctgccaaggaatctacattcccagcttcaaagaatcccctttgtatcaaggtgttatctccaaatgcaaatattttacacaattgtgggaaatatcatggccagctttcctaaggacacttacctttttcacaacagggcatgggaagaatctgtttttattcatggaggcgagacagaggactctgcacatagcatgaattgggaagtcaggggcatccagaaaaaagcatgggaaactaaggcatagattacatagagaggtggatacagagagacaccactggcctagtctagaagattccagaggcccactgttaacaccattccacaagctctagaccttttgacctcagttcacacctccttggtatagttagctacctaatgaatggcggatggcggctcaagctttgccataggcacagtaagcatttcgattatttcctatattccttaatggagtattatgccaatgggtgtctgtctgtacatgcgtgtatccttatctgtagcactccaataaaactgcttcaaataggcacctacaatgccctcctgagttttaatatcaggaaaactggatatttttaaaaagacacactggccattttgcaggttgcactatagcctattatctaaagcctgatacagagctatccttgcaccagtaatatattatcaagattttttatactttaccagcattaacccgttttatcttcacaacaactctgggagaattaaagacagagagggcaagcagtttctccaaggtcacgtgactgttaagttttgagcagagatttgaactggatttgtgtccttaaacgctcagctatgctgcctctgggtggagaacagtgggtgtatgccttgagagcatcacagacacagagtctgtgtctgtggcttaacacatttgttaaatgcaatagctaagataggctgtgtgtacctagaagcatacatgcaaagtgccatgagtctcctgcatgccacctttccaagtggtgcttataattagtatagcctgcttttacctccgaggaaactggggcataaaacccttaagaatttgccctaggccgtaaagttcatgaggaggggcaccgggattgaatctcaaaccattaactctgtattactgtgcaatactcactttctaatagaaaggcacgacataggtactagccagcgtccagtagaagacaaaaagtccaccaaagaaggtagtttgaataggatgcatttaatattaatattatctaataaaggtagattaattacaaaggcggggggtaaagataatgctgaaaactaacagaacaacagatataggaagcagccactgttccccacatcggggagagtatctggaagaggaccctcagggattgaaatgtagacccttttagagaggatgtggcagtggcctctgcatggtggggaaattcacggaggctggttctggcaatcaggaagctattggctaagtggcagcaaacctggctggagggtgtgcaccactgggtacccaccacagtgggcaagaacaagaaggaacatcctgggccagtgagaggagcctgttcctcctgcagtgcctctcctccctcaactgccagagccaccactgtaaatctgaaatctcttctaagtggtccaatgtcagtgaattaatattctgcccttgtttgtctaatgttgtaagaatccacgtttacctgtgttccccaggtatgtaggtatgttaacatttttgcatacataccttcatacctggggaatgtctccttcagccacagaagtaatatctgcaccctgcatctgctattcccatattcttcagagttctccagattacattcagtagttatttcctttttactcgttaattattcatatccagtctctcttgttaaaattattggtggaaattctggctcctagagaaagatatatgtcatataaatgtaaaatctttcagttctcttgatgagtcagcggcctcctgcagagtcctaatatttactttccccagacgatactgggatttcactctaggcatgaatctagcagaaacagggggtagttacggtgggactagaagaaaataagtatcctctttcaaggcattttttcccggtgaagtcatcacagtttttcagtgaacaatgggacatctcctcagtcacaggaggtcaagctgcttcccctggcgaggaagactcagggtgacttcagggctcaagattgtctgtttcacagttgggtgcagtggctcatgcctgtgatcccaacactttgggaggccaaggcaagtggatcacttgaggtcaggagttcaagaccagcctggccaacatggcgaaaccccgtctctactaaaaatacaaaaattagctgggcgtagtggtacacacctatagtcccagctacctgggaggctgaggcaggagaatcgcttgaacccgggaggcgaaggttgcaatcagccaagatcgcgccactgcactccagcctgagtgacagggcgagactccatctaaaaaaatatatattttttttctgtttcactggagtctaaccagatattgccatttcaggtctcaggacactagtccatcgcaattaacaagaactttcagaaaataatttgataagacagtgaattcactggacatggtacttcagcaacctacacaattacattaaattttgtattgaacagtcagcaatatgaactctcaatatgaaaaattcttccaaggctggcatagaacctctctggttctcctattatgacttgagcttatggttaaaggacttggccttggcttatctgttgtttgtttgtttgtttgtttgtaagacttccactgcactcgtggggggatgccatgacacaccacagtccttgtcatcattatttctgccataatggccgagtgccagagtcttggccactatggcagaaataactcccaagacacttgcttcagtttacccttcaggacagtcaaccacaggtaacagcttgattaccttgattattttagtaatccaagcgggggtttcctaagatcctgtttcccactggcatgcgcctcagcagtgtactcacactaggctaacgacacccctcaccaaatcctatcattgagggcctgggaccaccccattcttgaaaggtgtcttgttagcatccagccaggatccagaattaccaccaatcatttgaaaaagaaagattgatgataaataactactaactagtaaaaaaacaaacaaaactatttaatgtgatcaagataactgaagaatgcaggaatagcagattcagggagcagatactgcttctggggctgaaggagacaactttggggaggagccttcttggaagtgacccctcccccaaggctgagagtcagacctcattggagagggtgcagctgtgaccacagggtggccagaagcttcagggaggtggctcaggcctaggctgcaagcagggaacaggtaccagcaaaatatgctaggaagcttctcgctgggaggctaatataaatgggtgggccatttgctaggatacaagagaaacttgccattgggctgctagggaaactcgcccagggacgtgcgcccctgggtctcccacacgccagtgacaaggagacctggggctctctggcaagaaccacaagaagccccttcttcctgctgtgtccctccagggccctctactgacagacccaacaccgttccagctggtaaaggaggaccctccggaggcccagccccaggatcaagaaaacagagcaaaacatgggtcgacctggagttgatccttaattgatgatgggcacaacatggagcctgaaatcatttatttcattttcaagtttcaggctttctgacagaggcaaagcacctagccataaattgcagaaatgcttcattgaccacggattaccatggtggggtaagaagagcaaagcgtcctttccttttggttaagtgtcatgtgtggcagctcaaagaaacagtagcaacattatttttcattttttgtttagccaaagtttgtgccatcacaaaggcagtatgagaaacaactccctgggcttaaaatttagaagaaaaatgaagatatattagaatgaatttgtgtagtttaaagaatgaaagcaaggcatttttttcaaatgttgggaaagttagtaatcatggaagattgaagaccatgagctctcaggtatgttagtcataaaattactgacgtctgatttaaaaaaaaaaaaaactgcccagtgaccgactcattcattaggctttttgcatctcttcaattaaacaaagagagggaaaaagaaaagggaagaagaaaaagaaagagaggaaggaaggaagggagggagagaaggaaagaaggagtctctcacaaatatctatctggaatgattgaaggtaggtaaggtaagtaggagtatagtgattttgtaactatataaacccttgaaaaggaaggtcagaaaatttagttaaaaagaattgccgtacaaattataattctttgccttaatttttaatgattagtttaagttcagtttttgactattatgaatacgtttcaataaatcttttctagcacttcacatgcaccaggcactatggtaggtgttgggaacagaaaggagatgaaaacaagatctgtgagcaagaaagttagcaactctcagaaaggccggcttctgtattgggaataataccaggtaataaggccggcttctatattgggaataataccaggtaacttagcagcacagaagaatgagtgactcataagttgaaacttcagtaaatgaccccagctaaattattcagccccacgcttcaggtgcagaatttctctaaaagagcctgatgacttctttaagcacagacaatattctttctaagtgtacatctctttcaatgccaagttccttttctatttgttttgttgtaattaagaatacatgactcctaattgtattcactatcacctgtgcccaggtgtttcgcatatatagtatttcactgggaacatttatgaattgggaaggattctctaccactgataagtggagtgcggtagattttacaattaattattgaaaacagtaatggcatccctgcagttctgtctgttgttaattgattgtttagcagtcgatatttgaacagaaactgtcaggtttaagtccaggttccagcctatgctgaggtctgagggcagtgggtagatgaatggcagatagctgaaagaacactagggaggtggggtggcataggtaggtgaaatatggctttattcagcagctctctcagcagcagctctcttacagtttgctctgtctcagctgcttggtccagccaactcccatgcacagctgcacggccggttctccattgccttcggggtcagtagcttaactctttctctctctgggcattagcgagccaagcttggccctggctcccctctgttcatctccaaagacagagagctctggctcttttactgtctttctctgggagcaagcatgcctgatatggtttgcctgtgtccccacccaaatctcaatttgaattgtatctcacacagaattcccacttcttgtgggagggacccagggggaggtaattgaatcctgggggccggtctttcctgtgctggtctcatgatagtgaagaagtctcatgagatttgatgggtttatcagggatttccctttttgcttcatcctcattttctcttaccactgccatgtaagaagagccttttacctcctgccatgattctgacgcctccccagccatgtggaactgtaagtccaattaaacctccttttgttcccagtttcaggtatggctttattagcagtgtaaaaacgaactgatacagtaaattggtaccagtagagtggggcattgctgaaaagatacccaaaaatgtggaagcaactttggaactgggtaacaggcagaggttggagcaatttggagggctcagaagaagacaggaaaatgtgggaaagtttggaacttcctagagacttgttgaatggctttgacaaaaatgctgatagtgatatgaacaataagttccagactgaggtggcctcagatggagttgaggaatttattgggaactggagtgaaggtgactcttgttacgttttagcaaagagactggtggcattttgcccctgccctagaaatttgtggaactttgaacttgagagagatgatttcgggtatctggcagaagaaatgtctaagcttcaaagcattcaagaggtgacttgggtgttgttaaaagcattcctttttaaaagggaaacagcataaaagttcagaaaatttgcagcctgacgatgtggtagaaaagaaaaacccattttttgaggagaaattcaagctggctgcagaaatttgcataagtggcaaggagcctaatgttaatccccaagacaatggggaaaatttctccaggccatgtcagagaccttcatggcagtccctcccatcacaggcccagaggcccaggaggaaaaagtggtttcatgggccaggcacagggtccccgtgctgtttgcagcctggggacttggtgccatgtgtcccagctgctccagccatggttgaatggggccaatgtagagcttgggccatggcttcagagggtggaagccccaagccttggcagcttccatgtggtattgagcctgcaggtagacagaagtcaagaattgaggtttaggaatctcagcctagatttcagaaggtgtatggaaacacctggattcccaagcaaaagtttgctgcaggggcgaggccctcatggagaacctctacagcagtgcaaaagggaaatgtggggctggagcccccacacagagtctctactgggccactgcctagtggagctgtgagaagatggccatcatcctccagaccccagaatggtaggtccactgacagcttgcaccatgagcctggaaaagccacagacactcaacactagctcgtgaaagcagccaggagggaggctgaaccctgcaaagccacagggtggagctgcccaagaccatggaaacccacattttagatcagcatgacctggatgtgagacttggagtaaaaggagatcattttggagctttaaaatgtgactgccctactaaatttcagacttgcttgggccctgtaacccctttgttttgaccaatttctcccatttcgaatggttgtatttacacaatgcctgtaccagcattatatctaagaagtaagtagcttgcttttgattttacaggctcataggcagaagggacttgccttgtctcagatgaaactttggactgtgaacttttgggttaatgctgaattgagttaagactttgggggactgttgagaaggcatcattggttttgaaatgtgaggacatgagatttgtagggaccaggggcagaatgatgtagtttggctgtgtcctcacccaaatctcaacttgaattgtatctcccagaattcccacgtgttgtgggacagacccagggagaggtcattgaatcatgggggtcggtctttcccatgctattctcgtgatagtgaataagtctcatgagatctgatgggtttatcaggaacttctgcttttgcttcctcctcattttactgacgccttgtaagaagtgcctttcgcctcctgccatgattctgaggcctccccaggcttgtgaaactgtgagtccaattaaacctccttttgttcccagttttgggtatgtctctaacagcagtgtgaaaatgaaccaatacagcgcctgtacagtgtcagcaggcaaccatatgttctacagacaatagtgatgtagggccaaggcatggccttcccatgttatggctacatggctgtgataacaagcagagttatatgcctgtgctgtgctctaaactcactgagtcactctggatgtttacctcggcctgcctatccttgaccaaagcactgccgtgttcgttacaggaacacaaaatcttattcttgcagcttggagactaaaggaaaagaatcattagcaaagtctactgaagaatatccctgaagtcagggttttttttttcaaactctgaataattaaaataaaactaaatgcactaacaagataatttgaatcttgaggaccttaaaattataaaggtccttagataagtaaaacatctgaaatatatgacttgctttgttcagataaagtaatatctttacatggttatagaaaatatagcatagtacactcaatatagtgagataagaaactcaacttatcttgggggaaaatgttaagatacggaatattttaccacgttaagctacttttttgtttgttttgggtttttaaaaataatatatttagagccgttctttggaaatctgtgcagacttgctaaagtatagaaaatctctttgcaaataaagaataatagaaaaaactctaaatattaacacataaaattttaaatgtgaatcatattttatgtaaagttataaattggtatataagaactatgctagtattgcaacacagaatactattttgtaaaaggaacggggaaaactttcctttgtctggcctgagtttaatgacatgttactgggaggtgtgtgggaaatcttggacaatgggcatatgttcacgccatgccctaaaagaagtgatgttagccatgcctgatacatttttatggagctcattagggaatgtggggcaatggagacagttcatgtgagtgattcctgaagagtgcaagcaaatctaccattgtattgaagctgagaggggcaaggggtgaaacagagtgcccagaggtgctgggctgatgaagggaccttggaagctaaaacatggaatggccatatttaatacagtcagcccattgagatttacagatcatgccttttgttagaagatagttgctggaaagagaaaaatcagcctgtagtcattaacacaggccttgattaaaatgtcgtagtgtgagaagagctcccagatgagtttctgtggagaaaaaggaggttaaagatttgataggacagattggggaactttggccaaagttcagcttgctccttgaagagttctttcagaatctttgaaggcatcagacacctctattatattagaaacaagacaggatatagggcagccagcacagaggcatgggtttgcagccacacactagagatgctgggtttagcaaaggggtgaggagaggcagctggggccaaagttttgcaagagtcagtggaaggttttcagaacgttagagtctccacaagtcatttaatatatttgtcttaaaaaataattcgagcttcctacccgattcttcagggtgatatctaccgtagactatttctgcatctgtttcccaactaagattgaagtacaactcctaatctgcttttaatttaaacagtatatatgatgttatatttttttctttttatctaggctggagccaatgtccttctccaggatgtgaatggaaatatcccattagattatgctgtagaagggacagaatccagctctatcctgttgacctatctggatgaaaatggtaggcaaaaacttttaaaaccatagaaaaaaatagattgggagaattgtaagtgtgtattcattttcacaggtttgcttacatgatttccgatggatgtagtttccgcacgtggtgtagaagatggtattttttcccttcagctttccattgctctcactgcactgcattgtggtttagtcaatgctggtttttttgcaagccagcagaaatctagaggccaacaatgaagggacattttaacaggcatctaaagtccataattagtgggactgggtttgtaattataatctgttctcccctgggaggggaagggaagtcaaccaacacaattgaattttgagctaatgagaacaaggtcatctgaagtgtattctcttagaagcaggtggtcctagctggaattagaggcaaggaagtgagggcttaagtcaaggacacttgtctgcaaatcgaccctttgtgacactttagaacacaaaggtcatcagaagaaagccctatggccatgatgctagcctgaaaagatgaggctgagcccctaaatgcattcaccgacaaaggatgtttaattatacaggtccagcatataatttcatcagtaagtgcagccttgggaaagtgggaggtatgagaatccctgagcacaatatagtattaaactaaagaattatgcccctccttttttcccctgctgtttaggtataaataacaataaagaaattccaatcccttcaaaatgacccttggccagagaaaagtttacagtttttaagagccacacggagcttatgcagatactctttttgcctctaagaaaacctcacatctgcctcattgttcccttgtgctctctgcctcctccagattgcttttatgaaaaaggtttattccgaggatggcttagaataataataattagcacttagcagcaatgagttcgcagataaaatagtcttattctctgtgaaagcaaggtaggtgtggttaccacgacaggggatgatgtgagcattgccgtgctgctcacatcgtcaccaagtgggggtctcaggcagaagcaagctgggttgggttagcagtgcattcagttgaccactctgcagctcagtcgtgcctgggcactgtcacctgtgggaacgctcactcactttctccaagtcttgttagctgtgcctcgtaggaggcagattccattacttctaaagggaatgaagcttgaagttatacagacttcttagttgggaagttaattatttggatccttgccagacttcgcatgtggcctgcaattgtgaattgacatgaaaaacttggcgcaatggtgcctatagttaatgatactgtattgcatactttgaaatttgctgagatcatagtttgtatgttaagtgttatcaccaaataatagtaaaaataacagtaaataaagagtgtgggaggaaatttgaaggtgatggatatatttatggcatataatgtggtgatggtttcagggatgtatacttacaaacatcaagctgtatacaataaatatgtacagctttggtatgttggtcatactgcaatgaatggtttaaaaaaataaaaccagtgatgtcaaatttttaaaaagtacttgaccatgttttgtttagctgtgccagttctatgttattatttcctgctttttctgttgttctgaatttttaaaagctacagtaataaatgtttcttttagaaaataaaacgacatttatttgcaaatgcattcacattgcttataaacctctccaactcattacagcatttcgtttgataggaaattttagtattgcaagatcagtgttttatatcctatgtaaagaataaaaataaatgtgttcctttgagaggctgatattaaaaaggagtatgcaaaaacaaaacaaaacaaaacaaaacaagaggaaagtactaactcttaaatggctggtagaaaatctgtcactactatggctgtcacagtcagcttgttaaatacatgtttgctggaacaaactcaatttaatatctcttaaatttttaattctgtttgccatttgtcactgcagtcgctctggcccatgccttcacatccatctgcccttccctcagctcattcacaatctgcttctgcttatgttggtcttcctcccactatctccatcatctgccgccattcccagtaaatactgtctaattcgatttattctctggccctctgcttggtgtacttttacagttatctattgtgacagcatgggctgatgtctttagaaattcctactatttcaagatgagatttttattattatttggctctgggtatttcagcatcgcctttttataaccaggtggttgcaatcttagaattttcattttgcgttgtgcagtttcgcatccgagtacttatcacctgtcacatcaggatgcacgtggcagaagaggctgcaacgtcttgaacaagttgattacatggaaactcgctggtcacaagtcctaattgtgctgtcaccaccgacttacactgtaaactcggggacagcaattaacctcggctcactgcctgagcctgccaggctgtgaaatgagacaaccacggagagctgatggagcatttgatgaatattagatctctagtgcaaggagaaccagctggcatgcaaggaaggcagtcgattagaaagtgagccagcatggaaagaaagcactgacaggagagcccaaggagcacccaggacaaaagatcagcataatggatacattatacacacacatacagaaatattcatgtccctgaaagacaccaaaagctttagttggctctgcatacaccaccattcactgtcgtttcttctttcaaacccattcttctaacagtcatagctcacatttattttattgagttcctagtatcctgtggttcagcccactgaagttcagtttctaaacctacaaacccattggaaatgcccttgcaacaattgctattaccttccttagttttctatccagtgatagctttctttccttttttattaccttatctctctttgacattcgatgacctttgtgacactctcttaggaacagtctctctcctgccatcttcccacagttttccttcctctctttgagcttctacttaggtttccttcgaatgcttcccgtgtctgtccaaattgctaaatgttggtccctcctggggctttgtctttgagaatcttccatgtccctccatgctgttgctgggttgtctcacccttttgcttgtgttgttaccacttgctggttctcaagaatatccttgtagcttaattatctttccagaccttcactcctgcatacgcagttttattaagtatctcgacttgagtgtcagatagtttgaaacaacatgtctctgtggaatgtgttattgtcctttcactgtgtgtatttcatattttcccattatcaccaggaacatcacttttcttctcccatatcgtcatgtctgattgttgccaattcttacagattctccttatttgatatccttctaatatgtccacccagatcacaaatcatgctgtcactgccttaattaacatgctggtctttctattttacattactacagtagcttccaaaactggtcttcttgcccccagtattagccctcccccttcatttttcagaggactcccaggtgaatcagttcatgaatgtcatgtgtttttcttttgtttaaggcagtttatttgaaatgctgtccctgcaccagcctcttcaaaatcatacatagttggggttacagtctgcatgactacataagatggtcgcaagtcgtgcctgctgttagggttgggagaaagcaatgggtagagggtagctgcacccttcctgtttatttctgtttgctggaactactttatttgcctgctcagctcttttacttctgtgcatctcttagaacacttattatgaagataaaaatttgggttagtggcagttctatgagcacagaggatcccatgctaaaatcatgggataggtcatattatagtgaattgcaaatgcctgtttagctttgtttcctttttgagggcaaaaatgatgttttatgtatgaccaaatgatgatacaatggcatatgataatgaataaaaataaggcatatgcggatcttataaaaacaccaaggaggaaggatatgattttccttacaagtaccacagaaggcatcacagaagtgtcacctacactaagctgaaggtgaggggctgggttaccctagggaaaccaaccgtggtggtctgacccaggcatagggagtagcataagcaaaggcaagaaggttggaaaagccacggaagagaggtggcgcagatcctcccacaactcgggagagcgcgcagctgtgcagctcagcatggtcataaaaccatcacaatagcggcaaagagtagccctaatatcatcagagaaaaggaaaagttgaattcttacaaaaacaatattaccttaagagggacggttaagggaagttaagttagggttcagattgacttcgggagttgacgtaatttcagttttgcccaagtatccactgatattatcagattaaaccaggcagtaataatatcacaagtaataatgtgtggatttcaggtaaattattttgtttcttaattcttatattaaaataaattactaaatttctttcaaaataataaatctaaatggaccttccattaatttgttttcaaaaaacaatacgaaaatctatattttgtacataaatgagaatggacccattatccgttacaacgtagacttatgggctatatccatcttggttggttttatccaggagcattaaagaaatttgtttgacaacgaagagagggagtttctgttgtgttgtattaaccaaaagtgatttgggctactttcctgaatatatattttaaaaaaatctaaaattcacattttaattggcatcatatctaattcaaaattaagttttcaaatattaggatacaatgtaataatattcccctgtgatgtcttcacaacagggaccagaaatagatatattttcttaataaaatgagtctgcagtgagtgatgtcttatctctgttttaatttgttacttgtttttaatcttgttgtgtttttatcactccattttaaatacataattatataaaagatacatacaactttagtagacgttgtaacatcctaaaagttaacaaaataacttaagagtgactatcagattcttgtgctactttagcatgcaaaattgaaggctgacatctgagaaatgatatttgccaaaataaaatcacacatgaaatttcataatcctaaaagtcagaataagtgacagttttagctggttcataacagacctcaaatgactctataagggaaatgttagttctaaaatggcatgtccatgattcagaagctgaggaatggtcacgggtgtttctatttcatgtttctactaaaatggactagtttgaacagaatatttgaaacaagatacattattcaaatactgcattttgctttattttgtttggttactccatgcctcctaaatgaccaaataatagtatatgacacacctaaatgagaggcatgaaaaacacatgttagaaagctgactaatcacagatcacttttatttagtgcttactgaaagctaaatacatattatatgttttatgtgttttaacttactatcaagcaacggacaaatcaaatactatcaacaccattttgcagttgaagaaacagaggcagaggataagttacttgcccacattggcacaagtagtcattgatacacacagcactaacacccaagcaggttgagtccagagctcctcttctctattgctcatccaggctcggagaaggagctgtggcacgaggcagagttgaagtgccccatggggagaaaagataccagatatgcaacacgcttgatgtggtttctgctatagagctacatcttaaaagtatgaactattatctgagggactaagcacattgaagcccacacagtttaaataactttcgcagagtcaacctgaggaaggaaactacagacagtcatgttcaggagcatcaatccagagtgtattcttgggtccgctgtgctaggctttctcttgatgtttgctgccaggatgaaatcagataagagacaaagtgctcagaagagtggctggttcatagcaaacacttgctgtgagggaggtatcaccatcattatcatttttcccttggaagaagatgaattaattctccttagtaaatacatattttgttcaggaaccaatgctaggaataggggacacatcaatgaagagacacagccacagatgaaacatcatgaaacttcaggttaaaatatatgctgagtagaggtatagacctgagccttctgtgcaccacctacccacctgggtgaagtcagactgtggattccgcactcaatattagttatctttattaacattagtagtcatgaaatgttcaactgatgcatcatttttaaaaacttattttaaaatcattttagattacaagaaagtctaaagacagcgcagagttcccaaatgccctccacagagcttcccctaatgttaacactcgcatagccatggtacacttatcaaaactaaaaagttaacattgggacaatattaactgtactaaactacagactttattcatagttttccagtttttatactaatgtcttttttttttttttttgagatggagttttgctcttggtgcccaggctggagtgcagtggtgcaatcttggctcactgcaacctctgcctcctgggttcaagcaattcttctgcctcagcctctcgagtagctgggattatagacacttgccaccacaaccagctaatgtttgtacttttattagagatggggttttgctatgttggccaggctggtcttcagctcttgccctcaggtgatctgcccaccttggcctcctaaaatgctgggattacaggtgtgacccacagtgcccagcctaaagtcttttcttctattccaggatactagattgcttttaggagcaactattttggccagaaaaatcaaagagatcaaaaactgtatctttgttatttgtttccatttaagtactttaaaatactttgagtaatgtatgttgatgatttatactaaaacagatattaattgaaaacctgccattataaggcatcatatcatactttagaacataacatcccagcactttgggaagccgaggtgggaggatcacgaggtcaggatatcgagaccatcctggctaacaccgtgaaaccccatctctactaaaaatacaaaaaaaaattagccgggcgcagtggcgggcgcctgtagtcccagctactcagaaggctgaggcaggagaatggcgtgaacccgggaggtggagcttgcggtgagcagcgatcgcaccactgcactccagcctgggcaacagagcaagactctgtctcaaaaaaaaaaaaaaaaaaaacataacaagagataattttatattttttaaagactatagttggaaatagaatatgtacaaagataatcaattctttgaatgagtgttcaaagtggaagagaagcttcaaagaaaaacacattgaaagaataggttataaagctaggctttgacccccaggaactgagaagtatctctccattctggttgaaaggctctttctccccacaggagtggatttgacctcactgcgccagatgaagcttcagagaccaatgagtatgttaacagatgtcaaacacttcttatcatctggaggaaatgtcaatgagaaaaacgatgaaggagtaaccctggtaagttcatatatttgactcagaaactatttgaatagagaatttaagttgatctataaaacatagaattcattaaattaacctttaaataattgttgtgatcataaagtaatacatgtcaattgtagaagttttggaaaacacctaagtaagcaaagaagaaaatgcagacccggcagtcccattattgggtgtctacccaaggaatatatatcattctaccatagacacacgcatgcgtatgttcatcccagtgccgtttataatagcaaagacatggaatcaacctagatgtccgtcaaggtggacgggataaagaaaacatcatccatatacaccatggaatactacacagctgtgaaaagaacaaaaccatgtccttcatagccacatggatgcagctgaaggccattacctaagagaattaccataagaacagaaaaccaaatatcacattttcttactcataagtgggagctaaacactgagtccacatggacacaaagaaggagacgagacaccagggcccacttaagggtggagggtgggaggagggtgagaatgacaaacccctaaggggtactatgcttgttacctgcgtaatgaaataatctgtacatcaagccactaaaacacacaatttacccatgtaacaacatacacctgcatcccactgagcctaaaataaaatttggaaggaaaaaatgcaaaatgcttatgccactacccaatatctctaggttgatatattttcttcaagccttcctcctatgtatgtttttcctaagaatttaaaataatttttatgcagtacttagtccatgtagtttttgaaatgtaacttataggagcatgctttcattttagtgttcagtaaaacaaactatggatgactttggtgagtgaatttctaaattcaagcaaactcctgtcattactttttatggctctcaagcactgttgcagtaaattattaaaagatcaacaaaatttggattaatttgtatatatttgatgtctaatcaccgaaataagaacattttgccctactgacccataaaacttacctgggttagtgtgagttaaaattaataatgacagaaagaaatgtaagacccaggggaaaaaaatttgagagaaagtaaactagaataggagaagggaatttggagttctgaagtgtgaattgaattgaaatgcttcaaatcagtgattcattactcccatgaaaaaaacatggtgtgaggttgaagacagttgataaggaaagtgatttaactaaataggtaaaagttttgttgtctgaaaagtttccttgagtaataaatgtaaatatatttttacatttattaaatttttgcatttattaagtgcctgtgacctctagagggtcacattctaaaaatgtgttgttttcttatgacttagagttacgttgttatagtctcctaaagtttataaatttataaatatttattctggaagataaaatttagaaaagtctaacttcaaaatgttatagttgtataggcttctaaaatttcccttttcttactttctttttttttttaaatggaatctttccctgtcacccaggctggagtgcaatggcatggtcttggctcactgcaacctccacctcccaggttcaagtgattctcgtgtccaagtgattttcctacctcagcctcccgagtagctgggactacaggcgcatgtcaccacgcccagctaattttttgtatttttattagagacggggtttcaccatgttagccaggctggtctcgatcttctgacctcgtgatccgcccgccttggcctcccaaagtgctgggattacaggtgtgagttaccgcgcctggccagcttctaaaatttttaaatcatactttcctaaattttgtcttccaaaatcgatatttataaatttgtaaactttagaagactataacaacgtaactctgtcataagaaaagaaagcaaagcatatttagagtgttttgaaaaataacacattcaaatggcaaaagcattctaaattaatgaagaaatataattggccacatgctatgaacaaaataatagtgaccaaaattcttttgtcatggatccacatttcagttgggaaagtgggtaatatacactataaataagctaaatatatagtatcctagtaataaatgcaagggaaaaaacaacacagggacatgttggtcatattgttgccattttggatagatagagaggaaagatctaaccaacaagggtgttttgaataatgacttcaaagaagagacagcacagtggggctgtgaagggaaagcattccaggctgagagtcagaagtgcaaaccacaaactcctacagtgtcaggggcgagtgtggtgtgcttgggaaacagcaaggagcccatatggctgaagcagtgtcagcagggagggagaggcgctgggaccagatcacacaagcttttatgggcctatatgaggaccacggctatgactctgcatgggatgggaagacagtgggaagttcagaagagaggaggggcatgagcctgctccgttttaaaaggatcacctaccctggctgttgtgttaagaactgactgaacaggaaacaacaggtgctggataagatgtggagaaataggaacactcttacactgttggtgggactgtaaactagttcaaccattgtggaagtcagtgtggcaattcctcagggatctagaactagaaataccatttgacccagtcatcccattactgggtgtatacccaaaggattataaatcatgctgctataaagacacatgcacaggtatgtttattgtggcactattcacaatggcaaagacttggaaccaatccaaatatccaacaatgatagactggattaagaaaatgtggcacatgtacaccatggaatactatgcatccataaaaaatgatgagttcatgtcctttgtagggacatggatgaagctggaaaccatcattttcagcaaactatcgcaaggacaaaaaactaaacaccacatgttctcactcataggtgggaattgaataatgagaacacatggacacaggaaggggaacatcacacactggggcctgttgtggggtggggggagcggggagggatagcattaggagatatacctaatgtaaaatgacgagttaatgggtgcagcacaccaacatggcacatgtatatatacatgtaacaaacctgcacgttgtgcacatgtaccctaaaacttaaagtataatttaaaaaaattaaaattaaaattaaaattaaaaaaaaagaactgactgaaaaggacaggggtaaaccggagagtttgtttaggaggcttttccagtaatctaggcaatcagtaatgtggctcagacaacaggggtagaatggtagtgcaattggacctcctaataaatgtgttgtgtgattagaatgactccaagcatttttagcttaaactaccagtgtgatggagatggcatcaaatgagatgaggctgaagaagacacaaacctaaagcaggaaagaccacatcagttctggagatattaagtttgaagtgtctcttagccatcttaatggaactgttggatttgtggttggacattggagtctggaactcagatctctagatgaaagaaagaatttgaggaacattagcatatatgtgatgttgaaagctttgatactggatgaagtcactacttgtatgcagaaggaaagaaatttgggaccaagccatggagatgaagaagaggaggctccagaaatgggatgagaaggagcaagcactgaggaaggaggaaaaccaagaggacgaaatgtcctcggaaccaagtgaaaactttgaggaagcaggaggaatgatagactaccaaatactgctgagtggtcagttaaatgggaattgtgaattggttattggacttagtaacttggaggtcattgactttctcttggaggacagtttcagtggactagtagggtcaaaaatctgattggattgagttatttaattaattcatttattacacataatgaattaatgcctaacacataatagaaacgcaatagagcctttgtttctttgtatggtagaatatattacaacttcatagttctttaaaaaaatactgctaagtaaaaacaaaatgcatacttcaaccactgctaaataaaagagcatacacacttcagtagagaagctattgaagtaatcaatacagagcaataaatagctatcattttcaatcattttcagtttttactttccttgtgaccttctttttattgaacagagagcataaatattgcaaataattgttctaaaataaccaaatcttgtggtcattatctttgagcttttaacaagaaagtaacaatgaacaaaaggctaggatgctgtcccttgaagattacagcatttaacagccagtggtttggtttgattcacatgtctgaattggttagtctgtatatgttaatgactgtcatttccttgtgttttctgttctgtaaggtatatagtgtatttatctattgtggagataaggagaagaagacagttttgttcagattgatttccatacctgcgatggaatgccagttgtggttcaaaattaggcataaattttcacagtgttaaattgttatgtgcaaaagagaggaaactaacaacaaaaggctcaatgggaataaaattctaataagacgggtttggagttgcctttaccttctttattagaattgcaacaaaataactaaatataacatatctctttttaaaagggatcttttagtttacattatcttcttgttaaataggggcctcagaaaatgatacaattttaataaacaccatgttacagagtatatgaaggtgaattcatcagtttgagaatatagtctttgaaaatattaatgcgataactggcatatatattatgaagacattgttgttttattatttactgtgttagcacataatttgatatatcacatctggccccgaggcttattttttttttttttttttttttttttttgagatggagtctcgctctgtcgcccaggccggactgcggactgcagtggcggaatctcggctcactgcaagctccgcctcccgggttcacgccattctcctgcctcagcctcccgagtagctgggactacaggcgcccgccaccgcgcccggctaattttttgtatttttagtagagacggggtttcaccttgttagccgggatggtctcgatctcccgacctcatgatccacccgcctcggcctcccaaagtgctgggattacaggcgtgagccaccgcgcccggcccccgaggcttatttatttggtttgttaggaaagaattattcaggagaggcaagtatcaagcaattttatttttttcacctttatttcagtaatgctggttcatcccttagttatggatggagacagccattgattttatggtcatttttaaagaatacaacttctgtgatcactttatgtcacaaaccaacctcaaattaaagtgtccaatcccatattataattaaaactctcaagtcaggagttgtagaagttttgtgccatacttcccagtgacccttgggtggaacccatggatcacctttcaaaataatgtttaaaatgcaataaaaatggtgcctagaaaataaattatgttgaaatacagtcatcataatattaaaagtaaatgtgtgatatataatgcatgtgcttctatatcattccactaagcaacagatctagtaattaccatgattttaaggtggcattgaccatgaatgctatcttgaggtatttgctgcaaccgaacagtgatatgaaaatgtcaggacttttattgatgatgacatcacggctttgctttttgtgctcattgttgaagaatttgctaaacttcaattaaggagtcgaagaaaataaagctattttctcacccaagttttcacccccagcccccgaattttatccacaaatcctgcagaggtcagtgggcccaggtgttaagggctgtgagtttagttaaatgttaaatccattcccaacttagtgctgtaccaggttgggaagtccgtagaagggaaggtggacatgggttactatttttcctcttggcgcttttcttcatccatcattcccttactaaactccactgaagttaagaggaagaagaagggaggagggagcagatagggaagaggagaggcaataagagcaaggtttttaactgagccctctttagatggtatctagctctctgaccaagaatttgagtctttttgtgagaatttgggggtgttttggatcccacccgcccgccatcatcatggggaagccttagcctgtaccaggtctgggtgatgcgctcttccaaatggtcctttatgctcactcagcttttgggagtttgaggacactccagattttctctgctaagctgtgcttgctccatgaggcaccccctaaaatagaaccagaaatgaccacagcttcatgggtaaaagcccatctcttgccgtttactttgtgcatgcaagaatcaaaaccagtttattctgtgtccaccaaactactcaggatatgtagcttctcagagtggtctctacagcctctctttgccataaaattgggaggaactctcatccaccttgatacctacacacagtgggaagggaaagtggactcctaacacactaagagtgctctttaaaaattgttcaacactttttctccttttgtctttaatttctgacctagtgtgccctcagtctcgaggtagagttcaaaagtcatctgagcagttttagggcaactattttccaatttacatatatagtctcactttgggatatgatttatagtattttcatacttctgtcaaagctgagatagtaaaaatcctgtgttagtgttatgatgaaatacatgaagaagacctgaaattattggtcaacaatcctgactgaacctaagaggtatttgaatggtcctcaagattagttttcatttcttcataacatagtttttattaaaatatagcattagcctcagcatgatcttctagcttcagagtggcaggggtcacaaagcttcagtaagaacagatccagtgggaatatatcataatatttaacattttacatacagattagtaaaaaatcagatgcacaaatacaagggtaagataattaaaaacaattaacagatattttccaagttatacatgtggaaaaaagcctctggcaaagacccttacaatgtaaaaatatgaaaaaaacacagaaatgttaatatcgttgattatgtcagaaattataattaacattttgcattaaagagtgagcaaaattaaggggcaacaggtaatttgctgagactaatatttgcaacaggtttcccaaaattttaatatcttcaaaatatgccgagttcatagaaattaatttaaaaaaccacctcttactagaaaataaacaataacaagagtcaattcacaaaagaaaaatatccaactagcctatgtatatgaaatgaggaccactgttgggaattaagtaaatgcaaattatttgaaatcattttagaaataaataatagtgaagatcagaaaagctaagggtctgtgcaaatacattctttcatacactgctggactgtaggtgaattggtacattctagaactctgcatggcagcatgccacaggaacttgaaaaaatgctcattattttagaatcaggatgtatcaaatggaaatcactacggacatatatgataatcaccaacaaaacatttttaaaatcaatatcaaaaatggtaactacataaatatcccacaattaggaattagcccagtcaatgaaaatgtgtctgtataattgtatactatgctttcctaaaaatctagggtttagaagcccaatagcaccatgatgaagaggccagatagacccaagtcggtgctcatcctggaagcctccatcacttccaagctgtgacttgtgctggctccttaaactctgagttatcatcttctcatcttttaaactggaataataagagtgccacattataagataaccaggcccaaagagaccgtgcatgtaaatcactcagcttattgtctagttagtacacagtgagctctcgatcaaagttagcctttaagtgatccaaacattcaacggcatggaaaatattaactgtatttgaataaaataaattgctaggtacacagtgattctaattttatttaatattattttaaattgacaaataatacttatatgcatttatggggtacagtgtgaattttcgatatatgtatacactgtgaaatgattaaatcacactaagttaacctatccaccacttttcttaccatttttgtgttgagacactggaaatgtattctttgttattttaacatgtataatacattttttgttgacaatagtcatcctgctttgcaacggatctcaaaacatatttctgctgtctagttgaaacttcgaacccttcgaccaacaactcttcattttctctcttcccctccccgagtccctggcaaccatcattcttctctctacttttatgagttttactgatttagatttcacttagaagcgagatcatgcagtatttgtctttctgtgcctgacttatttcacttaacataatgtccttcagtttcatccatgttgttgcaaatgacagggtttctttcttttttaagggtgactagtattccattatgtatatatgctacattttcttcacgtattttcctgttgatgaacagtgaacttggctattatgaatagtgctgcagtgagcatgggagtatgaatatccctatgacatagcaacttccattccttaggatatataccagagtggggtttgtggatcataaggtagctgtatttttagttttttgaggaatatctataccattttccataatggctgtgctaacttacatttctaccagtaacatacagatattcccctttctctgtgtccttgccagcacttacttgtcatctttttgaacagccatccaaacaggcatgtggtgatatttcattgtagttttaatttgcagcaccctaatgattagtaatgatgagcattttttcttgagcccattagccaattgtatatcttcttttgataaatgtctgttcaagtcctttggccatttttaaattgggttatttgttttcttgttattcagctgtttgaggggcctacttttatcaagggagtggcatcgttaaatagaaataaatgaccagaatctgagaagcgaagcatttatctagaaagtccaattgtcagtatctttagtgtctttttatattttacatatcttaaactcttaaaaataaatacaaagtaatttaaagttagaaaaacctttctggattttacctgaatacatgcttgaaagggcccaagagtgttttgctgttgaaaccaggcggggccatcttggtattcatctgtggacatttgctctgtgctgccttaaaccctgtccagagcaattgatccagctgagaaccaacattgaaaacaatgatagtgctacttattttaatttctataaatattgggttgaggtactgtttttcaaatattagaactatcttttatttgggaaaatgaaaatctcaaacttcagaaataattggtagtccacagtatgttttctagcaattaacactatcagtaaatgaaacgaacaggctgtcaaagactgagatgctataatatgaaatgggcacagtgttgggggctttgaccggatgcaatgaaaactgatccttatatgggatcataagaagagaagatgttctaatgaccaaatgaccctgttgtctgtttttacccaggcctacatcacactggatatgtgtgtgttagggtgcagttttacaggagatcccttctagagtagactcagactcccaaatgtggagcctgggatgctcctgtgctttcatagctgaaaaacactaagacttggtgatggttttgcaaagcataccaggaggcaatatgccacatttaccaaacaagactgcctgcactgatggagagccatgggaaggccaaagcaagcatatagatattgtgtatcatccagagactaaaatgttaatataaaattagtatgtggaagggtgagggacatagaagtggtttacagaaataagaaaaaaattatattaacatacaaaaatgatggtatgaatgcaagatgtattaggagcctcagtatgttagtgttatccttgtggcttgacctcactgtgtgtccactcttctgtgctatttcaaatctgagtgctggaggctgcagagcgtggcttcggatctcagtaaccatgcttcttccttgggccagttacctaaactctaaaccactgcttctccatctgcaaaataagggcaacaatcatgtcacagatggtaaagattagaagaaataattcacggcttttatacctaatgttttagaagccactctgaccacctgtcctgctttgtagctagataggtgatttccaaattgtaatttttcgtgggaactgtgtttgctaatatgctgctgctagttcacagcagaaatgataaccacctctgtgtttctcacagggcccttaaagtagcaggagaggaatgttctgagacaccacagggatcaacactgttgcagttgggcacctgatatcctctagtcatagtcaggacaagtagtaggagtataaattccatttcataaatagacatttttgttgttgttgttgttgtttttaatcttttaactctaggtctaacatgttcttagtgatgagaaactatatcccacagaggctagctgtttgcttatggattcagaggttgattgccagtagactcaaaataatgctcttaactcctgctattgtattatgataattgaaaagttggttatctcatgtgattaagtagaagtattcaattagggttttcatttgtttgtttattttggttttgggattacctagaagtaaacttgccagcctccacaaaggtcactggtagtaacactttggatagagtctctagtgagtgagccaggacttctagtcttccttcccagctgtgcttgtggtaagtggcccagggttggactaagttctaaatggtgagagccaatttttgctgtatggaaagcaaatctaatcctgcagggattggccctgtgaacttgacatcgttagtatcaattgctaaccagaaaattgattcattcttgattccatttgtagactctgctttatgctaaaaattagtatcttctgagattcagattattgcatatagcacagagtaactgccaatcatttactgattattcagataacgtagaatcaatttagaagcagatgaatagatcaattctctaggagagcaagtatgtaaaattatattttctaaaatacttatggatatatcattttggggactgtttcctagaatattaataagattaattctgtatgtagcaagcatgggaaaatgtatgtgaaacagtgtcttcatttagatgaatatatttattctaatgtagctgagttacaagaaataaacatatatttacactccgtagattgaagagcctaattaggtccaaagctataaaaataaatgtttttgttagattttatcaaaatgtacacattgaataagcctttttgactttaattttgtctttgtaataaaaacacaatggaacagagctacaaaattccgtgctatcaaacctagaagatggcattgattttactacttttaaggtttttttttctttcttttctgatagtttcttcttcctaattcttatgtttataaaatacatcatgtagttgcttagtaatgtcatttgagtgtgatgatagtttatatagaaatacaggctgctaccttagaaacaggaattccctcacctgaaaaatgtaaaacattctccaaaccccgatctcatcattattgttccaaaggccttatttctaaacttaagattccattaaaaaactaatctggggctggacatggtggatcatgcctgtaaccccagcactttgggaagccaagccagatggattgcttgaccccaggagttcaagactagtctaggtaacacacaacatggttaaaactagtctctaccaaaataaataaataaataaataaataaataaataaaattagctgggtttagtggcacgtacctgtattcccagctacttagtagggagaggtggcaggatcacttgagccctggagattaaggctgcagtaagacatgattccaccactgcactccagcctaggtgacagagagagaccctgtctcaaaaatataattaaaaaagaaactaaaactgggagaatgttacaatggtagctacacaatcatttttaagccgccgggattagttaatccttttcagtgtttctgtgccttttacacatacagaagcatcacaatgaccacatttcctgcttttagttattctttgaatcactttctatagcactaatacaatgcctggaatatagagctaatcagcaaatattttacctttgggcaagaagtggtaagcttttcaattattatattctgtattttaaaatattcagattgcattgaaatggaactcggagggggatgggagttacatgaaaaagtgcacactatcaaagttggaaggaaaattaataaacataagcgtactttcaaagactgataattacacccatttataccaaataaataaaattgcatgtatgttcttttgtttttatggtctctgtattttagatccaccatttcattaagtagctctctttaaaccactgagtgaactgcatgaatatcactactttaaaaaaatgaataataagatgtctcttcgctgcagttacacatggcgtgtgcgagtggctacaaggaggtggtgtctcttatcctggaacatggtggagacctcaacatagtagatgatcagtactggactcccctccacttggcagccaaatatggccaggtagagtgatttgctgaattctttaaaaaataattttatataattaatgaataatttcatattcaattttgatttgattttaaattacgtactaatcattattgtaatttgacttttaatagtgtcttcttactgaacaaatatttttatggttaaaggaaaatgcttatacaagagcacatgttccttatgtatctgaatattgtagtcaagtcattgaagaaataatcaaaatctgtaaacatttgtcataatacggatttaaaatgtttttcatattatatagacttcatatgcttgcagtctcatgaatctgtaataattatgtgttttctacggcaaatattttattcatcgcaatagtaggaaaagtaacttagttttacactatatggagatttaagttaatgtgttcatttcagaacattactttggggtaacaatcacatctagtaaatttgtagtaagttagatctttaagagactaatcattatgtaaaataatctatcataaatttcagtagtgtaactatcaaaagaatggaaagagtttgcatttcacgtattttagaaaaaaaatcatattgcgtggggaagttctttcaaacaaacaagaacattgtttgttttgacagcacctcctgtaaaaaaagatctatttattcaataaatatatttaaggatctgctaaatatccctgaattgtgcttctatggtgattcagtctccttatttgttgctggtctgttccagctttttatttctccttgattgagtcttgatggattgtatgtttttaggaatgtgtcagtttcttcgaggctatcccattggttcaatatatttgctcataatattccatcatgatgcttttaaatttctgagccgtccattgtactgtctcctccaccagttctttttgagttgcttgctcttcccagggttattgtcataattaatggggaggagcagaaagaaaagtctaagttggtgaattttaaagcagctgtttcttcttctaaaaatactaatttcttaaagtcttgttaagcttggtaaagaatgataaaagaaaattaatttatcattattttcacatgaaacccacctgaaaagcagggaaatgagtatacatttctgcaactgttctattgtaaagtgtctattgcaatctttggctctgcatgttgagggtgactaaatgaaatcagtttttcctgactcataaggagaatctagatatttattttccacatcctggaagcagtaatgaccaaggcagaaaaaattagattctgattagaatccaaaattctgattagaatcagaaattttatccctcaagccatcagatgaagctactgacctttttctcagaaatgcatagacacaaaaagtatccctacaatttcagaggttgagtcctctatgaaaactaggcatagaccttccagaggcccataagaaacctacagaaatagaaccttcttctttgctttttttttttaatgaaccttctttttttaatagaaccttctttttttttgcccaggctatagtgcagtggtgtgatctcagatcactgcaacctccgcctcctgagttcaagcagttcttgtgcctcagcctcccaagtagctgggactacaggcgctcaccaccacgcctggctaattttttctatttttagtggagacagggtttcgctatgttgcccaggctggtctcgaactcctgacctcaggtgatccacctgcctcaccctcccaaagtgctgggtttacaggcgtgagccaccatgccctgccagaaatggaagcttctatccaggaaattatgcttctagtaaagctatactatatagtaagaattgagagacaagatcagccagataaaatttgtgttatgtggtaaaaaaaaatctgtaattagtttgagtgatgaaaatggatttttaaatgttaatttatatagttagatttaacaattaaaaaaaccctttaatgattaacatatatgccacacatgatacatgccatgcgtcagtggtagaggaaacataagcccaatctaattgtcacttctttcagaaaccttcctagagaatcctgtccctcaaaagtcataagacacaggaatcaccaaatgataaggcagagaattagtggctatcagtgttattacctgcctttacctgtcacattccaaaaacttcccaaactttttaaaatctgttctttcaaattagagaaacacagtcatgaactcacatgacaactatgctgcagaagccatgttgactttgtcagatgcaaaggaattaagattgtttttattactccctctccagtgtgcctactaggtttccaacattcatcatttattcgtgataagtcagttaagaaacacttcccaactacttcatttcttcaaaaccagctacaaaacatttgacctgaaaatttaagcacaccgtagctttcatatacttccttctattttctcacgcatttgattctgcttatttaagggattgcattaggcagtttttgcattgttataacttcctgagactgggtaatttataaagaaagcaggtttaattggctcacagtctgcagactgtacaagcatggctctggcatctgctgggcttctggggaggcctcagggagctttgactcattgcagaatgtgaagcgggaacaggcacatcacacggtggaagcaggagcagaaagagagttgggggatgtatgcttcgggcgggcagcagatgccacacacttaaacaatgagatcttttgagaactcactcattatcgtgaggacagcactgaaccatgagacatctgccccatgacccaatcacccccaaccaggccacgcttccaacactggggcttgcaattcaacatgagatttggtgcagacaaacatccaaactatatcaggcattatgccagctttgttgtgaggcctccatggccttctcactggaatagaaagggccagcgctgggtaccagccccaccactcactgactgtggactcaacaagccttgattgttctttttccacagagcccaaccttggggccaccaattattgagaaccataaacatctatagaaaggggagacttttacttagttcagcagatttttgcgaatcatgaagatgaatgcctcgtgtgtgtatggatcatcagtcagcacgtgtcctgatccattgatggttgcttgattggtacagacagatatcttactcaaaggtttccagaaatggccatttacaatgtgcagatgaggcaggtttttaaaacacattatttttatcctctgcttcgctagacttgcctttaattttctaacttctgatacattttagtactgaggaaagtgtctgaagatcgtatgtctttactactttgttccattaagcctactcaagtagtgtctccactggaatgcacgcttcagaatgacagactttgagttctccactgtgctagcccattgtccagcacagtgaccgaaagacaaaggcaaccaacacagaatcaggtgcaaaactggaaatattgagtgtagatgaggcttttgtttcagaatataaggcatcaaaaccaagatactcttcttttactcagactgaaaaaacaactggagatttatgataatagaagattttcagtaaattgcatctcaattatttcaccaagaaaaatagtatatgacatctagaattattctaaaaaattgttctctcaaaaagatgtcatttagtatgcacttcggaaattatattttagaaacaggtttatttgaatatcaatttatatgcatggaagatttataactctctctgaagaaatttgctgtaaatatattgtatctgtgtttaggggaaaaagcgttagaaatgtgaacattttagagagactaatggcatttttagagacattcacagtaatttcactcttataaagaccttataaatgtaaatacctttatggagaaggaggtagctcacaatctataactgtacttattatttacatttatagtgggatgatgtacatattttaaaactgccttttataaatatattaacttttgcaatggaaaacaaaagagatgcttgttctttcaaaaactaggaactgaataaattatgtgagcaataagtcttttggttttacaactctttcgtgagttgtacgtgaagtaaaatttcattctagtcttgtatgtatttactatatttagtatttacaacagaattggcaatactacacccaaagataaaaaaatatttgtacaaatgctggaatctaagtatttttgtttcccaaagtattttgtatgacataactcatacatcttaatgtttaaaaacccatttttattctcaaatacatttttacccaagtgtataaaaattaagctatattcagaactttaatttttttgtgatttatttcttctttgctttggggaaaacagtctggttatgcccctacccctctgaccagggagtattaacaagcttcatgtgccatcctaggctcctttttgatgtttgccatgtctttgagaaatattctcacaccctcagcttcaaatgctgtctacatgctcatggctacccaagcctcctctctgttcctctcccaaattctgcatctgtgtatacccaggggctgtctctttttttctgtcctctaacaccacctgtttaaaaaaaaaaaaaccatcatcttctctttcccatccccatctgttgctcttctgttttgtcatttgttcaccacaaaactaatcctttgccattttcctacttctctctcctctctcatgcctaacagaacactgagcctacaaactcctacccagtggactgtgtcgagatacttaagctataatcaccaccagtcaatctgtgcctcctcactgcctctcccctcatccaggacactagcatctctacatctgggttaacccatcagcctctaacaggtttttatccccctcccccactcttctgtcaatgacgaggctacagtaatcattctacatgcagacatagtcatactgtgtcaacacagtatcctttccattgctgttgaaataaaatacttattccttagcaccatttataagtccccatgtgtcagaggccctgcttaggtctcgtgttttatttctccagcctcaccccaccatatgtgaggttaaagctatactgaatgtatcttcatttctagaatgcaccaccacatatagcctattctttgctcttcctgaaattgttaaattttaccttgcacggctacattgagatgtcacttcactggccgtctttcctaatgctcggaatttgcatatgatggttcctctcctgtccctgtacaagcaccctgcatatcccgtatcataaacacagccttaccacaacttgcggtagttgtcagttcattcatctgtatcaccttttagtctgtaagaagtgaatgcaggaacatttgtttggcttgtcaaaatatcatcatatctcagacaggagccaacacagaatactggctaagttactatttatttaatgagagaatcaataaatgccctaatgatcactgaataaatgtgtgagcagtaggtgagtgcgcacgccccttgagactggttcttgcaggaaatcatcctggagatttccatgagaaacccaggcacatgcaagggctttggtagcactggaaataatttgcatttgggatgtattactaaaagaaatcatgcacaaatgaaagggatttcaaccaaaggcaatatcttgtgagcaacaccgtatttaatggttgctatgtgtctccccaaaatttgtgtgtttcaaaattaatccccagtgcagcaaaattaggacgtgaggcctaatgaggggtgtttaggtcatgagggtttcaccctcatgaaaggattaatacgactataaaaagaaattgcaggagtgtttctctctcctgcttttccaccatgtgaggatataatgatctttccctctggagggtgcaacatttaatggggcatcttgaaagaagagagactaaggcctgctggtgctttgatcttagacttcctaacctccagaactgtgagcaataaatttctgttcattataaattacccagtctcagatattccattatagctacacaaatacaactatgacaactgtataaaaggaaagttccataaaaggagactgaggaggggttggacacgggcagaggaggattatgagatttgcgaatggaaataaaagaggagtgtttcagaaaagaaatacaaggacaattacatggaaaactgcagtgattagaaagtatttattttgtggtatgagggcagaactgtttggttaataagaaatcatagttgaatcattaaaagtagtaatgtattagactttctaaagtattagatctgaaatagttcacatggttctcagagttagagacatttactcattgcaatgtagagtatgcaccattgagcttaggtatatgtaattcaagtggggtatgcaagtactgagtttctgagagactttaacattatattttcctctttattaaattaaatcaatcatttttagcttctgaactaggaaggaatgagtgctggctccaaatactcactgctatattttaactttttaaagagatactttcactctcaagaaattaatcttgataaatttagccacactgaaatacaactatttgaagaataagtaaagtctatatccagtaactaatattaattcaaatttcagcttaaatacactttctttgttagccacttagtgtttccttttatacagacacacaacacatacacactctctctctttctctctgaatattagtcaccttaacctctgataactttgctgattatgaaattcttttaatagcaaagatgagttgcagttgaacagcacactctacctgctcacattttaagtaatttacctaaagatgttttgtgaggttaaaacagatgttccagagtagagtaattggaattagccctggcctgcttaattcagttttgtgaagtgcctcagtgatttctaattggaagcacataggaaatattgactttacgaaaagaaaggaattcccctagtaggagaaacttccttatttcacacatgaatgtttatttttacaggcctgaaataaaatggaattacttttagtgttaaagattttcttgtgggaaacatttacttttatgatttaaatgctttccgcagttgaagctgtagagaacagtagtttgttgggagattgcacatgattttatttggagttctataaacagcaaattgaatttagtaatgcaacataattattagactctctgatactctaacctttttgcaaagatataaaagctttagcattattgccattctttcaaatttgtggaaaacaaaggcaatcttaactaatttttgactttcattgtttttcttttctttctgaatttctctttcccttccttcctcctgccttaatttttccctaccttactccatattttatttttttgttctttcattttcttctttccttccttccttcatttctgacatatgatataaaagcaagaaaatgcctcgaatctttaatataaagcaatactcatttttgcaactattttaatgtcctgggaacctacaatatatattttatctttcagatttaaagatagcttctctttctttagcaaatgatatatttggaagtcaaaataacttctaagtataagcaccctgctataacatgaataagtactattgaaataatttgtgttctgcaaaaccaaacactaattttgaatgggcctgtagggaatctagcaatagggcatactattgaaaacctaattatttttatagtgagaacactggcaagagccataattatttaaggagatctcttggaatgcctgggcaaaatgctcagcatgaatgaaaaatgccacagaaaatgttacaaacgcaaacaaacaaaccccaccgcagattgaagaaaccattgtcattctaacaagtaaaataatgcaagaaatgaaaatgaaaggcaaggttaggaaaggagaaaggataatgaaaatagcaaagaatctccaaaaaactttaaaaattagaactgttaagtgaatttatcaatttttttacagtagtgttacaagcataacatagatagtaatatgtttaacaaataatgtgcaatatttgtacacttcacactacaaaatgttgcagtgacaattgaaaacttatgcaaatagagaggtaagccacactcattgatatgcagttgtcattgagacactgaatattgttaaggtatctgggaaggcagaatagtgcccccaacgatgtccatgtcctaatccgcagaacctgtcaatatattacaaggctaaataaagaactttgcattgtaactaagctaaggatcatcagctggaaagattttcctggattctctagatgggcccagtgtaatcacatgggaccttagaagcagagccttgttcttggctgagagacagagggagtgtgactgtggaaaaatggtcagagacatgcaatattgctgctttgaagatggtggaaggggagggaccattaaccaaggaatgtgggtgacctcaaaactggagaagccagaaacaaattctcccttatagccagaaaggaacatgtaaccagagccctggtgtcagcccagtgatacctgtgtcagacttctgacctacagaattgtaaggcaatacatttttattgtttaagccacgaaccttgtggtgatttgttaaagcatgtcaaactaatatagtagctacctatttaaaacaatcccaacctaaagcctggcagtattttttatagaaattggaaaattcatcctaaaaattatggaatgcaaagtacctataatagacaaaatgttcttgaaggaataagacacagactattttcaagacttactataagtcttccacttgtaagatttcaaaacttgctataaatctatacacataaagttgttaggtaatacagcaagggtacaccagtagatcaatggaacctaaaatatagtggctacaaatgaacataacaagccagttgatttcctatgaaagtctcaaggcaattcaataagaaaaaatggtcttctccaaaaatgttgctgaaaaacaaatggtgctggaccgtccgggcctttacatggcattcacaaaaactcacttgaaatgtaccacaaatataaaagttaaaattataaagctttcagaagaaactatagtataatattatgatgaactttgagtagataaaaataggtacagatattgtacttaaaagaaaataaataaaagtgtctttctgctcatcaaaagacatttttttagaatatgacgaggcaagccacagaatgggatgaaatatatgtaatactaaacttgaaaaattaaaagaaattaagtttaccgtttaagtttacgctagaatgggcatgaagtagcgccccccacccaccccaagtaagagttaagaaaaaatattaactgcttctctgtaaggtctgtgcagcattaaccatatctctcccccacatattttgtaagttctgtaagctgtttttcttgctgtgcaaccgcaaggtcacacgatccataagcatgagttgcaagataagtttcccaatatgtcagctgagtcctaagaatgtcacctgataattaactactttgttctcgcttttgtaagccagcttcctgcatcatgtaattcccgcctcaaggtgcataaaaggtgtttgttttctttgtttgctgctcagactttcaggatgcctgtccgctgagccagtgtacacctaaaatatgccctcctgaacaccacttggtctctccagtcgctgatttcccactacaatacatatatccgaaaaattcatccagatcatataaaaatgcagatagactaatagtaaaaagttaaacaatgcagtaataaatggacaagaaattattgagtagacaattcacaaaagatggtcattaagcacatgaaagtgttcaatgtcactagtcatcagggaaatgtaaattaacctacggtgagatagtacttcagtggctaaaattgttttactatgacaatatcaagtgttggagagcatgtggcaaaattgccagtgaggataaaaaaaaaatagtaaaaccacttggtaaacttttctggcaatttcttataaagttaagtatacacttaccagattacccagaattctattttagaatgttcaaaagagaaaaatgaaaaactacattgactgaaatgacatatgtctatagtagccttattcaaagagccagaaacaaatggctcaactctcaagaagaaaatgatgaacatattgtaatgtagttgtacagtggactacaactcaacaatgaagagagaaagtgtcaatgcatgcacaagcatggacgaatctcaagaatattatattgggcaaacatatacatttctgtgttttatttatctgaagtttaagaatagacaaaactaatctggggtgctataaatcacactgtgttttcttgtatgggatgaacactgaccacagtgggacggggggaactgttggtgatgagaaatgttctatatcttatttgtggtgctgattacacaggtacacacatttgcccaaattttataactgtgcgcttattagtgtccattttattgcctttaaattacttcattgtttaaaaaaagaatattcgtagaaatacagctaagacggcttcagtgtccagcacaacacagttgaggtcttttaattttatgatttgacttccgttgttttgactcctcttgcctaggaaaaaatagtaccaccaacgtttatcaattgagtatgagctactttgtattacagaaacacacattatttcaggacttactattctctataaatcaaaaagacatacaatgaccattttaaaatatctggaacagaatcataataaaaaattgctttttctctgtccctatttgagacataaagaaagtggtggtaattttcacttgatgaaaatttacagcctttaaggttgcatagcaaccttaaatgtctatattgtaaaagacaagtttgaaaaataatgttacaacttacaaagtttttaagacgttagtaaaacaggccaggctcggtggctcacgcgtgtaatctcagcaatttgggagaccaagtcgggctgatcacttgaggttaggagttcaagaccatcctggccaacatgacaaaaccccaactctattaaaaatataaaaattatctaggtgcggtggtgcatgccggcaatcccagctactctggaggctgagacatgagaatcgcttgaacctgggagaaggcggttgcggtgagccaagatggcgccactgcactccagcctgggtgagaaagtgaaacaacgtctcaaaaaaaaaataataataataaataaaaataaaaaagagagagattaataaaacaaacacaataataaataaaaataaaaaagagagagattaataaaacaaacacagaatgcataaatgagaatataaaacagataaaagtcaaagtgattgaactgttaagcaaaaataccatagaaaaaatcaacaatacctcaaattggttcttgtaagcattaatgagatgaaccaagttttggaaatattggtcagaaagatggatagggcatgcataaaatgactgatagtgtgcatgcaaatggaaacataactacacaaacagcacagctattaaaaagagaataaaaggaaaagcacaataagaagatataaccaacaacatcatgccagcacatttggaaacttaggcaaaactggcaaatccctagaaagtaataactttaaaaagcataatataaaatcataccaaaaagaaatccaggagaagcctgctccattttcaaagcaatgtgccataaaccacaatgctctattcttttacacccaagaatttaacaacaagtaaatgcctggtaataaagctattaagtagaacgtagagcagcagaaagccttgttaggagtaggagtgtaaatctgagcaatctcttggaaaaaaatatattagcactatctagtcactttgatgctgtccaaactgatatcccagcaatttcatttctaagtacatatatcctgaagaaagtattgtatgtgtgcaccaagagatataaatgagaatacttatgggaacattatttgtaaaaacaaataaatgactgcaaatggcttgaatactcactgggagaaaggtggatcaattgtgatatatttgtacaatactattccatgcagccaaaagaatgagccttggttaaacccatcaagtctgatgactcaaaaatttcgcggtaagccatgaaaacaaggcccgcaagaatctatacgataggatttcatttctatgaatgtcacaaacaggttaagcaatatgttgcttagggatactttcatatgtgtgtgctaagcatatagagaagatattaatggttagccgaaaagtcacgatagtggccaactctgggaaatagagagaaacatagttttggggagaaacacatgaagatgtcattaaaaaaaatgttgagtacatatttttaaaagtggagtatacagaaatttatttcattattgccctttcaataacacatgtatattatatataccctttatatgtgtgatatattataataatttaaaatatatgttaatttatcaagtcacttaactcttagaacttgagactgcatttttctaatggtccaatgtgactttaggttcctgctgcccatgttgctgtcatagagcaacaatgccaacaagttagacttcgatgaattgctcaattaaaacagaacaaaacacactataccatataattcctcacataaggagtatagcttatgtactttcgggttatattatggcatatagtctacactgtcctgttgtactttgttgtattttgcctttcacgttttaaagtttcagtgtagtgattcattcagtgtaacttactttaaaatacatttttactgttatgtaactagtttctcatcctaaaaatacgtataatataaacctgaaagttataaagtgtccttttcaaatcttcagtgattaaatccttattggataaataatttttgttctgaatccagaaagggctgaaataatttgagtatctgacatttttagaaaaggcactgggaaaggggacaggaaggacttctgagtgggaatgctgatactgtctcatgccggctgttagttggacagcacagtgtatgacttactgatgtatcctagcttctgccatggtggttcccatttcaattatctttaatatttcagacaaatctggtgaaacttctcctgatgcatcaggcaaacccacacctcgtgaactgtaatgaggagaaggcgtcaggtaggttaggagcatccttggaccattgagcaggtactgttttcttcctttcatattggagtagccatccatcttcagcacagctacaaagtgagagctggacatgcctgtgaagctgtgtaacaaccagcccagttcaagcacaattcatcatcgcctatgtacgatgatataggcgatgtgaatagcctccattgcaagaggctattcacagtttaatctacactgtactgttgtactttgttgtattttgcctttcatgttttaaactttcaggatagtgattcattcagtgtaacgtactttaaaatacatttttactgttatttaactaatatctcatcctaccaaatacatgcttatccgttaaggtatttttgaaaaataatagcgttattatctgtgcagatatttaaactacaagaaaaatacagaggctgacattcttatgcaaatttaaaactttgaaaatcttgacttaatgttacttattttttaataaatatatttttgaagatttctaaaattattttagtcactgaccttttgtatattcatatacttatttaataaatggatgctacattaattttgtggctttcaaaatttaacagaaagttactattcataattatttttgcaatagtaaaaagagttctgaataacaaagagaaaaatctagcataggtaataccataacatcaaaatattgaagacagtaattgatctgaataactttataaatacattattcctcttgctatacctctgctgacttaaatgtactttacttttgagatttgtcatttgatatactttcaggagtatgaatttctaataaatctccagttaaagccagaagaagggatttttctctatttgttatttattggaattaagtatcattgtctaatgtttattacttcatcttctctgttaaactgaatatttaccaaacagaaattttacacagcttaatagtcacaaacttgagaatcaagctaatattacttatagtctagtaatcttaacattaactatattagtatgctaatgataaatatcaaaagaacaaatagacatttttagatattttctttttaaaaacgtgtttactgtgagtacaagtcacatcctcggctaactctagtctggttctaacagtagctcacacttttcaagttcgtattcctggcttatttcccagacaagggaggatatgactgacctttgactacatggactcccatggcatactctcaccatttaggtctagtgtcatttcaaacagatgtccaggcatggcagttgacaatcttaggaacggaggcaatgaatgcacttctggtctagactcagcactggtcatctcagcacagtgcatgaggactctctcaggcaacttttaccacattggtcatgcaaagtcgaccagcaacctagtaccttattcatggcctgttggcaatatgagacacagtgctgggcccataatagatcctcagtaaagatttgctacttgaataaaaatacttttatcacatgcaaaacgcaaagagttataatgcagtgaaaggtttcaactaaagcagatatgccaataatctaggcagcaagaagataaaactagataaaaccagatgcaagaatagagcagagaacagtaaaccagaaacccatgctataactgagcaaatgaaagtcgtcatcagtactatagtatattgctgttattttatgtttcttgaatttggaatagatttatgaaaaaaatctgtgggaaaaacaatttgttaagtgggacataaatttaatctcccaaagtaagaaagctgagcactcacctactttttacatgtatataatttaatctgaggcaaataatgataaaatctttacataaatatcttcttgtggcagctacattactgtgaccatcccagaaggccacataactctaattgatagacataggtggtcacacagtctggtcctgacgattgagaagaagcagctgcctccagtaggttcttaattgatatgaatgttgattttttcctcatgatctgtatcaatttctatatcagtaattgttgttagtataaacttgattgatacataactatgttgctgcccaaacgtgttcagatgttactgttatgtgtaatttgtaaggaaatatatttatttatatttgcaattgataaaggtaaaaatattatggctagagggcagaccccttgtttaaataatacaactgagtatttacttgtacaactacccatttagtagaatgtttataggaggccagttacatgctttataacccagttgatgggaaagtgtaactctttctgtaattttggttcatagtcgccaagatgcaggacaagttttactgaaaatgaaatgacattaagtttgctcaagcttagattctcaatgattttttattttacatatcaccatccagtctatactattttctatttcatttataattaaatgtgtcactgatgtaaaacaaaatagtcttttaaaatgacagtacttcaattttatcccagccgtaaacttttaaggttttttgttttgattcatacattgataaatttttagcattttaagcatatcggaattattgaaagtaaatagatttatgtgctatcaccacccatcatttttctgatttttcttatttttttcttgtagatattgctgcctctgagtttattgaggaaatgctgctgaaagccgaaattgcctgggaagaaaaaatgaaagagcctttatctgcttctaccttagctcaagaagagccctatgaagagatcattcacgatcttcccgtactgtcgagtaagctgtaagtgtcttcctgcttattctcttttgccatcttctctacctgctggtcattttagagcccatattaagtctgactctcagccaaagagttagaacaattaaaatggtttatcaatgtatataccaaagaatacttgtttacagtgatgagttaaacataattttattttataaaaaccctctgatttaaaaacaatcttactatatcagttattaaatcaatttcatgtgccatgagaccaaataatattttaaacacattccaagattttagctaaactgatagtgaagtttccagtgattatcattatggctgactttcctgaaatagaaaatactgatatatgtttctttctctcataagcataaaactaatcatttattgttgtgtgtgttatctcctaaaaataacttcctgttgcattgaaaatatcaaatggattgacatcattttcaaggtctgaaaaagggacacaaagtgtgattaataagaatgacaaataacaacttacattcaaattcatgttaaatttactgaagaataagtgttcatttaactcataagataatgcttattttccagagtttctctttgccagcatatggatatacaaacacaggtgttatgtatataacttaggtatgcttacatattcattcattttcaaatatctgaaatatttgttcggaatctactgactgtggggcttggaatgtataataaaacagatagcaaacattgtcaggtagagatggactgtgaatatctaaatcaataagtaaatctgtatgaataaataacattgcatgtaacgtgtgggaccttgtaaaatctgtcacatcattttaaaggccttcatgaacagcagtcaggtaaagaaattgtgtacccagagcaatattataaaaaattgatagcacctgtaaaattactgaaagataaattattaaacattggaaagcttgttacctccagaatgctactgctaaaatatgcattaaaagatgtaagacaaacatggaaaactttatgaagtgttttaacatgatatacaagttcattgaaaagcatagaaatacccatggtgaaaatgtacaaaaagcaaatatatgaaaatctggatattctaatacaacccctctaaaacagatctctatgaatttatatattcatattcttcagaggtagtgttgtggttgctggaaagagctttgccttatggctaatatttagtttgaatggttaaagatgttaatgcccaactttcaaaaacaaatagaacaagtgggcaaaatatcaacaagggaatagaagacttaaatagcactataaacaaccagatctaacagacatatttagagcacttcatccagaaatagtggaatacatattcttttcaattgaacatggaacattcttttactaaaatcagaaatgaaagaggaacattactcctggatttacagaaacaaaaataattaaaaggaaatattatgaacaattgtataccaaaatattagataacctagatgaaattgatgaattccaaggaaacaccaagaaacaaaactaactcaagaagaaagagaacattggaatagacctacagcaagtaaagagattgaattagtcatcaaaaacttctcacagagaaaagctaatatccacatggcttcgaggctgaattcttccaaatgtttaaagaattaacgccaatctgtcacaaacactttcaaaaacagaagagcagggaattgtttttgactcattctatcaggtcagaattacccggatacaaaaatcagataaaaatatcagataaaaagaaaacaacaaccttatgaatatagctttaagacacctaaataaaacaccagcaaatcaggttgagccacatataaaaaggacttcacaatatgtctttgtgagatttatgacaagaaagcaaggctgagcattcaaaaatcagaaaatatggtatatcatgttaatagaataaagaacaaaatcacatgattatctcaatatatgcagaaaaagcatttgacaaagcccaacacccttttatgagaaaaaagtaaataaactaagaatggcaggaaattttctcaacctgataaggggcaagtaccaaaaaataaaaaaaagaaacaaaacaaaaacaaaacagggctaacgtcatactcaatggtgactgatcagttaccccataagatgaggacaaaggcaagagtgtctgctgtcaccagctcagttcaacattgtattgcggttttagcttgagcaacctagcaagaaaataaataaataaataaataaataaatgaatagtatccaaactggaaatgaagaagtaaaactatctctatgttcagatgacataatcttgtgtatagaaaattctaaggaatttacaaaaatatcttatttgaactaagaatatagttcaagaggatggcaatacccatgatcaaggcacagaaacaatctgtatttctatacacagcaattcataattcaaaaatgagattgaaaacatgcttacccagtaggttagaaaaaaaaggaaaaattaaaaataatttacaacaacataagaaaaacaaaatacaagaaaatttaagaaaagaacggcaagtttttacactgaaaactacaaaacatcactgaaagagattaaagagcctaaatatatggaaagaaatattaaattcatggattagaagacttaatattgttaacacaatctctataaaaataccagatgactttttgcaaaaattgataggccaatatttaaaatcacataacaattcaaggacccagaatccctaaaataattatgtgaaaaaagaacaaagttggagaactcacacaaccctatttcaaaacttacttaaaatctatagtaactaagacattgtgatactggcataggatggaaatatatcaacagaatagaactgagaatccaaaaagaaccccttacatttctggttaactgatttttgcaaagaatgccaagatgattctatgggaaagaatagccttttacaataaacagtactgagacaactggatattcacatgcaaaataatgagttggacctgaactttatgtcatacataaaaattaactcaaaatggatcattgacctaatgtaagagctaaaactataaaactctctttaaaaaatgtaaatctttctgactttggatgaggcaatggtttcttagatatgacaccgaaagataagcaataaaagcaaaaatagataaactaaagattttagtggtttcaaagacagtaataagaaagtgaaaaaaaagacacacaatgggagaaaatttcttcagtgctatatctaacaaaatgtaaagggatgcttacaactgaacaataaaaagacaaataactcccttaaaaatgggcaatgcatttggatatatgtttcttcaaagaagatacaatcatagcccacaagcacacacaaaaatactctacattatttatcaggaaaagccaaatggaaaccaccatgagataccactttatacttcctagaatggccattaataaagaacaaaaaaataaaggtaaatcagtgttggcaaggatgtggaggaactgccactctcgtatggtggtagtgggaatgtcaaatggtgaggcagtgatgaaaaacaatctggcagttctcaaacagttgaacgtaggtttaccacgtgacccataaattcttctcctaggggcattgtttatctcccagataatgaaaatatatgtctacacaaaaacctgtacataaatattcataggagttttatatataagaacaataaaaaagggggaacaactgtccatgacttcaccatgtattccgtcatctgaatcatggctgctcatttttctttgtcagtcttaaccccagcttcctattcctttgcattctaaaggtgatttgtttttttttcccccagaatatattttgctacaattgcaagaaagaatggaatagttcatttttctgctatctcaggatacaagccaaatttctgctttacagtaaactcatatttattgtttcagtgagcattttgtgcagtaaatcatgatttagtaaggttaaggacatcacttccactatggcctgctgtcagtaaacactgcctgtctttaaatatttgatgaattggaaatgcctatgctatttgattatcccatatttcacgttttctaaggtgtctcctatccaatcagcattcctaagttttccccatgttgcctgactttcaagctcatgtctaaaaatgtgcagctttaatttcaaaggcccttccacctgtaacattctgtatctgtaaggacagatccctgtaagcctgctttgtcttccttccatacttgactgctcttcactctgctcctcagttccttctgactgggcgcctcctctctgtgttgcctttctgtcttcagatgtatttaagtgcctcacttgctgttattgccactaatgaaacagctgctgctgaatatgccctttagcgtctgagcatggacgtgctcacccagggtttttcatcactgagcagtttggatatgtgccaacttgcatctctaatattctagttcatggagcccgtgagataaagcccacagaaattctacatgttgcctaagtggagtagttcattgatgaaagggttttttttacttattatttgtaataataacaacagttttgacaactgatattttttactacagttaccaggtgttgaatcttgagcaaactagtttggattatttcatttaactctcagaacaacacctggacgcatgtcctgttacttaaccatttgatacacacctagctgaggcttggagcttcaagaacatgactcatgccaggcgtgtgctaactctgttattgtttcagcgaggaggtcatttttatttgtaattccaaagcttatcaatttggctttaaaaaggaaattgatagtgcctgaactccctctctgagtgttcctggtgaggcccggtggtgtggtgcttatgggcagagactccagagccactatccagtttcagatcctggctctgccatttactggctctatgaccttgagcaattcagtcaacctctttgtgacatttttactgaagtacaaaatgtgggtgttgttttgtaaagaatctggctgatttttatccttgatttctgggtgggaaccaaatccttggaatttcccatggaataacagtgcctttgttactcatgagccctttggatcgcatctgagtttatcctaccaggtgagatgacgcagggtaggggcctagtcatgccagaaaaaccaacaatgtgattaaagaccaaccatgtgattaaaaccagcccaacctccaggaggagcaggacaggctcgagatggagttcaaacatgtggccaatgatggcatcattgatgcctatgtgacgagacaccaataaaaactgtggacattgaagctccgtggagactccgaattggtgagcacatcagtgggctggagtttgatgtaccctgcatccttggggagggggctcagaagctctgcatttgggaccctctcagactttttcatatgtatttgtttgccagtcttgtcttaatttgtatcctttatgataaagctgtattagtactttggtgagttttgtaagccattctagtagtttgtcaaacctcaggggcttgtgagaatctcagaatttgtagctcgttgctcaaaagttcaagtggcctggggacccccaaacttttggctggaatctaaaatgggggcagtcttgatgaggactgtgcccttaacctgtaggctctggtctaacccttggcggttagcataattgtactgcaggacatcagagtttgatgatgatagtaataataactgtatcttagggttgttcttcataactgagttaatatttatagagcatttagagcaatatctgcctcattgtaagtactaaataattgcttaagaaatgaccagaaaaagatgttcttcacttatctttgaactggcagcaaaagcatctaaagaagaatggctttgtagctgtaggctgagacaaaaatagtggtaggccttccgctgggtgcttttaaactgattataaccatatggagaaaatcttattttctaagcagctggaaagaacatctaatatcataaaaaaccagctttggttgggtgaatactctgatgaggttgtgtgggggctgagtcgccagagtttctgagtcatctgtgacctgggatagagaagaaatgccactttcctagggatgagaaaagactatgaggaggggacctaagcagggctgagggccacaggaaaagggactgcttggagttgatcccagggtggcctcagccaagtgactcttggggaggagaaataccccatggggatttttgaatgaaataatatataaggcagtgtgccccttttgaccttaataaaaggataagactcacaatagatttgggaaagctctgaaaaatcacaacctactcatctgacaaagggctaatatccagaatctacaatgaactcaaacaaatttacaagaaaaaaacaaacaaccccatcaaaaagtgggcaaaggacatgaacagacacttctcaaaagaagacatttatgcagccaaaaaacacatgaaaaaatgctcaccatcactggccatcagagaaatgcaaatcaaaaccacaatgagataccatctcacaccagttagaatggcaatcattaaaaagtcaggaaacaacagatgctggagaggatgtggagaaataggaacacttttacactgctggtgggactgtaaactagttcaaccattgtggaagtcagtgtggcgattcctcagggatctagaactagaaataccatttgacccagccatcccattactgggtatatacccaaaggactataaatcatgctgctataaagacacatgcacacgtatgtttattgtggcactattcacaatagcaaagacctggaaccaacccaaatgtccaacaatgatagactggattaacaaaatgtggcacatatacacgatggaatactgtgcagccataaaaaaggatgagttcatgtcctttgtagggacatggatgaaattggaaatcatcattctcagtaaactatcgcaagaacagaaaaccaaacaccgcatattctcactcataggtgggaattgaacaatgagaacacatggacacaggaaggggaacatcacagtctggggactgttgtggggtggggggaggggggagggatagtattgggagatatacctaatgctagatgacgagttagtgggtgcagcgcaccagcatggcacatgtatacatatgtaactaaccggcccattgtgcacaggtaccctaaaacttaaagtataataataaaacgtcagatattaatattaatctttggatctttatcttattttataaaagcaggaaaaaaagttcattgtattttctacagtgaacaatttatgtagctatgtttctaggggtaacattgagaactgtctattcagtccattattttaagtgccaaaataaccaaatcacatatgccatatctttacatctgtttctgttagtaataatatttttattacaaattcaaattcagctggacccatttctcatgaacagtgccttcacagtgtcctcacatggtggaagagggacacagtgatctcggggcagttttatagaggctttaatcctcctgagagttccaccctcatgacttagtcacctcgtaaaacccctacttcttaatgctatcactttgaggattgggtttcaatagataaatgtaggggccacacaacataccagccactgtcctggccactaaaacacatgcagaagtctaccgggcatagagttgccaggtaaaatgcaagaaatgcagctaaatttgaatttgtaatttaaaaaatcatttattatttgtaattgtcaaagattttttatttgctaaatctagcaagcctttaacaggatagggcttcaaggaattaaaaaggacagatttctctggtaagcatcattgtttctttccttctattgccttccttcttggtacagaagtgtgtgatctggtaatgccaagtaatcttgcaaccaaaaaatgaaagttactttcttttttccagacagagtttcgctcttgttgcccaggctggagtgccatggcacaatctcagctcactgcaacctctgcttcctgggttcaagcgattctctggcctcaccttcccaagtagctgggattacaggcatccaccaccacacccagctaatttttgtaattttactagagacagggttttaccaccttggccaggctggtctcgaactcctgacctcaggtcatccacccgctttggcattccaaagtgctgagattacaggcgtaagccaccatgcccagctgaaagttactttctaagaataacagagcaggaagctagaacaaatcaaaggcccagaagatctggagaaggttaccatccctgggctgcctatttctgcttttcttgttatgtgagaaaaatcaatgtccatttccttaagatactattcttagtttctgaggtgggcagcctaaaggaatattggctggtgctacagctgctgtaactttggggtatcatgctcttggggtatcttgcttcttgtgccaaagttttaggactccaaagatttagaagttgtggaaatgatactactttgactttccagtgtatttcaatgttccgtatggattttttttttttttttgagacagagtctcgctctatcgcccaggctggagggcaatggcacaatcttggcttactgcaacctccgcctcctgggctcaagagattctcctgcctcagcctcttgagtagctgggattataggtgtgcaccaccgtgcccagctaatttttgtatttttagtagaacagggtttcaccatgttggccaggctggtcttgaactcctgacctcaggtgatccacccgcctcagcctcccaaagtgctaggattacaggcgtgagccaccgtgcccagccccatgtggatttgtatgtcctgaatacctctttttcacaagcagaagaaatttctcataactagagtggccataggtgcccatttggtccagtctggtttctgcttgtttccccagcatgatgatgaataaaatcctctttcagtattaaaatgtcccagttggcaccttaagttctactttcgcagaatcagaaaactgtggcataaaatttcttgtatagtttcacttcacattaatatattaaagaatattaatgcatagtatttaagcaataataaatcatatttgtatatagtcttttagattacaaatgacttttatatcaaataagtcatttgatatgtatgtgtaatttttttatttagtaatctataaaacatcaagcctttttaatcaaatattacaactacattgttaaattctacagaatgtgtttacaaaatattgataaacctgtcaataagttccttaattattttcacttaggtattctgaagtccagtagtgcacaaagagaaatgtcatagaatacagggacagaatgatacattcagggagcattcctagcaaagctaacacttggaactttcagaatcttccttcatatatacataaaactactaaattatacttaatttccagattttcccttaaacaagctattaaaaatttttttgcatatatctgttgagagctgttagattaatatgtctcaaaaacaatacaaactccagttcagccaatgacacattgaaagttttatttgctttttagacacaggtaatattttaccataatggtctttaaattgtaaaaaaaaaaaacttacaaaaatgaatttttggaaggaccaaacatacagcaattaattcaaatctctccaagagctctttcatttaatattaatatttggatctttatcttattttatagaagcagaaaaaaaacaaaaatgtaattgaattttctacggtgaaaaattgatgtagctatgtttgtaggagtaacgttgagaactgtctattcagtcaattattttaagcaccaaaataaccaagtcacacatgccatatctttacatctgtttctgttagtttttgttgttgttgtcctcatgtatctcaatagattccattttatttcatctctatggttttctaagattgctttagttataatgggcgataattgttgcctttgttagtttcattttattacattcctgtttccattttcagaaataaaatcctatttcctacaggcacattttctctgcatgaagttactttgatgtttgtcaaaataagtaagtctggcataaatccagtagagttcagaaattggttgtctgctggtatattctcatctattttttttcacagtcagagttaaatctgtctctactgtattaatctaagctacccttggatggtactgattttcttttttaaaatgtttatgggatctgtcttaccaatagaaaatatactctctcatttccattttttctcaccaaataaagttctattactaataatttatttttcataatcagaataacaatttcttgttgaataaaatttggaaagtgcagaaaaacatatagaaacatgaaaaaaatgactcatttgcttcaaagaaaaactgcaccagagaagttatacaggaaagaaagactttactaaaaactattgcaccaagggagaatgattgagctcaattctactgaacaaaaagtaggagagtttctaagtgctggggtgagctagggggaaagtacgtagcactttaggagggactttcatcaaggtgattaagccatgggcatttgctaattgtcctttataggctcctgtgctccacaaaaactgggaaatatgtgggctatgttcttccctgtttagatttcaaagggatgactcccaggtcataaagacattcctgggttgtaaaactggccagaggctgggagaagatatacatctcaaaggggcagagaaaaaaattgcagttcagttttctaaagacattgctccaagaaaagggagttcagaggactagagatagtccaaagttgagctgagagaagaaggttaaggccttctgggtcactaccccacctttgtgatgaaactgctattaacttggaatttttccttttgccctttatgtttcctgttttattcagtcttgtactctctctctctctctctctctctctctctcacacatatatatatgtgaatatatatatatattcacatcctattttaaaacataatctgataaatgtttttccaatcaatgaacatttaatgtgtattaagaaaataccagtgattaaaattatttcttttttttaacaaatagcattttactatgtgtgtccttaaattctacaaatgcatagtaaatgaaaatttaaatatattgaagttaaattttctgaatgctattattaatcacagtgattatagataaaaatgttttattgttaaagaaagagagaaacctaaacaattgttctatggaaatgtaaaatattgtatgccatcagcctagctgtacaatttgcacttttcttgtagaaaataacgcataactaattaatatactgcctttcaaaacaagtatattacttagaattttttttttcttatatgaataagagagtaatatggtttagatgtgtccccacccaaatctcatcttgaattatagttcccataatccccgcattccctgggagggacctggtgggaggtaattgaatcatgaggacagtttcccccatgctgttcccttgatagtgaacgagttctcacaagatctgatggttttataagcatctggcatttccccctgctggcactcattctctctcctgtcaccttgtgaagagattcctcctgcaattattgtaattttcctgaggcctcttcagccatgtggaactgcaaatcaattaaacctctttcctttataaattacccagtctcaggtacgtccttatagcagcatgagaacagactaatacagtaaatatgtactgggagtggggtgctgctgtaaagattcccaaaagtgtgtaagcaactttgtaaccgggtaacaggcagaggctggaacagtttgaagggctgagaagaagacaggaagatgagggaaagtttggaacttctgagagacttgttgaatagctttgaccaaaatgcagatagtgatatggacaatgaagtccaggctgaggtggtctcagatggagatgaggaacttgttgggaactggaacaaaggtgacacttgctatgctttagcaaagaaactggcagcattttgccacgccctaaagaactgtgaaactttgaacttgagagagatgatttagggtatctggcagaataaatttctaagcagcaaagcgttcaaaaggaaacagagcataaaagtttggaaaatttgcagcctgatgatgcagtagaaaagaaaaatctatttcttggggaaaaattcaagcctcctgcagaaatttgcataagtaacaaggagccaagtgctagtcaccaagacaatggggaaaatgtctccagggcatgtcagagaccttcacagcagcccctctcatcacaggccaggaagtctgggaggcaaaaatggttttgtgttttgtgagctgagcccaggacctcactgctgtgtgctgctgagggacttgatgtcctgcaccccagcaacttcagcctcagctgcagctcaaaggggccaaagtatagcttgggccttgcttcggagggtgcaagccccaagccttggtggaatacatgtggtgttgggcctgtgggtgctcagaagtcaagaattgggatttgggaaacttagcctagacttcagaggatgtatggaaacatctgaatttccaggcagaagtttgctgcaggagcagagccctcattggagaagccctgctagggcagtgtggaagggaaatgtggggttggagcctccacacagagtccccacttgggcactgcttaatggagctatgagaagtgggccatgttcctccagaccccagaatggtagaaccactgaaagcttgcaccatgcacctggaaaagctgcagaccctcaatgccagcccatgaaagcagccgggtgcagggccatacccagcaaaaccacagggacagagctacccaaggccatgggagcccacctcttgcatcagtgtaacctggatgtgagacgtggagtcaaaagagaatcgttatggaacgttaaggtttaatgactgccctgttgtattttggacttgcatggggcctgtacccctttcttttggcaaatttctcccatttggaatggggttatttacccaatgcctgtacccctagtgtatctaggaagtaactaacttgctttcaaatttacaggctcatagatggtggggacttaccttgactcagatgagactttggacttggacttttgcgttaatgctggaatgagttaagactttgggggactgttgaaaaggcatgatgtttgaaatgtgagaacatgagatttgggaggggccggggtgaaatgatatggtttacctgtgtcaccacccaaacatcatcttgaattgtagttcccataatccccacgtgtggtgggagggatccagtgggaggtaattgaatgatcagggtggtttcccccatgctgttctcatgatagtgagtggagtgctcatgagatctgctggttttataagcatctggcttttcccctgttggcacttgttcttcctcctgccaccctgtgaagaggtgccttctgccatgattgtaagtttcctgaggcctccccagccatgtggaactgtgagtgaattaaacctctttcctttataaatactcagtctcaagtgtgtccttatagcagcatgcaaatggactaatacagagagtctttgtgactatttatttgcgattattgttagtggtatatcttatataagctatgatataattgagtgagttagtgacttatttttgagatgcaggtgaaaagttctatgagagatgatttattaagaatacaaaactgtagggcttgatacatacttagatattacctagtttaactcttgcattttgcaaaggtgaaactgtgacccagagatttcaaagggcttaaaggttcaggtggtagccaacttgaaccaacttgaggtaaaatctgatttaaatctgatttaaaatgatgtctccatagtcttaagccaatcttttttccaactatagctctcatggagtctgccagtgatactgcacttagatttgagatatgaaaggaatatttcaactattttactaaactcagtacttcttctaaagaaaagtatttattctaaagaaatctttctacttggtgattttttttgtacttcataaactatcttctttgttcgtagcttgaccaatctactcttttattaatcaccctagactcaaaaaatttggtatatgcaaaccctgtctttagtttataaaactctctgataaagaagaaaaaaatatgattgatagatgaagaaaaatacagaaaatatttttatatgagagtagatgtagacagtgtggcacatgggtaagcacacaggttctggagcttagaactgacagattcaaacctcagctccagtagcacctgctgtgtgtccagagcaagttcttctcctctgtgccctcagtttactcattcataaaacaaacagacattataaaataatgaacactttataatgttgttgtgaaaatgaaaaaaaaatttaatacatgcagcgtgtttagaacagaagactatcacatgttaaatgtcatataattaatataacattttgcagatagttcactcaaattataaaaaaaatagggaaaggccatgaacggtggcttacgcctgtaatcccagcactttgggaggccaaggcaggtggatcacttgaggacaggagtttgagaccagcctggcctcagaatttcataatgaaaccctgtctctagtaaaaattaaaaaaaaaaaaaaagcttggcatggtggttcatgcctgtagtcccagctattcaggaggctgaggcaggagaatcacttgaacctgggaggcagaggttgcagtgagccaagatcacaccactgcactccagcctgggtgacagagtgagactgtctcaaaaaaaaaaaaaatatatatatatacacacacacacacacacactatacatatacacgcacactatatatatacactatatatatatacacacacacacaaatgcacacacacacacacacacaccataacaactattttaaaatacgtgaaggggttttatttcaaagaagcgtagaacatattcttgggaactctatgaatgatgaatgaagttacagcagacaggcattgtcccagtggtgcttgtggaaggaagaaggtctctttggaagtaatattttatcatttgatggtatttgtcttagttcattttttgttacctataacaggatacctaaaactggataatttataagaaatgaaaggtatttcttatggttctggaggctgagaagtccaaggttgagggatgacatctcatgagtgcctccttgctgaggggactctgcagagtcctgaggtggcacagcatatctcatgatgaggggctcagagtgctagctcatgcctctcttcctcttcttataaagccatcagtcccactcccattaatccattaacccaataatctattaatccatgaatggattaacttattcatgggggcaaaggcctcattacctaatcgcctcctaaaagttccacctctcaatactgccacactggggacaaatattcaaatcacagcagtatcaagcagatctggctatgaaatttttatgagcattataagccttttcttttcatagtaatttttttttcaattaataactatactattgagaagaacagtctaccttggtccatgagcatccttcacattcttgctcagtttgtcagactgcaaggcatatgtagatagctacatagacaactgagtaaatttaaagaatcatatcattcactcccaaaaagaggggactgacttatttgctccttgatacaatgtttgttgcttgctcaaaagatacttgatatctagctggctttctctcctgtaacagcactttctctagtgttggcatccattaagatccaactgttttgtgttcttcctacttcctcctcctcactacatggaacagaagataaaggagaactgatataaacataaagctctgtgtcttccatgagtaataaagtcttttatctctcctccagggaactcttgtcttctgcaactaaccatggaatagtaacaagctaacttattagattgtaaatagggtgaaatctcagaagcatgacagttctagacacataaaaacagcagctgatttattccctgcttatggccatagtcatgatgctaatctctttatgtgcattatgttattaatccttcactatagtccttttgcaatttggttttgcagaatggctacataactcacccaaactggtagaaccagacatcaaacatggtagttttactgacttgaaaatgcatgcccatacatctgtactgtaccatgctatctcatgttaatatatgatcctctgtcccctcacctacttgcaagtattttcattggctaaaacactataaaacatcattatccagagttcaaactaaggaaaactcaccttgcatttctgtaaatttatttcttaatattcccgactttccatcaggcctgacctatttggtagtctctttttttattcatgctttcctaggttctatggttcagttggaaggcagggcatagagatgggctgcaaagtggtgagactgtggtggttactgaaagcaacccttcaatttactctcttcttgctatgtcaaggttaatatacaaaatcatttgtgtatttatatactaaaattcaataaatggaaattggaattttattcttatttattcatttgtttcattattttttgagaccaggtatcactctgtcactcaggctggagcatactgatgcaatcacagttcactgcagcctcgacctcataggcccaagtgatcctcccacctcagcctcctgagtagctgggactacaggcatgcaccaccacagctggctaactttttactttttgtagagaaggggctcactatgttgcccaggctggtctcagtctcctagacttaagcaatccttctacagtcagcctcggcattttaaaatacattcttaaaaccataaaacagaataaatctaaaaattatttggaagattttcattctgaaagctaaaacatattgatgaaggaaattgacaaagatcaaaataaaggtacttgttttcatgcatgacacaagttgagattgtcagtatttcaatcctcaccaaactgatttatcaattgaatgcaatgctaatcaaaatcacaacaggtatttttgtaaaaattcacaaacaaattcaaaatgtatatgaaaatgctaaagatctctaattgccagataattttcaaagtgaaaacaaagttggatgactcacatgactggtttcaaggctaaatgaggagatacatgaatcaagacagtgtagtgttgatttaagaatgaatgattacatcaatgaatgataatgaatgattatatcaatgaaacacactagagagtcccaaagtaaacccacacagatatggtcaattgatttttcacaaatatgtcccgctaaatgaaagtgaaagtcattttttaaaaaacaatgctgaaacatttggacatccatatgagaaaataatgtacttcaactcatatacagcactgtatacaaaaagcaactcacaatggatcgtaggtcaaagtgtaaagcttaaaattgtacaaatcctagagtaaaacccaggagaaatttttggtaacattgggttatgaaaggaacttagataagtcacagaagcacaaactgtaagagaatttttttctttgaaacacaattatgcaaataaaactacaaagatgctgagtgggagagaatatttgccaagagcttatctgataaatgagttggatacagaatatataaagtcaataatctgaaaacaaagaaaccaatataaatagtcaaaagatttgagcccacattttaccaaagaagagaaactttgtatggaactacaaaaactctaaatagcaaaagctatttatttcagaaggagcaaagttgaaagcatcacatcccctgatttcaaactatattacaaagctatagtaatcaaaatagtatgatagtggcaataaaacagacacatagaccattggaacagaatggaaagtgcagaaataaacccaagcatatattgtcaactgatctttgacaggactgccaagacccaatagggaaaagaaagttactttaataattggtactaggaaaactggatattcacatacaaaagaatgaaattggacccttttcttacaccatgtagaaaaattaagtcaaaatggatgaaagacttaaatataaaaaccataaacctcaaaaaaaatcaagaagctcctcaacaacttttgtggcagtgagttttatggatatgacaccagaagaaaaaagcacagatgacaaaagaaaaaataagtcagttacatcagactataaggcttctgcacagcaaagaaaacaataaaatcaacaaaatgaaaaagtagcatgttgaatgggagaaaataattgcaaaccatatacttaggtatatatacatatatgtgcatatgtatgtgcaaatatatatgataaggggtaaatatctaaagtatgtaatgaactcacacagctcactgtaaaaaaaaacctctaagtttttaatatgagcaaagaacctgaacagacatttttccaaagaagatatacaattttgtccaacaggtatatgaaaaggtactcaacatcagagaaatttaaatttaaagcacaacaaaataccacctcacacctgtaaggaagacaattatcaaaaagacaagagataactagtgttggtgagggtgtgtagaaaagggaccccttgaacactgtttgtggggatgcaaagtggtatagttgctacggaaacaagtatggagtttcctcaaaaaattaaaaaatagaactaccacatgatccagtattacaattctggatattttattcaaaagaaatgaaatcaagatctcaaagaggtatgtactgtcccatgttcatttcagcattattcacgatagtaataatggaaacaatctaaggcccacgaacagatgaaagggtaaagaaattgtggtacatatctacagaatattattcagctaccaaaaaataaaaagaaattctatcatttgcagtggatcaacatggaagacattaggccaagtgaagtaagccagacacagaccgacaaatattacatgatcttgcttatgtgtggactcttaaaaacctgaaaatcacagaagcagagagtagaaccgtggctgccagttattggagagtgggagcaagggaaggtgtcagtcacagagcacacacttggagtcataagatgagcaaattttggagatctagtgtgacatgttaattaatagaattgtagttgcctttacaaaatgtatatctaatcacattatacaccttaaatatattccatttttatttaataagtattttaaaataagaaaatgaaattcaaataaaaatcacagtgtgagaagccactaacacatctaataataattgactccaaggagcacaaagggtctcttggaggtgataaagtattctatacattgctggttattttgcctatgcaactatgtatatcagtccaatctcactgaactaaacaacaaagggtgaattttactgtatgtaaactagacctcaaacaaatagaagtttaaaagaggcaaaaaaaaaattgcacttagctcttattagaatcccagtgactatggtagactacatgaaataattatgtttacatagattgcacttgattaaatacacgtgcatttctgcttataaggtaacaatttaggaggcacatttttaaatcttagtgatacaatgcaacatttatcatttattttctatttatttttaatgaacattataaaaataatggctgtattttgggaataaagtcaatagaaaaataaaaagttaagtatcttttattttttggctttgtttgagctgtatagaattaacaaaagttactctgcttgtaatattgcagtccttaaagatattattatttttaattctcatattattattccatcgcaaacttgaagttttgcccatgattttgtattttaaatcctaaatgagtaatttttaaactaattatacaattatgcctttattcagttgtttgcaatccatttttgcatttacatgttaaatcttgtctagttcagccatgcatttcaatcccagctcttaagttgtttattgattcatctattatagtcagatatacatgtgtaaacattttcttctggagttcaaataagtatatacttttttcttttaaaattaaagttgaataaagtttggaattaattttttaaaagtttacagatttcttactaatttttttcctgcagtttataagaaatatttcttatctgaataaaaccaccgtcatagtccaactatcctgtattggtaattttcgattgataaaacattagaaagagactaattgtagtattgattttttttcctgtagcagtcccctggtgttaccaattgccaagcaagacagtttgttggaaaaagacattatgttcaaagatgcaacaaaaggtctgtgtaagcagcagtctcaggacagcatccctgaaaaccccatgatgagcggttccaccaaacccgagcaggtaatcatgctttcactgtgtgtctaccagtactttttcatatcaagtaatgtattataaaatccaacatatttcaaaaacaaatgcgcactaatttgcattcaaagacaattaatgcatagattaatattttgcttgcagttttcataaacaattagtgcattctgctgatcaacaaacataattgctattgtgctttacaatttgaattttggttttgacttataaccaggaatataagctcagccagcgcattagttcttgaatatttccagttgagtcatttgtcattattttgatttttatgtattctgtgttttcttggtttatttcaatgacccaaatatttatgaacaagaagggcaaaccagtcactgaatcatttattcttaaaagtaactgtggtcatgcattgcatgtgtatctgtacgtgtctgtgtgtttatgttgcgtgtgtgtgtgtgcatatgtgtacttgtctggtgcctaagttatgggaggtaattttggatttgaagggggagaggggaatgagcttggagttatggcaattaatgtattttattatggccacagaaataaatgattttgtatatttctgttttataagtggcagaataacttgcatccttgaaaatagctttcttcagtgtatctaatttttaatattttatagatattttagccaggttttctaaagatcttcttcttaaaatttaattttaactttattaatttttgttatttcaagtaactaaagcagataaacaaaacatctgaaacacttttaaattttagcaggtgtattcatctgctcaagctgccatgacaaaacaccacagtctgggtggcttggacaacagaaatgcatttctcacagtcgtggaggcatctggattctgagggtccaaggtcaaggtgcaggttgactgaaggtgcagggtgccttcccactgctgtgtccttgcagggcggacagcaggaggcagggaaaatgggaaggaggaagaggcagggaggagcagggagagggcactctctggagcaatcttgtaggcttaggatcccacccttatgatttcatttaacctaaatcacttccttataggctctatctccaaatacagttgcattagggatgggggcttccacatatgagtttggagaaatacaattagtccacagttctagacaaatcaaaggttaggtaaaatttaagagaaaatatgtatatattttttgagacagaagattgctgtgtcactcaggctgtagtgcagtgtcacaatcatggctcattgcagcctcaacctcacaggctctagtgatgcttctgcctcagcttcagagagctaggactagggtgtgtgccaccattctctgccatttttttttttaagagatagggtctcactatgttgcccaggttgatcttgagttcctgggctcaggtgatcctcccaccttagcctcccaaagtgcttggattataggtgtgagccaccacacctggcaaaatattcttaactttcttaaggatcctattaacttctgttgacattccaagtgtttctgagccatataatttgtgtactttagtgtctggcataactttccatttctggttatgatttaatactatcctgtatagaggaaaaatgactattaattaactagtgtctagcaccctcttactcctcatacattttaacacttatgcccataaatttagtaatttaaaagtttggtttttgttttcattacagatatttaagactcaaattagtttgcagtgagtgttgaggaaacaaatttctgagttattttacaacagttgaaactcaagaatgagttctgtttcctaattgttttcatgggaagccactttgaataaagtcttatgggtgctttctcttgttatatataaacccattactgctcacctttagcttttacaaaataatatcattatatatatatacatacatatatatacacacacatacatgtgtgtatatacatatatcctttgggggggaatattttatttttaataatttgtttattgattaaaatattacattgtaggattctattagaatagttatgtgagcaaagaaattgagtgtgactgacaattgaacactatttttaaacttatggagttattttcctcatattttaatttgttattaagaatgggaatattaatgttatttattacataacctagagaaattaaagataactttaaaatgtatttttgtttttactggcattgttttgaagtattttttcttaattcatttatataaattgtgggaaatctcaggctaattgatttcctactgttcaaattaactaacattcaaaaacttttgaatgcaattattgatatggcatgacttttagtcaatgtgtatatgtgaaattattgtacatttctattaatttgctttcaagctgtattaattaggtgtttgagtttagcagtagtaagtacaatgataatcatttatttaattaaagaagagcaaactaggtcaaccatttcatcaaggtactgagatttctccctctgtggagttaaaacaatttctgattagcagattgattgctttttaagtggtaatttaataagacgtttctaaaagacataaagtgttcttcaaatataagacattcacgacataaaaatatcaagtgtaatcttcacaggataacttttctgttttgatgtagactttttataattgtatcctagacataaaaagtaattgtaaccatgctctatttatgcattattagagaggaagtggcagctacacaggctttatgctcctgtgtatttatgtcctaatattcacccagtaatatgccgcatggtatccatcatgttctcatatgttcttgcccacaaggtgctagctgtatggttctctccagggaagagcagcgtggtaaactgagtggattatatattcacatttcataggaaagctttccaaaacacttttcaaagccataaagctctaattaacattttagagataaatacatcatgtggaaaattttaaaaaattaaaataaaaactactttgcatctctctttccagatttttataaagtgtaggtcttatcaaatggtaactgtgtaaatgaatactaaaggcttgatttgacattttattttttttaatttccgagaaccactaaaattaacatttgtttttataatatctctgagaacacagaatgtttcttaaattgattataatgtgcaagacttccttctcttccctttccctcctggtttcctttcccatcccatccctccccgacctcctgggttttttcatttttttcttggttccctaacttcttattttccctctttcctctctttctcccttcagacatttttatttaaattaggtttaaggttgaaattgaagtcaagtcttcattccgtttggtgaagttatgacagcctggagtagagagagagcgggaaagaggcgtgcagctttgccgtggttcaggtctgcagctctggagctctatggaagtcccatagccttactgagcctcatgtgcaaaatgggtacataggactgggcttgtatggttgttaggaagatgacaggagatggatgtattatttgtactatcattattatatagactgactgtatgtgactgactggaattgcatactccggttttgccagagcagtagtcttctactccctgcccggatctgttctaaattcatgtagttccactcaacatatccacaggactttatacttttcaatgtaaatgtagattattttagaaaataataatgcaaaataatgtgttatgttggttaacatttcaaagcttagaaatgcgttcacctgcactatcttaatcctcaaaatgtcactgtgagcaggttattttctgctttcactacataactaaaactcaagtttcaaactgaatttcaagctgaccaaacttaaactcaagaaagttaagcaggctgggagtggtggcttactccaatgatcccagcactagaggccaaggtgggaggattgcttgaggccagcagttcaagaccagcccggcaacatagcaaaaccccatctctacaaaatatttaaaacgtagcagggtttggtggcgcagggcctggtggcacacaccggtggtcccaccaactcaagagactgaggtgggaggattgcttgagttcagaagttggaggctgcggtgagctaggacgtcatcactgcactccagcatgtactataaagtgcgagcctgtcttgacgaaaaaaagttaagcaaattgtctagaatcacaaatgtttcttttattttgtatccagtgctcttttgggggcaccacagcaggtttctaagatccgctaaaactttcttcctgtagtccacagagacacaagcacatgtgtgcacgagcacacagatctgcagccagggaaagggaaagggcctggtagacttcactatttaagaaacacttggcagaataacaaaaggagggcaaaactacacacgactgtccaggcatggcatgggtggaagccttgggaagcgaagtaaagtatgtgtcacatgatcaccctttcctaatctggtcattccggtcaacacgaagtttttttctgtttttttgtttttgtttttgtttttgtttttctgagatgacgtcttactctgtcgcccagactggagtacaatggtgccatctcagctcactgcaacctccgcctcccgggttcaagcgattctcctgcctgagccttccaagtagctgggattataggtgcctgccaccacgcccagctaatttttgtatttttagtagagacagggtttcaccacgttagtcaggctggtctagaactcctgacctcaggtgatctgcctgcctctgcctcccaaagtgctgggattacaggcatgagccactgtgcccatctaacacacagtcttttttttttttaatttcctcctttgtgtgtgtgtgtgtgtgtgtgtgtgtaacttatccatactgggttatttgcccctagactgccttcctccaaatcctgttgaatttcctcttttgtgtgtgtgtgtgtgtgtgtgtgtgtgtgtgtgtgtgtgtgtgtgtaacttatccatactgggttatttgtgcctagactgccttcttccaaatcctgttgaatttcctctttttttttttttaactcatccatactgggttatttgcccctagactgccttcctccaaatcctgttgaatttcctctttttttgtgtgtgtaacttatccatactggattatttgcacctagactgccttcctccaaatcctgttgaatttcctctttttttttttttaactcatccatactgggttatttgcgcctagactgccttcctccaaatcctgttgaatttcctctttttttgtgtgtgtaacttatccatactgggttatttgtgcctagactgccttcctccaaatcctgttgaatttcctctttttttgtgtgtgtaacttatccatactgggttatttgcgcctagactgccttcctccaaatcctgttgaatttcctctttttgtgtgtgtaacttatccatactgggttatttgcgcctagactgccttcctccaaatcctgttgccctgatcccacaggtcagaccatctctgttgccccctgggcttctactccctggacatgtgctaccaacctcccagagagaaatcacaaacaagcaaacgcaagacaacatggtaaagcccatggtactcaaaacagcgtccacacaatggagacgagggatcagcaaattcagaatactttcaaaacttaaattagctttggatcgcaaaacatttctcaaggtgtttcccctgaattcttccttgtcttctaaattatgcctatcttgtgttttagatctctccttttagaaatatatagaataaaaaccataatggtcaattttggagaggacaggcaatcttttgtacttatctggtaattattgttataattgtttggtagacattggtggtgcccacttttcagcctacaactgcaacataaaaacattcacagacatattttttacttttctttctacttgtcagctgtcacaatgcttttgaaatctataaagaatctgctcctttgatagcctcgcttaagattgattatcaaagcttcctttcaggtcattttggaatcttgacgtgagaaatgcaaggaactcttcccttgatctgctctcacactggctctgccccactgtgtaactataaacaggctagggagtagtcacatttttagtgtcagcctagtactttctctgacccatgtaacagctgtgccactgaaaacgagaatccacaggaataccaatgagatgtctgtgatagctgttccaggcttgctggaacaaatgcagaacttctgttagtactattcatgtttttgctaaatgtgcacacagaaatttgcattgaaattgttagcatcgtgactgtaagaaggatcttattatcttagcataaatcattactcctgaagaaaacacaaatcttactcttgattttcctctttttatgatttctttaggagttaaagatgtatgctaacttgctggagagttttgccttctttttgcattactcaaagttactgcaatcatttattgatttacatcaaattatgtacatgtatgaatatgcatatggattaatttttgtacatgcatacgtgcatgcctacatagttttgggggttgtctatatgtgtgtgtaagtttatgtactttgcagaaatgttgcaaagatattaaaaagaaaatatatttacatccatccctaaattgatggtgaaagctccctttcatgtgtctctctacataatgacttttgccacaagtgatttctcctctagaaaatacattcttacctaattgcacatgttttctagattccttttatatccaaaggcaagcattccagtctgtgatcctggactgcgtaaaaattatccatctctataagaaaaccttcaatcttgtctaaatcaattctagttaggaaatcaagtgcaacttagttgcatacagttgcatatggcagctcctctttttcttaaattaatcaaagtccaatccattcctcctcctctttgacctcttccttgggccacctttttctagagcttgctagctggtctcaccactcccgccttttctctgctgtagctgccagggtgtcatcttagcaccgtgaaactggtcttgtggtccccatgctcagtcccctccatgactttcactaattcctggaatgtagcagctcttcctcagggcccaggaagcttttccagctccttcaatatcccctgctgctgcctcctcccacctcctccacgccagggcatgttctagggcctcccacacacccatctcctcccgaccttacagccctcaccatgtccttccctctcccagagacatctctccccacatcccacagtactgccttttaaaattatgtccaatttcagtgtcaacgtgacctcttcaaagacgacttctcagataatctaaagtgaaatttttctcttttcaaagcatcctgtttttcccttcacgtacattttgtacttgtcatttcttatttctgtcctaacttctccccccagccccccagtaggggaagtcacaaacatcattccttttttcctctttgtgctaaacctctagcacaatggccaacaaagaaggtaagcaagggaaatttggcccattattgaatagatgtcatcagatgtttccattatccactggaattccgcctgttccccagtggttatcatgccagttttgcttctgacttatcagctgtgtgaccctagaaaaactacatgtcctctctgggccttaagttcttcatcctttaaataaggatgctataacaatgaatgccaaaattttaaaaaaatgttattcagcagaagaaccttcctcagaaagaaatacgtgaacgagaactctgattcctaaagcaaaggaaagctgagcatctttgctgagaacagcgcggacagacccagggccctccacactcacccgcatccctcccgccaacagctccaagggaagctggtaggaagttacatggtctccgtggcccctacatgtgttactaagggcactaatgaggcacacttagctgcagaggaggcactgggccaaattttcctcatatatttaattccctcaaccactttatgaagtatagactatgtttcatcacatagagaatgaaaagcagcttcatgatgttaaggtagaaaaatattcaagaactcacagattggaagatgtacaactggggtttaaacactgttgttcatacagctgaatacaaataattgatgtttcagaggtagatgagctcgcattttctaacatttgaagtagggaagctcaaattcatgtctaagatattgacctgaatttgtgtgaccgatgaaagcagaattaaaaactgcctggatcaagaccaccagttccttcgcctaagggctacgccgaaggcagcatcacttctatggtcgcgcctctctctgagagctgtcagtctaggtagcgctcggtgcctatgagactccgcaaagtggaactcagtgtataatgtgaaaaagttgatatcaaacaatttcaaaattgttttgacaacccaggaaacactggcatagctggaacattatgacttctatttttatcaacaaaaagtaccagtttttggctgcaactcctgaacgattcaagtagataattctgacagcatcaaagccttaaagctatgcccctaacccaacattaaataactaattttaggaaaactatattatatgcttggtgtaggttaatgctgaaagatatttggaaatacgtttcctttaaatgttgcaaagtagttaaaataatgaactcagggtgtttgagtttgtgcatcttggtggggaagggtacaggcttgttgttgatatttctgagatctagattttttttttttttttttgagacagggcctagctctgtcacccaggctggagtgtagtggcactatcatgactcacggcagcctcaaacccaaacccctaggtttaaataacccaaacccctcagccttccaagtagctgggactacagtgcacatcaccatgcccagctaatggaatattttacaaattagtttttaataagcattcatctattggaatattgtgtttcctgcttatagaaatggtttgaactccagtgccataaagcttgctgcctgccaccattctaactagagttcataaaaaaaatgttctgacctttcaacatgcccactactcaatttgtgtttctattattgtgtgtgtgtgtgtgtgtgtgtgtgtgtgtgtatttttgtttgtttgtttgcttttgagacggagtcttgctctgttgtccaggctggagtgcagtggctggatttcggctcactgcaacctgtacctcctgggttcaagcaattctcgtgcctcagcttcctgagtagctgagattacaggcatgtgccaccatgcccggctaattttttttgtatttttagtagaggtgaggtttcgccgcgttggtcaggctggtctcaaactcctgacctcaagtgatccacccaccacagtctccctgtgctgggattacaggtgtaagccaccacaccggcctgtgtttctattattaatgcattaggtttagaaagcctggggagaaaataagcccactttatgaactcatgggaaagattttactttgcgaaatatccactaatatcagaaaaaatagtcctaaatttagttttattaaagatgtttagtattttttacactacatagacatgataagcagaaatatttatgttcaaattatttaacaatggcatatgctgttaataatatataatacagatacaaatacaaaatgcaaatatagactacaaacatgaatacaaatgataattattaaaaatttactaggagtatcaaagaactcacattgataagaatattcttattcttttgctcctctgtgtgtgatattaaaaaaacactactaccatattacatcaaatgactacttttctgagcatgttctgggtatataaaattaaaattgcccatttctaatttgaaaataatggattttcatttaattgaagaatccaaatttatcttttttatttgaaatgttgcagtctttaaacattcatggcatattaaattgaataggaaagtattttttctttatgacagttatttaatctcatagctaccttaatcttaaaagtaatgtagagcagaatagaaagatctgaagtctacctttaaaacctggcctcatcctacatgaatgcagaatctaaattccgtacacatttcttccttaccatgccaacaatggtaacatgaaaagttttgctttagcttagggaacactacggatatatgaggtgttccactgcttatcttccagagaactgagaacagtacagagctgtctaaattatcagtagggaataagaaaagtcaacatgctgaactcatcttgacagacctaatgcctgggctaacagacagggtgtgtgcacctgcacactggggagtatagcacaaaaattctcatctgaatacattgctctgtggctttagagttttttttttttttctttttcattgaaccatttcatctcttaataacagttcctaactcaggttgtcttcaaatgtttgacaggtaattgaaagtggaacatccaactgtgaagaaagttgattggaaagcaattagaattgatcatactttcggttcttccccaggtcaagctaatgcctcctgccccaaacgatgacctggcaacgctcagcgagctcaatgatggcagcctgctctatgagattcagaagcgctttgggaacaatcagatctatgtgagtgccctggaaattgccttttgcactgtttttctcttgctgcatatttttatcacccttcagtgcttcaaatgttgcaagtaaagggctcattggagcttctggtagtggtgatagctgaagttgaatttcttaaggtgagtttagcttcattctggctcagttataaggcaaattcagcacagttccaaattctggagctgagtatgaactaataccctgtggacagacacaagtactgctattaaactttcctgttgtcatgattgctgtggaagatcttgctagaaccagcaggatctgcacatgacttataaaattgctgtctgtctcctctacttttcttgaacctgctagatcaggaacaggaagcgaaagagcatacattgactatgcaggtaagactgcatctctatttgcataagaagagaaactgttgtggctcagaattaccaggaaatgtctttgtaaagtaaataatttatacacagattcctgatagtagaatccgaaaatattactcaaatgacagcatggagaatttatttactgcggttctatcgttatttgtatgttactttcccagcactgataacagtttaggcaccttgtaacatcaaaatcaatctctttctctttctctttctttttctcttccactctctgattttgttatattctacacagagcacagagtaattcaatcagaatgtctataaagaaatctgattatgcatataccagctatccctttttgataacacttgttttttttctagtctactgaggaactgattaagtaattttcatgtaaatgtgaagtctgagatttccttacaagtaataaattgtcaaatgctaattagcctatgaaaatgcaatgtagcatcttaatgcttagaaaaattgcctgccactgtaaatacacttaaaattaagtacttctgttaaaattaatgaaatcatgtcattggcataaagtggtgagagctgattactttggtctctgttatcaccctgttacttttgtaaagtgtgtatttttataacattttttcatcttttttcccagtattgtgttgattttttttgtcttaattatagaagcctggaagaccattgcctaatttcttttgtctttctttacccatttgtgcctttaaagtgacatttcatctaaatatgcatttaatctggttctctccaccccggtggtaagcaccctcatcaaagccattaccttcccttctctaacaacctcctaactttctaggggaggcttcatcattctttttcaatccaatctcacaatgaactagagtaagttttataaagcacaaatgtaatctcaaaactcccagtcttgaatcttctctatggcccaccacttttcatggaacaaagagcgcaacccttcttccagaggctagaatcctcatgatatgccctgaacagtcactgaggactcttcctcacttatatctaaattacctgattatcgcctgccttcctgcatcaaggactttccttagactgtttttttgtttgtttgtttctcctagagttatctttctgctccacaaaatagttagctttataaactcccactcaaataatcccactctttaagtaaaccttcccagagcttctagattacatcatcatggactatctgcctttagagaatttatcacagttggttattctgtaactcattggtagtttgttaacatctggttcctgggctgctcaaaagccaaacaccagagacaaggttgatgggaggaaaagcaggtttatttggaaagccagcaaaactgaaaagatggtacactagtgttctaacgtaccttctccaatttttcaggctggccagagggtgtttatgggagggacatatgcagaagaggagggtgttggtatcaaatggtgaataaggactatagacatctggggaccagggagggtctaaggacttgggaactttgtccttgtcaggctacaactttcctagaaatctttgacaaaacatagttgtttatgcacttctcctttaatcccagagtaaaaactacacaattgctatttttgcattattatctcagtgctttaagatgatcctagcccatgtgcaagaataggtaaagcagcttaacaaaatggagttcgttatgtgagtttttctgctgtttccctcttaaacagcaaatacttcctatgtttttatcaaactcctgcctctagctcctccacacagtggactatcttcttaaataatttttttctagtcagtttctctctctttcttgatcacctgaactattaatactactctctgctttccgaatgttcatataacataaatttgccactgtgcgaggcacgggtttcttctgctcaattcctaaaatacagaaaagctcaatcgattaggatcaattttgtaataggaatgctttacattatggtgtctgaaatcccctctaatgggtagacaagcaatttaaacattatggattaaatgacaatatgtgcttcccaatgtgttgtctgtggactagtagatatatgaatattttatgaccagtgtgtagtgaaaataagtgtttttacagaaactcttccagcagtttgttggtttaatccctatctgttggagttaataagaatcagagtttgaacttcgtatgtcttttaatcacattttttagtaattctttttattatgttttacaaaggtatcagtccatgattaattgggactaaaaacaagtgatccttccccacaaatagaaaatcactagtttaacagaaatctcaaaattcaaatacccgaatttggtcatttgagctcttccaacctgcacgtctcatggcctttcctccctggctcatggcagccccactcttgtcacttcttgggccaatgcatttggtgagactgttgatgctggttttccttccacaccccacatctgatttccctgcaaatgtcaccggccctaccttcaagttatacacagaaggccacccccactgctgcctccaggtacatatcttcctacagcaattgcattttgcacttgcattttatcctgcaaataagtgtctgggcttctcttgacctcccctctgtctattctcaacacaaaaattcagagtaacagtgttagaatgcacattgcattatgacacttctctgctaaaaagatgcccaattcactcagtaaagccagagtctgaggaaaggctcataaagccgcaacgctttccccctaccttttgaatttctgacgtcagatgctggcaccctaccctgggtgcctctaccctggccacattgctggccttggtgtctcatgagtatgggcagcacttcggtgcagggctttgcctgagtaatttgaccaccatatgcccattcctccctcccttcaggtcttcatatcaatgtcattgcttctggaggccagcccccagtctatttgaaatcgcaaaatgcacttcctatccttctgccttcatatgttttcctccacaaacttaccactctctaacatactgtatatttttcttatttagattcttataaataccatgtgctgattctccctacaaacacagactgtctgtctctctctttctatcatgcccatacccactagaatgcaagttctataaggaaaataattcttgttttgttcactgctatgtatgacccataataggttcccaataaatattgaataaataagtagacttcctcaaccaaaaccctaattttagacgagagaaagaagttaatatttactcatccataccaaataactgagggttgagcaatgatttgttttcagagccaagataaaatattttagctgacttaatcatttgaccaggattttcatctctttttgctacagtccgattttttttatagtatgatctttcaaaacagattgtaaattgcctttttactaagtatataaccttctatttggacgttagattagggagtttccacagtctgcagtattagggagttctccaaccttcaaacagaaaatgaaatgcgtgtgatgagacacatgctcgccaggaaatgcacagaatacaagcgttgcattctctgaatacttactgccagcagccccagagagaacagaatatgcagtcaaattcctttatggacagcaaagaagtttgctggaagtatttattttacaagcacattagtgggacttgagactcataaaaaaaaccccacaaagtaaacacaagacctcctgtaacatctggttagccaagagaattctgaaacaaatatattgtaattggataaaagcaaaccagagcaataaagcatcgcatgacagctcctagtacacagcctcactcatttcagccacttaacatgccactccgggtgacccaggttaatgtagcagagcctctttttttttttaacttttattttaggtttgggttgtaaaggtttgttatacaggtaaacacgtgtcatagaggtttgttgtacagattattttataacccaggtattaagtccagtacccaatagttatattttctgctcctctcccccattccagcctccttggccaagtaggccctggtgactaccgtttccttctttgcattcataagttcctatcatttacctcccatttataaggagaacatgagtttggttttctgttcctgtgttagtttgctaaggataatagcctccagctccatccatgtttccataaaagacatgatcttgttcttttttatggctgcatagtcctctatgatgcacatgtaccattctttctttatccaatctgtcatttatgggcattgaaattgattctatgtctttgctattgtgaatagtgctgccatgaacattcgtgtgcatgtatgtttatggtagagtgatttataattctttgggtatatacccggtaatgggattgctgggttgaatagtaattctgcttttagctctttgaggtatcacagtactgctttccagaatgtttgaactaatttacactcccaacaacagtgtactgctgcacatctgtgaccatctgttcttggacagagctgataaaaacaagcaatgaggaaaagattccctcttcaataaatggtgctgggacaaccggctaaccataagcagaagagtgaagctagaccccttccttgccccatatacaaaaattaactcaagatggattgaagacataaatgtaaaacccaaaactataaaaacccaggaagacaacctaggcagtaccattctggacatctttcttaatcaacagatttctaaattcactcacaatctgctttctagctcaatttttcttctctggaatttaacaggagttttcagatactacattagtaaggtccttgcagatgtattatttcacttttatttattttcttatttacttgggtatagaatactgagcaatcattttttcccataaatgttgtattaaataacgacaaacaaacaaggtaatatacaactcattaatatatggcttaatgaacttttacttcatgaacacacccacgtaacctgcagcttcataatgtaatagaagagagaagtcctctcccaatccacacttagtcattacaaaatattctgacatttacagctatagattggttttgtctgtgttttttaactttatataaatgcaatctgttttgtagtattcctctcattattatgtttctaatattcagctatactgttgcttgtaaaagcatttactaatttttgtttatgtacaataaactactatatgagtatattctaatttatccactctatacttgaggaaactttgagttgtttccacttttttagtaattacgaataatataaacagttttgcacctttttattttttggcccacataagtacttctatggggtctttacctaggagtggaatgccagcatcataaaatatgttcagctttggtagatacaacccaattgcttttgacataaatggtgtttttgtttcactaagagtttttcaaattccagctattctggcagttgtagagtggtagcttattgtgtttctaatttctatttctctgatttaacaaatgaaaatattaatatgtgtttgttgttcatttgattatcttcttttgtgaactgcctgttcagttatagtgccattaaaattgggttttctttcttcttcttgatatataggagtttttatgtattcacgatattctttttgttgtgaaacatacatattgcattttcttccagtttatggcttgtattgtactcttcaaatagcgtatttaaaagaagcaaagtgtacaattttacagattctttagggttcatactttttgtgacctgtttaagaaagcttggcattagttatgaaaatgttttcctacattttctttataacattttattattttagcatttacagttaagatattttggtgctgatcataatcctgaaagacacaatccccaatgccataatttagaatgttgaaatctcaaaagatcgaaatcctcaaaaatcaaaatccccaaagtctgaaatgccaaacatctataatcctgcaaatcacaatcctgaaagaataaaattctgaatgttaaaatcctgaaagctgaattctagggaaaggattattgtggttttggttgtatgcagaagagttgcatcatgattttgacttgcaggattttggactttaggtatttcactctcttgggatttcagcatccaggattatgttgtttagggtggtgtcttttgggattatggcccaaacccaaggctaccatattacccatgtggaaaagatttcacaattgtgaaggaggaggatccagattaaaactgttcccacatgtgtctccctgctgcatgatcacagcacctttgtcctaaacaggtgaccccagggagtgggtgcatttctaggatctgttttcttttgtattggtccgtgtgttcctaaacaaatcaccaaatatcttgatcattacagctatatagtcaatcctgacaaatagaaagtcccctaagtttgttcttaaacatgtgttagctaatcatgacctttggttcatgtatactttaaagttaatttaacaatttcaattggatttgtattggtattgcattgaatatatagattaagtggaaataattgagagttttacaatatttgatttttcatttcacaaaatgttatagcccttttattggccatctttaatttctctggagcaattttgattttttggtatagaagtctttcccatattattaaatttgcttattggcgttcttcatattttgaggacataataaatgtttgcttgtttgttttatggaaaataagaagaaaaaattattttctaattgttcacgggtaatatatagagaatacaattttgattttttcatattcattttttatccatcaaacttgctaaagttatatgtcagtattaatttacataaacagtccattggttttctgcatcaatgccatatagtctgcaaatgatgacttttatttctttttttgaaaaagtcatacctttttttcttgcattacttcatgagatagaacttcactaaaaagactggaagtgtcgataataagtgccctatccattgccaatcccagaaaaaagctttgagtgtttcatcatgaagaaatttgtggtagctatgccataggtatcattacttttcattagattaaggaagtcccattatattcatgattttcaaagttattttttaatcaataatgagcattggatattattaaatgctttatctctgtttatgcagatgatcatatgtctttttaagttttttaaaatattattagttacaattattgatcttcaattagaaaccaaccttgcatttctagaataaagctatttgaggtgtattatcattattactaaattgctggattcaatttgttaatattttgcttaggatttttacatgtattttaatgagagagttcagcctgtaattttcctttattgcaatattcctattagagtctaatgtcaattttgtgtgttgttcttaaaatgggaagtgttcctttttctgttatcttctgaaataatctgtagaatgtttgtttattttgtacatcaatgttgggaagaattcaccagtgaagcctaagttttctttgtggaaaactattttagacatagattcagctcactttatagggaaataactaattagaatttctgtttcttattgtgttagctttggtatgatgtattttcctaggattgttgtctacttgaccttaatttctaaatttagtggctacactatggttcataataccatcttcatctgtttttacatccatacaatctgtcttgatgtcatattactgattgctattggtagttggtgcatttcctcttgttttctgaatgagttttgctggggtaaattgtacatttttcaaaggatcaccttttggcttttttcaccctattccattgatttctgctttgatattatttcattcattttactcatttatttctttataattgatgtaattttttaaactccttgaagttgatacttagatcattaattatcactccttttttccttttctaacaagtattctaggctataatttttatcttaagtagacctttagttgcatcccacaagttatgatataatagaaatagtcttatttgcattttaattcctttttaactcattagttatttgcagatatattgtaaaatttcaaaatgtttggtgattttctaggtacctactagtgacttcagtatctttttaattaaaataacctattttaaaattgtatatttttaagggatacaacatgagttttgtttggatttttgtttttgtttttgtgtttttgagacaggatctcactctttcacccaggctggaatacattggtgagatatcagcttactgcagcctcaaccttccaggatcaagtgatcctcctgcctcagcttcctgagtagctgggatgacaggcatgcaccaccatgcccagataattaaaaaaaaaaattgtagagatagcatctcaccatgttacccaggctaatcttgaactccagggctcaaacaatcctcctatcctcctgcctcatcctcccaaagtgctgggattataggcctgagccactgcacctgcccatgatgccttgatgtacatacacttagtgaaatgagttctacagtgcagcacattaacatatccatcacctcacatagttatctttttcttttgtagtaagagcaccaaaactctactctcttagctaatttttaacaccagtataatattcttttttttaaaaaaagggaaagcatttattcggatttagttttctggtgggtgacattaaggcccttcacacagagttcagaagacaatattctatcctaattctaccgtaatagaacatactctgtgtgactcaaatcttttaagtttaatgaaacaagccagtgttcaacttgtcagtaacagtgttttatataaataaattgatcaatgtggtaattactactttaaaattttgtctgcttgttccatgaattactaagaaaaatggttaaaatgttccactataattgtgaactcatatttttctccttatatgttatttctttatatatgtgatgctagattttagtcttctagaaatttagaaatgttgtttcttcctgattgatttatcattttactctgaaatgtttctttttatttctggtactgcttccaaaagcacattttctataaattaattatttccatagtcaccttctttgctgttattattgtttgcatgcataccttgcttcatccttttccctttttttttagtctatatgtttaggatgtttctctttaaagtagtcatctttcatattttaatacaatttataatctttgtattttaattggagtatttggtacctttacaactgatgttgttgctggtgtttgggtttaaatctatcattttattatttttatttgttccatctgtactttgtgcctttgtatctcattgtcactttttaattgaaacaaagtattttatttgattattgtgctttactaacttctcacttatgcagtttattattctgtagcagaataacagaatttgttactccattgactttttcgtaggcattttgtcatatgttttaagtctatattttttcattgtttcattctcacagaatcttttaagaaaagaaattcttagaatttaactatttcatttctcttatgttcagtgaaataaagcctgttttatttaatttgaattatttaattcatttaatattttaaattccaaactttaaaaaaattgcaaaatattaaaaaatagcaaaatactaaagtagattttttcttattatttatatttcatacactggtttttaaattgtatgatttttattgtttaaagatgctatttatatgactcatgaactgtttgcatcccttttttcacagacattcattggagacattcttttgcttgttaacccatacaaggagcttccaatttattcttccatggtgagcacaaaattttaaatatcattgaataatgtagagtaatactttctagtcatacatgtttgtatcaaatgactaaaaaaaacaggcaaacttctaaaaaacatttttaaattctgaattgaatgattgtgtagcagtgactttaattcattttgagcaaccttgaaaatcgaagttattttatcaaaatgtttctttgcacttaaaatgtgtaatttgtttatgactatagccattagacagacttctaaaattaaataatatgtaagtatattttccatacatttttcactaactcaagatcatttggcttagagcccttatttggacacgtgacttatttctgaagagttctataatgttaaagcaatgggaataaaaaagggtaatattgcatgtttacgttttcccaaatgacttgccaagtgtaattatgaggccctaaaaattaaaagagaaattacttgtagaaaattattccagtcaattgaaaatgcagtatgatttttgagtagaaatgggtcaaaaatactatatcataggagctattttttgtgtaacaacaaggctggttccgctaatacagaacaggaggctgcctgaaaccaggaggcagggagtgggtatatgttcctgaagccggggctcactcataagatgtggcgggcagggaggaggacagagagaggagagaaaaaaagagaaattcctccaacttcctaggaaatcaaatatgtattttcacagaaatagttcatgagaacaagagagcatccaccaccccaccctccacccatcttatcaaaagtcaattctggctggactcggtggttcatgcctgtaattctagcactttggaggaccaaggctggtggatcacttgaggccaggagtttgagaccatcctgggcaacataatgagagacccatctctgcaaaaaacaaaacaaaacaaaacaaaacaaaaacaattagccagctgtggtggtgtgtgcctgtggttacagctactcaggaggctgaggcaggaggatcacttgggcccaagaagttgaagctacagggagctgtgattgtattactgcactccagcctgggagacagattgagatcccgtctctaaatagaataaagtaaaattaaattaaattaaaaagtcagtgccatggttactttaaagctgtgttgaaacctgcctaccctcctcattcctcccaatcctatgccaacctcaccctgtgcaatctaagggtgtgtgtgagcatgagacgctagggcaagggaatcacccatgatcatttcaggagtttcatccaaggactgaaattaatctgacatgtggttattaaatggttttgagaaaaagctcagttctgtatctttcactttgtgagtcctaattaatatttctgtgaatatgtgtattgacgtataatataaatattgcatagcatacaaatattaaatcttctgttcaactaatttataaaagtcatgacactctaaaaaccatcatgcagatgaagaaatagagcattagcaggatcatagatgtctcccatgccctgtgtcaaacgtgacatacctccccaaaagacagtacaattccaactactctcgccctccgctttgcatggttgaactttatatgggtgaaatcttgcagactatctttctctgtacctggctgcttcctttcaatattagggaaggtagattcacccatgtttttgtgtgtagcaatacaataagtacaataggttattgtattttgtatggctgtataaaatttccttttgtggatatatggcagtttaattaactattgacagagattttgtcttttgaagcaagaatattactgctatgaacatcctcacaatttttttttgataacatatgtatttcttttgttggaaagagtggaattggtacatcaaagtgtatacatacaatcagttttgataaatatcgacaattttctgcgtggttgtactaaggtatatctacaacttaatacagaaattctagttgcttctcttccttggtcatatttcatttgtttacttatcattctactgggtatatatagtggaatcttattgctctaatttgtgtttctctgacagacaatgagattaaccacattttcacataattactgtacagttatatcctgtttcgtgatgcgtgtatttcaggattttatcctgcttaaaaattaaaaactttaaaattggttcatctaccttttttattgacttgaaagatctttaagcattctggattctcaatgcatattgaaaacatcttgcaagaagtaggggtcaagattcatttttaaaaaatgtatattaacctgaaaccgtactgtttattaaaaagaccatctttcagctgggctcggtggctcacgcctgtaatctcagcactttgagaagccaaggcaggtggatcatgaggtcaggagttcaagaccagcctggccaagaagatgaaaccccatctctactaaaaatacaaaaattagccgagcatggtggcaggtgacgtaaacccagctacttgggaggctgaggcaggagaatcgcttgaacccgggtggcagaggttgcagtgagccgagatcgtgccactgcactccaggctgggcaacagagtgagactctgtcaaaaaaaaaaaaaaaatcctttctctgggacattatgttggcacttttgcataaaactagtaactatacataaatggatatagaatttccattcagtttgattggtctgttaaaatacatttttatgcctcgtactcttaagtcatccacctttggtcttcaaatttgccctagcaattaattactggccttttcctttaaggtttagaatcagcttgtcaattttggggcgctgaggggactccccctaggattttgaatttgattgcattatatttacagttcaatttagaaacagacaaaaaatgttagtagtactgagtcttttaactatattcatttattaaggtctttaaaatgtgaaattcctctcagtgtatcatcccgtgtgctcttctggaggatatattgcatagtgttcattaaatgtttttaaatgctgttataaataatcatttaaaaatgttattttccactggtgtgttctccatgtatgtataaaaacagtttaaaaaatcttaccttggccgggcgcggtggctcactcctgtaatcccagcactttgggaggccgaggcgggcgaatcacgaggtcaggagatcgagaccatcctggctaacacgatgaaaccccgtctctactaaaaatacaaaaaaaaaaaagttagccgggcgtcgtggcgggcgtctgtagtcccagctactcgggaggctgaggcagcagaatggcgtgaacccgggaggcggaggttgcagtgagccgagatcgtgccactgcactccagcctgggcgacagagcgagactccgtttctaaaaaaaaaaaaaaaaaaaaaaaaaaaaagaaaccacacataaaaaatcttaccttaaactagcaagtttgtaaaatttattagctataaaattatctagtgtgttttaaaaatactctgtgtacacaatcttattgcctgaaacaataataattttctttctttctttaaaatcctattattaatctgttcttatgttattggattggatcaccagaataatgtcagatactattaataatttcatttaaaaatatatatatatttcttatctcaggagaaatctttagtaattaaaccttaagaataaaaatcattataaattttacatagataccagttatcagattaaggaaatttcattttattgctgttttaagaagtctttttcatagaaaacgtattgaattttatcaaatgtaagtattttttctgtaccaattgttgatatgaatatttttctcctttattttgtttgtgaattataattcctgattttgaaatattaaacctaccttacattttgatgttttatccttttctttatattactgacgtctattaaataatattttgctgagggcatctatgttcatgaaaaagataagcctccaatttttcttttttttattaaaaaaatcttctatgtcaaaattatgctagtttcataaagagaattggaaggtgtactctgttttctagtctctgaaagagtttgtaaatttggtggtgtttctctcttaaatgtttggaagaattcacaactgaaaccattaaggcctggtattttctttgcaagaaggttttagttctggatttaatttctttgacatacataggacagttcatattctttctgtgctagtttttaatgattgcatttttaaaaaattatgttatatttaatcttcaaaagtttttggcatagaattattcatagttctatttatctttttaaaatttgtagaattttgagtgccttctttttattccatatgttggtaatttgtgacttttctgagtttttaaaatttccttctttctaatttatttgggtataatttgattattgtttatgttgtatagatatatccttgatttcctgcctttcctaaaataagtatttgggggttttaaattttactttaaatgtagctttactgaattctacatgtttgctattttataaattcattatcaattagtttaaggtattatctgtttctatttgtgatttctttctataaaaaatatatatgtatatatgtagaaagtctgtagaaatataaaccgaattaatcttcgttttctacttttgtttctctttgaccacagtctggataattgcttggccatattttaaattctcttttctgctgttttgaatctgctgataaaatcattccttaaaatgcagatgtctgttatatgatttttttcaatgctaacatttttattttaaactcttagggtttccagttttctggtgaaattcttcgtcttcatcatgccacttattttcttgaacatgtcatttttaatcctgtgtcttatgactctaatattgaggtctgtttctactatgtgactttgtgtgtgtgtgtgtgtgtgtgtgtgtgtgtgtgtgtgtgtctgtgtgttggttttacatatatggatatatttactgacatccacggagatttttgatggagtattgaactttccatataaaaaaaccatagggcccaggaagacattatcttccttccaagaagatttgacttttcctcctagcaggcacataagttgtagacaaaccgccttgaccttgtgaagtctcgtttaatttttttatttgctcccttcaaaaagttgagcccccttacgggtctcaggtggaaagttgggctgatattcatttggctttcctctgtttctgaaccctgaacttggatttttgtctccccagtactgtgtgaggctgctcaaatctctgctgagtgtgagacacttagggtgactttctgtgatgctgctgagagacactcagcacagcggcactgtgtgctgggaggaggggatggaaaagatcccgtgtggcccggtgcatcctgattttcttcaagatcttagctccctaagacattgctgctttggtgattttactatccctgccattagatgcttgatttgtattttatccagtctttgtaattgttcatggttaggagaatttgactgatactagctgcttcattacagctatagggtaaaggagactacatctgtttttattgcattggtgtcagaagattatttgccctcagatacctagattagtttggcatttcatgcctctaattttttaattctgtatgcaccaaggggtgggaggggaaagagagagagaaacgcacccaatttaaagttactattgataatattatttctggcttatgtttatggtaacagttgattgtagagttaacaagaattaacagtgagacaaaagtcagctttgaataattgaatgaaacgttaaaaaatgactcttatttggatgcttctatggatctagaggtaaagttttgagtattagccaaactttaacataatattttttatagtatgacacagtttgtcatactatattgtatcttgtgatgggaaaaaaactgttaacttgtggtatgtttgtttttaaagtactgacactatagtagtattagggcttcagataatacgttgtatttgcagttttttcagaaatacacattcatagagaaaaggagaaacacattaagagacatatttgtttattaatgtaagaataagatacaatacattgagatcattaccagaatagtttattaaaactgaaaatggctaatgcaacttataatttatgtaattatataaataaaatctatatatgtttcaatatatatgaattaagtatttaatatataagtattatgattttataaaatgaatttgcatatgtatatatacacacacacaccaccttttatattcatcatttctaaatgtcataaaataaaaatggaaaataaatacaaaaaatatatcaggtaaaagatgcactgatataaagcttacaataaaattacctgctttttataggtcatgagaaaaggtgaaagtgtctagtccttctggacttgacatccattatgtagaatcaaatagtttgtgctctccttgcctacaggtaacaacccataaaattgtagatattaggttgctgcaaggacatacattttacattgaattagtggttattccctgtagcaatattagtgcctagtaaataatatcaagtagtcacctatcagatattcattaaaacgatcttgttgtcctcaggccacacaacaaaaatttatttctttttgtttctagttattatcattgtattatgtctgttgttttaaatgacaaattttgttcaaatatttgggtttcttcccatgtcaattactttacaagaaaaaaataaaacattaaatatgattatatctgtaaagattataaagacgaggagaatgacttctccatttcatatttaaaaagaaattcacatataacatctgcattttagttttatttcattatcattaactctgttatattaagcctttgcataacattcatttttatttctagcaagttattaatcatggacggagaacactcttgaggcaaacttcatttcgagactgatgtctacacaaggcggcaggcagccctcccagttagattgcttgctgccacagcagtgctgatctgacactaacaaccaccactgccgagatgcgggtcacagcgggcgagtcagcaggccgttccaccaaccgggacagggtccatgccaaccaccaggacagggtccaggccaaccaaccaggacagggtccatgccaaccaaccaggacagggtccatgccaaccaacaggacagggtccatgccaaccaaccaggacagggcccatgccaaccaccaggacagggtccatcccaaccaaccaggacagggtccatgccaaccaaccaggacagggtccatgccaaccaaccaggacagggtccatgattgtgctgcctatttatgttggagacacgtaatatcattcattttaaacatgttacatgtaggggagaaagagaaaatagaaagccagatgttcctgcatgggctttacaaaaaagcaaccttaaaatcagaaacaaaaatgcatcatcaagccaacaaacatctgttgactctataaggaaatacattgccttaggtacttacagtgtcctcatccttgagcactgtgtagacatgctagagacaaaacacaaataacaatgaaaaaatcacatacttcacttctagctgagaacaacaattaaatagctgtattgagggtgtgtaaccctaattggcaagtcaagaggttagaagggagtaaatcctatcaggtttttttttaaaaagcatcacaataaaaaaagaaatgtgatcggggcaaatcttaaaaaattagtaagattctgatgagcagaagaatggactagagccacattatggggtttaaaaaatatataggactatttagagaaatacgccatgcaatttgatatgagcaagaagttaaaaaaattataatatttgaaattctaggaaatgaaaacagctgccattgtttagtgcttattacatggcagaactgcctcaaatggctttacatttattgtcacatctcaaaaggcaagcaaatcagtataagaattgttatttctattctgcagttgaataagctgagacttgaggttaaacagattttctaaagtcttcccatgagtggcagagctagcattaaagtccaggtcatgcagctccagagcgaatgcttggcaggcttctctcagcagcacaagtgctgcgcccagaggcagacagtttcatcatcatcattattattattattattattattattattattattattatatgtgatcttttgtaaacacaaacacatactttctcaaaacatgtcacctatacataggtatacagttcacaaataggacacctacccaggcctacagagtgagatgttcatagcatagtgcgaaaccagcagcccagggcacttggagcctctggcatctgggaggttccacaaagtttctaggctcgccagagatggaggccagtggctcagtggctgtctcataagctgtggaagcattggtggctttagaaattaacatggcaggattctgcaatctgctagtggtttatggagaaatataatgaccagtgaagaaaaggagggactttatccattaagaaggaaggaacctgttatctggaactagagtccatctaagattagcaagactgagtgcttgtcatctcacctatgagctaaaatggagtgtttaaaatatcccctgaccaagaatcctcttgtttcaattgatacaaataaggaaagaagacagtgaagtgaagagaaaagacaggtggggaaggaagtgtctggccctgatgatattcgctggacccaatgagaaagtgcaattttaactatgagaagggtaaccaataaaaaagttagatggcttgtcagtcactcagaaaacagggactgcataagtggaaatcctcaaagttttatagaattacactgtcattattatttccataattatattatgtataaagcatagaattggcatcaggtaatgtgttgccaggtggtagtaatggactattccacaacatgaactgtaacactgcatgggaaagagacttacaagaaaggggagctgagagaggttatgagtttatcaggaaataactttctttagacactcaaggctcatcacccacatctactctctagtaaaatttggcataaagagaatatctaagcccaaatagatttaaataaataaaatttaaaaaccctagccagctgtggcctagggtttttaaattgaaaaccctagccacctgtagtcctagctacttgggaggttaaggcaggaggatcgcttgaccccagggggtggagtctgcagtgatctgtacttgggccactgcactccagcctgggcagctgagcgagaccctgtctcaaaaaaatgaaaacgaaaaaatgttagagaaatgaatcccatgtacacacagatggatgcataatccaggctgtctcttgtgtctgttgaacatctaatgaaattctcatttacaaaatagagagttgaaaaacattttgtcacatgagagtctaagtctatgttggacttggggaggagtgaaacagtgttagtacaagttttcaaacaagaacagaaattagatctgctggacaagctggactaaaactcctcagttttatgaattataatgtgtatatcactatcatttaattattcttaatattcattgcaacttctggaataattaaaaatgaaaaaagttcaagcagaatgcaacagacagttgtgtgcccaccacccatattggtttcatatctcttttaaaaacatttaaaattaaaagtgctgtatttttttttcacatgtacttttgtgattgggatgcatctttaagggtatggtaagaaaacactgtgtcctaatttaactgtaacatttattttctgagtggtacaaaaaataacagtatgttttaattatatgatgtcttagatagatgacatattgttctataaacatagggtaagtaccacttcaacttcaacctacttattttcgtaagcagtgataatggttatcttgaagttatccttccatccagtgttttatatgtttactatatacatgaacacatatatacattcaaaaagtgggtataccactattttttatattttaattaactcataacatagtaactatattctctctctttttttttttttttgagatgagatcttagtctattgcccaggctggagtgcagtggcacaatcttggctcactgcaacctctgcctcccaggttcaagcgattctcctgcctcagcctcccaagtagctgatagtacaggcgtgtgccaccacacccacctaattttttatagttttagtagagatggggttttcccaagttagccgggatggtctcaatctcctgacctcatgatctgctcacctcagtcccccaaagtgctgggattacaggcgtgagtcaccgcgcccagccattaactgtattcttttacaaaaaagctgttgatcagccctcacgctttcaaaaattttccatcttgaaaatttgagacctaatttattctaaagtccctctagaattttcttgtaacgacacacaaccggttatatttgtctattaatctttattatagacttttaacttatttctgtattttctgctcttacaaagagtcctaagaattgttttataaatgctctttttgctcatgtttgagagtttcaacagagatattcccagttgaacatgaatcttcaaatttagaagatattgccagatgattcttccaattagttaaaactacaagactcagtagtatagacttgttttcccagcccaagagacaacttcatttggaaatcaagctctgccaccaactagccctgtccccttgggcctgtcactgacttctgttggcaccaattctcttgcctgtaaacatagaaatacttctctgactccagtcataggttctggaggactgcatgagtgagtgcctgtgaggtgctgaggacagcaccatgcacagagtgcctgtaagctattattgtcattatgactaaactatgattaattctgctaggattttgtgtgtaatatagcatcttatagtttgaaatagcacgagagagctttccaacctttctcatatttattttccatctttttagtttatatttttgcccgaatttgtattatagttccatttttaaattgatttgtaggaatatgttttaaattgctgctgatctattgattacatgcacagcttatacacttctctgtctttgcttattttctattattatatggttgaccagtgcttgttaaatttaatgtagtaagatcgctccatcattctcattataatttatatttttgaatcctatttccttgtttacatacaaatcatgagagtaccattctatatgcttgtctaaatgctttaaactttgctgctcatatctgggatttaaattcacttgtaagtaatttttaaacatgctacagaatagagatcaacacttgttttctttacctaaatagatgattagtcctctcagcagcaccctttaccactgataggtggtgcagcctggttggtcatacactgtatctttgataaggacaggaggcagggagacactgggtagaagagagcagttccccggcaaaggccccaccctcaagcctggtaacccacagccctaaatgggaacagatattcctgttttcgtgccaaaaagttgcctttggcccaccatgaccccatcctgtacccccaaacaccagactccacaagcagatgaacagaagagcagaagagtggcagagaaggagagaagagaaggagcatctgaatgttgagaggagttcagctagggatggttggagaggagataggccactggatggccaaactccagggaagatcatcttcccactctatcccctttccagctccccatccatcccactgagagccacctccaccactcaataaaacccctgcattcaccatccttcaagtccgtgtgtgatctgatttttcctggatgccagacaagagcttaggatacagaaagctgtcacactggccctctgcccttgcaaaaaaggcagaaggtccattgaactgtttaacacttaagctgtccatggacagcaaagctaaaagagtacactgtaacacatgcccacttgggcttcagaagttgcaggcacccacccctagacgctactatggggccaaagcccaaaggtgctggcccaggctcctgtacctgcccatctgcatgctccccctcccataaggggtttgagcacacacagtggccaaacagatgagccacaccccgtcacacatcctgcgagcaggattagggaactctcccatttcatcttcaccaacatgtagggttgcactgaattatctagtctgtttcaagtgatctgtgatccatttatctagtctttgcaccagcaccacactgtgtgatgacttcagttttttgtagttttggttgaggtgtaatgtttgtaggaaagtgcttatgttgctaagcatgcaggtgggtggtactcagctccagaacattatcaacactccagaagtcccttaaacattagcacttcccctgctactgccaatttgacttctaacagcaaggattggttacctgtgtttgtacttgatgtaagtgaagacatacagtgtgttcttttatgtatctcacactcaacattgtgagattcatccagttaactctcattgtggatcatgtattctactttaaaaattatttttgctataattttaaatgtgtgtaaaatgtgtagataaattgtacaggcaacttttaacatcaaccttttttttattattatactttaagttctagggtacatgtgcacaatgtgcaggtttattacatatgtatatatgtgccatgttggtgtgctgcacccgttaattcatcatttacattaggtatatctcctaatgctatccctccccactcccccaaccccagacaggccccagtgtgtgatgttccccaccctgtgtccaagcgttctcactgttcaattcccacctatgagtgagaacatgaggtgtttggttttctgtccttgcaatagtttgctcagaatgatggtttccagcttcatctatgtccctacaaaggacatgaactcatccttttttatggctgcatagtattccatggtgtgtatgtgccacattttcttaattcagtctatcattgatggacatttgggttgattccaagtctttgccattgtgagtagtgccgcaataaacatacatgtgcacgtaactttatagcagtatgatttataatcctttgggtatatgcccagtaatgggatggctgggtcaaatggtatttctagttctagatccttgtggaatggccacactgtcttccacaatggttgaactagtttacagtcccacaaacagtgtaaaagtgttcctatttctccacatcctctccagcacctgttgtttcctgactttttaatgatcgccattctaactggtgtgagatggtatctcattgcggttttgatttgcatttctctgatggccagtgatgatgagcatttgttcatgtgtctgttggctgcataaatgtcttcttttgggaagtgtctgttcatatcctttggccactttttgatggggttatttgattttttcttgtaaatttgtttgaattctttgtagattctggatattagccctttgtcagttgggtagattgcaaaaattttctcccattctgtaggttgcctgttcactctgatggtagtttcttttgctgtgcagaagctctttagtttaattagatcccatttgtcaattttgacttttgttgccattgcttttggtgttttagtcatgaagtctttgcccatgcctatgacctaaatggtattgcctaggttttcttctagggtttttatggttttaggtctaacatttaagtctttaatccatctggaattaatttttgtataaggtgtaaggaagggatccagtttcagctttctacatatggctagccagttttcccagcaccatttattaaatagggaatcctttccccatttcttgtttttgtcaggtttgtcaaagatcagatggttgtagatgtgtggtattatttccgggggctctattctgttccattggtctatatctctgttttgggaccagtaccatgctgttttggttactgtagccttgtagtatagtttgaagtcaggtagcatgatgcctcccgctttgttcttttggtttaggattgtcttggcaatgtaggctctttcttggttccatatgaactttaaagtagttttttccaattctgtgaagaaagtcattggtagcttgatgaagatggcattgaatctataaattaccttgggcatggagtttgagatctgagaacggacagactgactccccaagtgggtccctgacccctgagtagcctaattgggagacacctcccagtagcggatgactgacacgtcatacagccaggtgtccctctgagacgaagcttccagaggaaggatcaggcagcaacatttgccattctgtaatatttgcttttctgcagcctctgctggtgatatccaggcaaacagggtctggagtggacctccagcaaatttcaacagacctgcagctgagggtcctgactgttagaaggaaactaacaaacagaaaggacatccacaccaaaaccccatctgtacatcactatcatcaatgaccaaaggtagataaaaccaccaagatggggagaaaccagagcagaaaagctgaaaattctaaaaatcagagcgcttcttctcttccaaaggaacgcagctcctcgccagcaatggaacaaagctggatggagaatgactttgacgagttgagagaagaaggcttcagatgataggtaataacaaacttctccgagctaaaggaggatgttggaacccattgcaaagaagctaaaaacctcgaaaaaagattagacaaatggctaaccagaataaaaagcatagacaaggtcttaaatgacctgatggagctgaaaaccatggcacgagaactacgtgactcatgcacaagcttcagtagccgatttgatcaagtggaagaaagggtatcagtgattgaagatcaaatgaatgaaatgaagtgagaagagaagtttagagaaaaaagagtaaaaagaaatgaacaaagcctccaagaaatatgggactatgtgaaaagaccaaatctatgtctgactggtgtacctgaaagtgacgaggagaatggaaccaagttggaaaacactgttcaggatattatccaggagaacttccccaacatagcgagtcaggccaacattcaaattctggaaatacaaagaatgccacaaagatactccttgagaagagcaactccaagacacataattgtcagattcaccaaagttgaaatgaaggaaaaactgtaaagggcagccagagagaaaggtcagtttgcccacaaagagaagcccatcagactaatagcagatccctgagcatcaagcattttaaaatacttttctggcatgtggtcccatcaaccttaaatatgtttactgtgtatttaaacaaaggtattctcctgtgtaacctccctacagtcatcaaaatgggaaaattattactgatgcactggtgtcactgaatcaagagacctcgttcaggatttcccattgtctcagtaatgcccatagagctagagattcaggccagcgctgcacgttgcattttgaaccaccatgcccttgactctccttcagtatggaccagttctgcagtcttcttttgacttttctgaccttgacatctttgaagatacaggccagttattttgtacaataaaaataactttgatttcttcacaactaagaagtcttcctactcttgagtttttattctaaagtaataaaatttactagaaatttaaaaggactaaaactactggaaatgaatcattatggcaataattataaatcaccgtttctctaaaattaattaatttttgtttttctgagaaatttgtaaacttatatgcatttcagctgcaactgcctctcacattcaagtttaaaaccttggctatcttatggtattgaaattaaatactgctgagagaaattgtatttgttgtaaattaccacagtttcagcttactgcacagatatctattaaagaacatattttgtgagttgctcttcttaaagacagcagaataattaaagcctgtggaccaagtaatgaaggataaagtataagcctccattttgtcattatgcatgctgaaaatgtgctgagaagggtgtaattttacaaatgtttttacataccaatgagattcagaattagggattcattcacttctgtatcttggacagaagtcactctcattatgggatgaggaatactggcgccttttcactgaggttttccccttgctgctgccctgttttccaggtgtcccagctgtatttcagctcctcagggaagctgtgttcctcgctgcctcctcacctcttctcctgtgtggagagagcctttcaccagctcttccgggaacagcggcctcagtgtttcatcctcaggtgagtcctcctcaaccttgtctgccaggctcaggtttgccacggggcttggcagtaaagatgtactcatttcctatggtttacctttatttactttctcagcaccttgaggtccagtatatctttgcaataagtacatttgactcgttacaaaggagaaacatcttggctgttaggagtagccccaagtgtagctggatcaatattaataaacttaacctgaaactcatttccttttgaagatttaaagcttagataaaaagtttttgcttttgaacctaagaaaacatggagaaagaaaaactaccaatattacggaacctaagccactgttcttcaaaatccagggctgccccaaatatcattttatttctttccaaaggtatgttttctcagcctgtttcttgttatttacctttgctcacaattcactgtactctacttcctaaactttttttttttttttgagacagggtcttgctctgtcacccaggctggaatttagtggcatgatcaccagtcactgcagccaaggctcaagtgatcctcccacctcagcctcccaagtagctgggactacaggcacatgccaccacacttggctaattttttaatttttgtagagatgagatctcactatattgcccaggctggtctcaaactcctgggctcaagcgatcctcttgtcacagcctctcaaagtgctgggattacagacatgggccactgcatttggcccagaatattttttgaatttgaaatgtaatgctagatttaactcaccaattaatagaaaattaaagaaacatttaaatgttaaaatctgcatcagagacctatattttatattcagccaaacctctacaagggagggaaagctctataaatactcactcacggtagcgccttagttgttgtcagtagtgctggttggaactcaacggataagtacagtagcacacaactcgagtcaaagtgaaatgaaaatggtataaagttagaacctggatagaattcaaaaggcttatttaaatattaaaatgagagcttatatgtttatatgcatttcatcaaaaattctatggagggtggagggacagactgatgggcgcacactttagttttctagttttcaaagcagcatgctagcggttgttttcgtgctgggttcagatgcatcccaaggatgaggaaggtgctgaggcaggggcttcgacacattctaaactctaggataagaaaggcactgaggcatgggattccacccattctagactcaaaaatgagaaaggcgctgaggcagggaattccacccattgtagactcaaggatgagaaaagcactgaggcaggggcttctgcccattctaggctcaaggatgagaaagacgccgagacaggggctctcacccattctagacacaaggatgagaagggcgtcaaggtgggggctccaacccattctagacacaaggatgagaaaggcaccgaggcaggggcttccacccattctaaactcaatgatgagaaaggctctgagacacgggctctcacccattctagacacaaggatgagaaaggcactgaggcgggggctccaacccattctaaactcaaggatgagaaaggcgctgagacaggggctctcacccattctagacatgaggatgagaaaggctctgagacaggggctctcatccattctagacacaaggatgagaaaggcactgagacaggggctctcacccattctagacacgagggtgataaagatgctgagacaggggctctcatccattctaaactcaaaggaagagaaagacgctgagacgggctctcaccaattctagacacgaggatgagaaaggcactgaggtgggggctccaacccattctagactcaaggatgagaaaggcaccaaggcaggggcttccacccattctttcttttgatacggagtttcgttcttgttgcccaggctggagtgcaatggcacaatctcagctcaccgctacctctgcctcctgggttcaagtgattctcctgcttcagcctcctgagtagctggaattacaggcatgtgccaccacgcccggctaattttgtatttttagtagagtcgggggtgtcaccacgttggtcaggctggtctcgaactcctgagctcaggtgatccacctgcctcggcctgccaaagtgctgggattacaggtgtgagctactgtacctggccactcattctggactcaaggatgagaaaggcgcagagatgggggcttccacccgttctagactcaggcaaccctatttttatctgctttgtctgtccagtttcctggtcttcctttgataaatagggaaaactttttaaaagttgcttagaaaaaacactgtcaattggtgagacagggagagtttaacactgttgacaataacaactaatgtttattgagaatttactggctgccagacccttgactagattatttctatgtattatttatttctttagaatttacataacttttgagtgctcccacttaattctaggatgatcattgcagctgttataggtcagtttttgaaagcgtgggtcctgagcaaggctctaaggggagaaaaggaggagcagcaggcccatgcgctttgggagtccgcccgggagatggcacacagcggccagcaagttttcttatgaagaaccccgtttatcttagtttaacccaacagttttgacaggtatttgctcatggaactttttatccagtatatattctgcagaactagttttgctttgggtctttttttttttgatatggagtcttgagtctcgctctgtcgcccaggctggagtgcagtggcgcgatctgggctcactgcaagctccgcctcccgggttgacgtcattctcctgcctcagcctcccgaatagctgggactacaggcgcccgccatcacgcccggctaattttttgtatttttagtagagacgaggtttcaccgtgttagccaggatggtctcgatctcctgaccttgtgatccgcccaccacagcctctcaaagtgctgggattacaggcgtgagccaccgcgcccggccctcctttgggtcattttttaaagttaatgattccctgtaccaaccccttattttgaaaaaatacctcttcattcaagtttcaagaaggtgttgatgcaggattttgctccttagctcggctacgtccaggttcttgcctcacgacctggaaaaatgaggcgtgcggacacgagagagtaagtggagtagaatttattatgcgaaagggaagctctcagcagagaggggtcctgaagcagggtgcctggtgcccccttctcagttgaataccaccagagcttagggcgcaaactgctggcggctccaccccccgtccttccagtgcgcatgctgaggccgagctgctccatattgattgatttcccttgctgcacgtgtgctaaggaacggactcttccaccgcaggcttgtttaggcaaagccccctgtgcaagttcccttatcggcacaaaacatctgacgtaagcactcgtggggcgggtcggagcttctcgggggacccttccctgactgtctgcctgaagcaagctggagaactcctttcggtatcgctagtcctgatatacagaatggaagagcaaatctctggttactaggacttactgttttagtgattctctttcttctttcaaaattgtgtgtgctttcatacagctttgccacatccttgattgtgtgggctaagatacatgctttctccatttttacgaatatgataaaattagccatttgaaattcaacttaataagttgttaacggatcattattgagtgtcagttgtgtcccagaacgagcacttacaaagggtaatttaagatttagcaatcaaaacgcaagtagtcctggaatggatgtcccaaaactcagtaccagaccagaaaaaatttcattttgttttctaatattaacttaatacctcatttgttgatactcttaggccccagtagttcaaaagtctgcacaagtgagtggaagcatccattaacgactcgacactttaaacaaataattaaatttcaacttacttcttttctggcaaacactgttaattaactttgttaaaatagatgtttccaggcagaaaaccaaggaagctctcctaaaagggctttaaaaagtttttctggttaccaaataagtaaaggctgtttttatgaatttttcatctggatgaagtaataactttattgtagatcacatcactttgaaataataattattttgtgggaattttatgtcaatcctatatcatatagtgtcaggaatataatatttaccatttttaaaaattgggtgagttaatgaagtatgcctgggatgtattaaaagtgatgcccttataaataaaagttcagtgatctttcctagattaaagaaaaatgcaaactagagaacatcagaactgaaagcaagcggaaaaggaaacctaagcaggtcaggtttagtaggatctgcggaatgacagatccacatctgaagaccttactgccttagtttttgtagctaggcactttatgttcatttcaaagaacagagaaggaatgctcagaaagatgtcacagcttttccacagaagaggtaacgtctctcctgtaaggcccatgaagcatgaacagttttcccaaggccatgtgtgagcctgcatgtctcaacacagcatgctgtctcgggatcgcctcactttatgttgacttgctaagctgagtcaagttggttatgtcttcttctcagcctgacacctttctggcataattcacctacactaggtggttctaccctgtgagatactgaatggcagaacttgtgtcatattcatttgtaatgccagcatctgaaacaccatcagggacatgacacagtcaacatatactgggtatttcagacaaatgaatcaaattgaagtgtgaacggagaccacaaactcattgcaagtagatgtgccattccctcctcatttctgtgtctgagaaatatctccagttaatttttttacttgttccttcaaagtagtttcaaaggaacaaaggaacaagctttgaagcaaagttccttcaaacttatgtttttcctctctgttttccttagtggagaaaggggatcaggaaagtctgaagccagcaaacaaatcataagacacctcacctgcagggctggcgccagcagggccacactggattccagattcaaacatgtaagttttttgtttgggttggcaaatatgtgaatgaagatgttcagccagttgtcatttacaaataggggaggggacatcataatagatacaagggggttcaaaatttgtggaaataaagaataaaaaattattgagcttgggttcaaataaatactgttcgagtgaacatttatttattttacatatttaaaatattttgtacatactttctttttgtatttgctccgaatagttggatctaaaacacgtaatataggtagatgttgttgttcacaaagaaagtgcactttgaggctgagcgcaggggctcacgactataatcccagcactctgggaggccgaggcatgtgaatcacctgaggtcaggagttcgagatcggcctggccaacattgtgaaacctcgtctctactaaaaatacaaaaattagccaggagtggtggctggtgcctgtaatcccagctactcaggaggctgaggcaggagaattgcttgaagccgggaggcagaggttgcggtgagctgagatcatgctgttgcattccagctggacaagagcaaaactctgtctcaaaaaaaaaaagaaaagaaaaagaaagtgcactttggtgtgttaggacattttggggagctggccagaaaagaaattattgtgagggatcactggggcctgataataaatctttggtgtatctgaaagaattggcaatagttatccttaaagacttcgatgggcaggccatgcacctttggggccaaaacagattttaaactatttggaaacatttgcagtgttaactgtcccgctaattcatcattctaaaatatgaccgtgattcaaggaggaagcaaaaagacctgttagcagctaagataaagctaaaaacatcccacataatcaaactcagaaattttactcaaggaggccaccacaggtgcttatccatagactgattctgttgtttatacatagttctagcaagttttgttaaaaggtttgttcagaccatagcagatcagaagaagacattgaaaggccactggaaggaatggctaacagtggggggaacagacaggacaggaaccaataaccaatccaaaagaatggaaatcaacagtctgctctctaggggcctctacctagagatggaaccctctccatttctatatttcttttggaaatcactccagatgcctggaagttcatgatgattttcctaaggttgaaataaaatattattttagaggatactccacccttgcttatgctgatgatcatgactcagtgccatgggtacaccagcagctctggatcctaatctccatactgcctctcattcttaagatgcagacctgcctgtccaacgaatttcctggacatgccacagtgtactgcaaacacgtggccaaaattgaagtctttcttttttattttcacttatttatttactattattgttatttatttttgagacagggtcttgctctgtcacacaggctggagtacagtgatacgatcaccattcaccgcagcctcaacttcctgggctcaagtgatcctcccacctcatccttccaagtagctgggaccacaggcatgtgtctctgcctagctaatttttgtatttttttttttttttttttttgtggagactgggtctcctgtgtttcccaagctggtctcgaactcctgggctcaagtgatccacctgcctcagcctcccaaagtgctaggattacaggcgtgaaccactgcatcgtactaagtttctctatttccaacacattctgaatatcctattactcctagctctttagtctgtccagtttccttcaggtccacagtcattgctgctgtggagtcatcttctcacatggcattatctttgagactgttctaagttgctctctttctttttccatccttggccatcctccagtgcatgtccctgtggcaggccgtggttgatagctctgctccccagggtcaggtagggcccaggccctgtcgctccccagacactttctcacctgctcagaggaagggagcagcaaaccccagtccaggcagaaggctcatcatatgcagaggggctacctgtcttctcatcacagttatgggcttgaacttagtcatgctgctatctagttcggactcattgataactaggcagccatgtattcaacttcaactagtaaatggaagaagaggagagttgatgctggtgaactgccatcagcctgtatcaccagagactcctttgctcaaagcccttgagtgagtctctgttccctttacatcaagtccaataaatcagcatggcctggcattctttctggcaatgttacatttgttgtggtttttattttcttctctgatcttagaacactatatccccttcctcttactctctgctgaagccacctttgagcatgtatctctctcagcctggcccgtgcagtctcattcatttgctttctcactccacaagcatctattaacaaagggctacccagtgcctgtccctggaattcagagctgctgtcccaacagcatggtaggagctcagtttctatgtggggaataaatgaatatactaaaataagtatcgtgaccgtataggagaaacatttcattacccccagtttcctaagttaagttccttagttaactttacattatcaaatacatttaatgtggacaacccatttgtatgtcatcaggaggctgtacatttggcctgtgtgtgtttccttatatgtgatttatagaactaacattgacattttcttcaatttgtcttacctgccctgcttttgttagatagtgggatttttctacctctcttcctttttatacaaccttttgtttttcattccagtgtagggaagacacatttgttaaaaaatgtcttatctcgcaggtcaagagaccactaaatgcatatatggaaaatcgtgttcaattccacatatacactaacagaacataagattttctatagataaatcaatattctatgtgtaacattcaagaaataatgtacatatgtgctatatcattgccttgacaaaaaataatgcatgtacacatcataggccatgttacaatagtataaaactttctattggcactgatttcaaagtgcgatattgctgcagtgtgaaatttccacggaggtgcctctgatgctgacatgtgtctggccgtacacacatttacagaaagatgcctgcatttcagtcataattttatatttaaaagtgtctgattatattcatgcaagacagctgcacttatatcgtttcctaaatcaatgccatctaaaggttcaaaagttaaaaatacggaaatatactgcacaatgaatattgtgctatttgtgtttgtttctgtggcacctgcttttttatctggctgctacagtttagagtgatttctaccatggtggcggttagttggcatgttctttaaatttatagtatctgattccttatttagaaatgagaataactgatttttaattaataaattagtattattttgcatattttatacttgtgaattataagtaattttaaaatttattcttctctaatagatccccaagcttatgtctgattctgtagacttttctctttaaaaagaatgcataattagttttttgaatatctgtggtatcatgtgtgttcattaatgactttaatttataaccatttattaagctcataccatattgagcacctgcataattctacaacaagctcaaaataattttttttttgaaatggagtcttgctctgtcacccaggctggagtatagtggcacaatctttgctcactccatttcccaggttcaagcaattctcctgcctcagcctcccaagcagctgggattacaggcgtgtgccaccacacctgcctaatttttgtagtttttagtagagatggggttgcaccatgttggccaggctggtcttgaactcctgacctcaagtgatctacccacctcagcctcccaaagtgctgggattacggacatgagccactgcacctggccggtcaaaataatttaatattgagagtcaatttgggagaatagcataacctatcttctttgttcaaatatgttaatatcctgacaactgacacttaagagttagagtacgtgtaaaacaacatggttataaaatagcctcaagttaactaacggaaataacagaaactgatgacttactcataatgaaaaggaacaatagtttcccctctaaattatatacaatcatctattaaaatgatcatctgggagacagcaggctgtataatttctgtaatgcattctctattaccttatgtaaattggctttaaattttagttcaaacaaatacattctaaagtgcattcctttggatcaggtagatataaccctcccaaatcagttagcatctgggagtccagattataatatcagtgcatatttcaagtaaaactaattctagttaacttgtgtgttttattcactcctcatgacacataaaagattcataaataaatgacttctagtctcatgaaaaaatattgcccaggtttgagcatggcttaaattccatgtcagctgtggttttattgtttccctttagatcattatccacatgaatatcattcagtgtccaagatgttcatgaaaatcatcagtcattatatctgtaaatcatccgagtatatgtacaggaattaaatacaagcattgaatacattttttaatttaccataaatctttataaaattagagggtttagtgaaattaagtatatttaagagatgaaccagtacaataaatcttcacaatgtcattgatgggttcttggaaactgtgactttaagcaaaactatttcctgtctgctgtaagaatttaactcttgtttatattaattagtctgtgataaaattggttgcattagaaggtacgttgttttgcttaaagtagaaatttccaagaacctattgatgatactaagtgagcacttcctatacttcctgaaaggaaaatctgattaaggaaatgagtagaaaagaacatccttgaacagccttgatttatggagctatctagtagaaagtttgagggtcaggataagatgaaaggaaagttcactaggtggccctaagaggagaggacaatgtgctgattagagacacggtttagccatatttggttgtgagactgcattctggaatatcacacaggccatcatggggagtgctggcaggcgggatcaggtgtgtagcaagcacacaaactgtacattccactgagagagcctggttcattctaaaggagacaattttgcctcaaatcctaggaaaatactcattgggggtcatttggatcagcagttgccaaataatgtgtagtaaaagaatgatagagaaagaaaagtcagtgtactagtctgttctcatactgccataaagataccacctgagactaggaaatttattttttaaaaaaaggaggtttaattgactcacagttctgcatggctggggaagcctcaggaaatttacagtcatggcaggaggtgaagaagaaagaagcaaggcacatcttacatgatggcaggagagagagcatgcgcaggggaaactgccagttttaaaccatagatctcatgcgaatgccttcacgatcatgagagcagcatggggaaaactgcccccatgactcaatcaccccccaccgggtctctcctttgacatgtggggattacaattcgactcgagatttgggtggggaaacagagccaaaccatatcagtgaggatgtattggggtggtcttcattgtagtattgtgcagacactgaggagtagagaaactcttcctgtggttgataataatggcatcattgttaaaattaaagattgccatctcagtggagtatgggaagccagagaacccaaaatgaaagggtttgggtggaaactagaagttcacactgtcacaacacacagtactctccctgaaggaggttttgggagaagagagagaaggaggaagattcagttggtaacatctagtaagtgagagagtgcagcattgaggtccagaaatgacttttggtgattatatgcaggtcaaacacttattcttacgagaagtgactgaaatctttctgtcagtcttacacctcatttggcccatcttaaaagcctgcatgagctcacctgcctttgtcctgggcttcaagtgcactttacccactgggtagatggacggatggaacccgatcaccacagacatggctttgttcccccacaaagtttcagagcagctaagagcagttaggaagggctgttttgtttctaacccctgcatttgaatttcaaacattggaagcagggcattttccatgacattaaatttattggaacagaaaagtcatgtttcaggaagaaactacctggaaccttcaccaactctggtccaaatgaatttcaactttaagaatattcaattccattgaaatcacttaaataagcattcactatgcaatagctttcagagagcagactgatgggttgatatcgattgagttaatattttttatagaggatgccacaagtctttactttcagaaaatacagtagattaactcctaccataatagtccatgacttatatagggacataaatttatagaaaaaataccatacattataaatacaaaaaaaaagtcaataaaatttgaataagtaaatattgaggaaaatatatatatttaattttcttcatttatatttttatttaaattttgttactgtgcaacgttgtcattgttgtttttgaaatcaaggtgagcagcggaataatgccagttttgtttagctcagtatttctcttaatacatttatttagtgccacctatcggccaagtggctaattaaagataaaaaactggttattgcatagtttatttagcattttaatcttgactcatggatgacaacgtacagtgaaagaatgccatggggtatttacattttgttaagtagttgtagttttatattcgtttcatgccttctatgtctttattggtatttcagcagtaattactgcatagtgcagtggttaagtgtgtgattctgaaagccaactcacctgggttcaactcccagcttcattgttgacaacctttgagccttgggaaaactaattggtctatgtccttttttctgtaaagcagtgtaaaatatacactggttccgagagttaacagagaacacacatgcacagacacatcacccgttagaacactgcctggtacatagtgagcaggacgggaacattgtctattgctattcacaaaagtaaaattcactgttgttatttgctgaatgttttctctgtgccagacgtaaagctgagtgctttacacagcggacactgacaaacactgaaggagttattccagcgtgagaattaaggaaaatgaggtttgaggaattcagaggacctcctcagcgttacataatttctcattagcagtgttggggtgtgggggtagctccttctcactcccaggcacatgcatttaaccatttccctatattgactgttaggggaacaagttattaattacctgtaatgtcctttttccaagaataatcaaaacattacttatcagacacaacaccagaataactagaagcaaaatatttttaaagattatcctatttttatgactttaaaaataattgtttaatgtaatattattaatatttaaaatgtgctatcattaccctcttattttcaccgtatgtatataactacatatttcatattagattataggaaaagatacaaaaacgaagagttactaagtactatttcatttttttcccagaaaacattgctatcatcactgctatcaatttacttttatcatctttaaaattagattattatatacagacctaaaccataaagtttttgtaaggaattaatatatgtttgtctccaaaattcaaacttcaaacacagaagttttaacatacttcactattatcacaacttgtagcattttttaatttgtggttagcgtcaaactattttataatctttcacagtataaaatacttccaggttaattcaacaccttaatgtagcagatgccaggaaatttaaaagtgggatcaaagcagccgcgcgtggtggctcatgcctgtaatgccagcactttttgggaggccgaggtgggcggatcacctgaggtcaggagtttgagaccagcctggccaacatggcgaaaccctgtctctactactaaaactacaaaaattggcctggtgtaacggcatgcccttgtaatcccagctactccagaggctgaggcaggagaattgcttgaatccaggaggcagaggttgcagtaagccgagatcacaccactgcagtgagccgagatcacatcactgcactccagcctggatgacagagtgagactctgtctcaaaaaataaaataaaaagtaaattttttaaaaaaagtgggatcaaagcacttaaaaaaaagtaggatagtgttctcaaaaaaacactattagaaacactagggaacaggaaaactagtccgtgtatcaataaggtgttattgtactccctcctgtggctgatgcagaaaccgcatggaacataactatcatgcaagagatacccttgaaccctccagattttcatacattttggagaattgcttggtccccatcaccttcacaggcagagtcaattgatgaagaagcagtggcttttattctactgtgaatgcttaaggaaacatgtcaaggaagaatttcagcccccagggttggcctgaggagctttatcatagcgttgcaaagccacaaacttgccagtctgcaacaaagcacagggcagcgagagaaggcggcatggcagctcagctgggagtttcaccgctgccctgtggaagagaatagttggtgtgaggcaaaagcacggtacagggaggataaatgggggtcagggttgaaaaagagtatgagtggaaagtaaataaggattcaaaggaatgttctatgccaatgtttaaataaatgtattattgtaaaatgaattctgacttttgcctatattaattcagatgactccttcccttccaaaatgcaaacgctattttactgttctattcaggtttgaaatcttgataacatttgttaagcttggggctgtgtgtgtagagaatggctttccttcttttatgtgcaggagagtgcagtgtcgtcaagcaatctgtctattattgcttcatgaacagtagccacaatttgagacataggatgctagtggcttgcctttgaggaaaaaggggtcttaaaaattcaatatagcattctatgagcaggatagaaactttcagaccaagaagtattattcactgcatcgtcgctattactcatcaattttatttcttaaaatatgagcagttcagtaaaatgttctcctctcccacaggtcgtgtgcatcttagaagcctttggacatgccaagaccacacttaatgatttgtccagttgcttcatcaagtattttgaactgcagttctgtgagaggaaacaacagctaaccggaggtaagtgcagtatttgacaacgtggatttcctgtgccgagccagcatgcgaccacgtcacacacaggcacgctatggacacactgtgtatgaatcaatgctgggagagaaaacctattcttcatgaccgtgtctggaaacagcttaagatacttctggaaagtttgtattacattagaacaaggatcaatactcaggcactcagttgagggtgtgtgagtgtgtgtgtgtgtgtgtgtgtgtgtgtgtgtgtgtgtatacatacctaggatgtcaggtgataagtgctgaagttattgtgaattaaaaaatattctcaaatgcaagctgaaccttttcaaaatgattattgtatgggctatataatgagaaaccaaacccagaccaaacgtagctgaattatccttgctgaacatagaaacaaactcaaatactttaattaaataaataataccttagtattatatataatttcttcacataatacacattgaaatctatttgaaataaaactgaatccatatagttaaatgactgaattaaatctaaacatcaaaataattgccaaactaaacccaagcagacactgtttcgtatttgatttaaatacttaaagtatattttataaaaactccttatttaaaattcaactaatttagaattcacctagaattttacatctttccaattaaaacagattattaatgcaaattaataatataaatacaattgtaggtagaattttgatatacttgaagtaatcagatatttttaaaaaacttttacaacagctgtcagcacataaacatttgccaattattataaatgatttctgaaagagtttaattttacttggctttttaaagttaccctattttcccttcaggaaaaaaaaagttagttttgaccataatctagaaacaaaaacattgtattttgcagcaagtctatgtcagaatcagttttctactaataaaatgtgataaataacatgcataaaaacagtatgagcctggtgcagtggctcacgcctgaaatcccagcactttgggaggccgaggcgggtggatttcctgaggtcaggagtttgagaccagcctgactaacatggagaaaccccgtctctactaaaaatacaaaattatccaggtgtggtggcgcatgcctgtaatcccagctacttgggaggctgagacaggagaatcacttgaacccaggaggcggaggttgcagtaagcagatatcacaccattgcactccagcctgggcaacgagagccaaactccatctcaaaaaaaaaaaaagaaagaaagaaaagatgcttttagatgtttagatgttgaagttagaaggttaacttatacaaaaggaaagctattcaatcatttattggttttttaaacccatggcttagagttctgaaggtctgccattttatgaagacctcatcggagaactgtcgtgagcctcaagctctggttttcaagtctcagtttcctaacacctggctgggtgtgctcctccaagggaaggggccggatttacttctgtaatactgagcacagttttccccctgagctctcagtgactggtgggctgtggcgatgttctctaagtggatagaagttctccaaaagtaggaagctgaaacattgaaagctccgtgttccagccccttgccactcaaatgtgtggcccaaggatgagcactgcgtcatcacttgggagtttgttatagatgcagaatctgaggccatactccagactggctgatggagactgcagtttaacaagattccaggtgattcatgggacgtgagtgtctgagagctctgagagctgaaagcaggccattcgtgtttatgcacaactagtgcaaggaggagaagctcatctggggtgtcaccagcatgactttttcttctcaatttcatgtttcctttagcaagagggagagaaaataactggcttctgaaggtgtcatccattactaacattttttttcctcttttttatttttctggatagagtttagagggtccttttctttaggaatgttgatttagaaaataattatgtacacatattaaaaagaactagaaaactttgttgtaaacactgattaactgagccttctgttaatcaacaatctctatgaacacttggtccctcacatctttagcataattagccccacatatacctctcaggcagcttgtccaggcagcattgagacccagaggtgatacatattcataatgatgggcctggagcagttcaatgttgcaggaagtcagggaccccgaacggagggaccagctgaagccatggtggaagaacataaattgtgaagatttcatggacatttattagttccccaaattaatacttttataatttcttacgcctgtctttactgcagtctctgaacataaattgtgaagatttcatggacacttatcacttccccaatcaatacccttgtgatttcctatgcctgtctttactttaacctcttaatccctacatcttcgaggaggatgtaggttgcctcaggaccctgtgatggttgcgttaactgtacgaattgtttgtagagcatgtgtgtttgaacaatatgaaatctgggcaccttgaaaaaagaacaggataacagcaatgttcagggaacaagagagataaccttaaactctgactgccagtgagccaggtggagccatatttctcttctttcaaaagcaaatgggagaaatatcgctgaattctttttctcagcaaggaacatccctgagaaagagaatgtgtccctgaggggaggcctctgaaatggccgctttggggatggctgtcttttacggttgtagcagagggatgaaataagccccggtctcccacagcactcccaggcttattaggacgaggaaattcccgcctaataaattttggtcagaccggttgtctgctctcaaaccctgtttcctgataagatgttatcaatgacaatgggtgcccaaaacttcattagcaattttaatttcgccccagtcctgtggtcctgtgatctcgccctgcctccatttaccttgtgatattttattaccttgtgaaacatgtgatttctgtgacccacaccctatttgtacactccctccccttttgaaaatcactaataaaaacttgctggttttacggctcagggggcatcacagaacctgctgacatgtgatgtctcccccagacacccagctttaaattttctctcttttgtactctgtccctttatttctcagaccggccgactcttagggaaattagaaaagaacctacgtgaaatatcgggggtgaatttcacctgatagttcaaggcccagaaaagttctctgaatcattaaggaactgtgaccgtaaattcaatataatttcagacttgcgtagggtttatttttctcttatggaaatggcaatcagggcatctatgacaggcatgctccacctttctccactttccgtatggcctttctactcattttgttcccctaattaacatccttaatttagttcttatcacttgtatttgtttgtttcatagcttcctgctgtgttcttttaaaactctggccaaatgatttggtgatcgttttttatgttttttatttaagagtaataaactgctataaaacaaagtaacaaagctagtgctgagattgcattcgtagaagtctaccacctagatcataaacgtggtaggacccacagtgccctgaaggggtgagactgggaatcagttgtttcctggttttaagaagagaaataaaaggaatatgttcagaaaatgtttatcaggagagtgaaagttccaatgtcatgtttttggagtaaagtgttgacaaaactaaaaatatttacactgaaaaagaaataactcaagagaaataggacaaatttgttcaagtatcccttaccacgtggaaagggtgttgagtacaaaggtatattatgcgtactataaagagcaggtcgatgtttccgagaaggaacatcttcactcagtcatcagaagctgccatggaacatcctcacgtctgccacgcactctctcatgccaacgctggctgtgtctaagcaagaggaaggggcagacaccagctggaccagataattttacagatgctgcctagtgctcaacattgtttaagtccaaaaatgaaagcactcttttagctgtggatctgatgttcccatgtctcccagagtagcttaatagcatgtacttgtctcctgtgcctgttagcatagactgaacggggttgatattagaatgtgttagattatgtcagtgttcaaaagctgcagtagcaaatgaacaccagtgtggtggctggaaacaacataaattaattgtctcacagttctggaggttagaagtctggaattcaggtgtctgtagacgcacgagctcttgacctctctggggggacctcccctgcccattcctagctctgatggttgctgctgatctttagtgttccttggcttggagatgcattgctccagtctctgcctctattgactcatgaccttctccctgtgcctcttctcttctccaaaggacactggtcacattggattaggacacaccctactccagtatgaccttattgtaacttgagtacagtagtttcaccctaaactaaggttttgctttctatggtttcagttaccggagttcaactgtggtccaaaaattttaaatagaaaattctcaaaacaaacagttcataagttttcaattgcatgttattctgagtaacgtgatgaaatctcctgccctctggctccatccagcctggaaagtgaatcacccctttgttcagtgtatccacgatgtctccgctacccacctgttaatcacttagaagctctctcagttatcagatggtgccagtttcctggcttgtgttcaagtaactcttattttacttaataatggcctcagcttccttttaatgaaaaggtgaaagttctcaacttaataaggaaagaaaacaaattgtatgctgaggttgctaagatccatggtaggaaacaatctcctacccctggaattgcgaacagcatattgttataattattctgttgcattattagttgctgtgttaatttcttgctgtgcctaatttataaattaaattttatcatagatgtgtatgtataggaaaaacatcatgtatacagggtttggtactatcctcagttttcaggggtccactggggatcttagaatgtatccactgaaggtaaagggtgactactgtatctctgtattgatgctattcccaaagaaggttacattccaaggtattgaggatgaagacttcaatatgtatatgtattttttgtagggcaaaatccatcctgcaacaaagagtaacagagatctattgtatgaatttttactttaaaatgattttcagtttaagaatgaaatcatcactgctcaaaaaaataggcactgaacactttaagaagctatcagtaaatacttttgttatacgttagtgatacttttaaataattccatctgctgccaagactcttatgaaagaaaaatgaaaaaacacattaactttaactacttaacatacattttaaagagagctgagtcatttaagtcagtcccctgtaaaagcattctgaattgtaaatgttcactaaaatagttaatcaaattggagtgaggctgctctatctcaaaccaggtcaaataagtgttgattacagattgagtttatactttatggtggattgtttttctttaaattatcagcatttaggaaatagttgttaccattttattggacagggagtatcatcatactaatttgaaggttgataggtgctgttactttcattgttactattagttacacttttataatttaatgtcaatctttcatcagcaatgtaaccacagatcatagtataaaaaataccaggctcagctttatgaaacatgagctgtatataagtaaggactttcttgtttgggggaaaatgtaatttataaatagcattctagtctggcttctagtccagtattttccctgatctgattatttattttagaatataattatttaggttcactggtgcaagtgccactctccctcaggattgagtgacttataaaacatcgtactatcatcacacagacaagtttataaaaagttactgtataagtaaaaggaaaactttgccaacaatgacttagttttagccatacagtaccttttatttgagactcgaggtaatttgctaatacattgcctgaatccctacaaatttgtatttttcatctgagcatgcaaagaggtttacattgtgtgacatacaagtcagtttatgatattaatggcatattcatgtatgttttccaaaaagttttggtcctgaaaatatgtgtttacagattatatgtaacataacatgcaataaagtattttgtagggctatacggtttttgttcattatgaaaaaaagtggggaaataaactttcttctccttcaagaaaaaaaaagttcctgcccttgtctttcccattgacttccagaaacttccaacacccactctcatcctgttgcatccatccccttatggatacatgaccacttagggcctgttcctggaaagggaatgacaattctttctcttctacacaagatcgttccttgtcttttaagggtactataaagttttcattcactttagagtgtacgcagttttttatatagtacacaaaactgtctcaccaaacatacgcagataaagtaaaataatatactgtcttcattcttatcaaataatcactttatttttttcgatcttcaaaaatatgtgatagcaagatttttaattagctctttctttttctaatttactcgcaagtcacctgttttctgggagcaacaaatcaagttgtaaaaccatcttcatacagggtagctgggcacatggaaaagggccttctagatcgaactgcaggttggccatcggtttgtaaactcaggtgaataggtgaatgtcactgattctctttaccctgttataaaactaggggaccagactccatggtctcctgtgttcctttcagctgcttttcaggtaattggaaataaaccacttttgaagttgactatttctagtatcatgatggagctattaatggtttaatcgggctgcctctgcaaaggagccagtgctaataaagggttgccaagaacactggcctcggtgcatcttcatgaatcttatttggctgagggggattgtgaaaagagcataggaccagccatgtcccaaatctcacttagcagctagatattcaaaatggagtcattctgtttatccaaggtaaatcttagctattgaccagataagttctcagacaagaaaatgatctcctcttctggaatattgattattgaagagaattctgttcaccaaaaacaggttgaaggacttttagaaggtcaccaggaaatacagtattttatggtctcatatggctactgtgggttaggggatggtttcttttgatgatattgtttccttttcttacactttcctcaggagcttacttttcttaaactttcctcaagagcttacttgtaaaggactggaagacatagagagtccataaggccatgcttttaactgcacccagaatgtgcagagggccaaattcatcaccatcagcaagcattcggcaagctcaaaaggcagatatttgcttgactcgaagctctgatttccctctgtagtccttacgagccacaaggcctggggttgagtcctggctcatttactttgtgcccgctggccttgggcagctcactggatcttccatgcctcattttcttcttctgtccaagggggataaccatcaccccaaactcttagcgttcccatgaatattcagtatgttaacattgctctttaaatcactcactgttttctttttctttcacttttatttcaagtcttaggttctcccattcccagaaataagtgggaggaactcaaaagggagggatgtccagagtccccctgaggaatgtcgagaatacttgccttttgatgtttgtgccctgaaggtatccaagggtatttaagttgaaattgaaatttactaacaataaaaaatatcttccagtaaatatagccaggctatgtgttctatttaggaaatttaaaccttaaaattactgcaaatgaaatggaaaatatattaaggcctttgctttgtgtttttttccccaaatcctgatgttaaataaactagaggtgtaataacagatgaataatcatctttgttaccatcatcaattagtcttagaattatatacttagcaggacattcttttaaaagttttgaaatgctttagttgatcttatgtgaagagcagcatcctttattgcaaacagcctgggcttaggagacaagacagttgggcttaaatgtgaaaaggcctgcaacagaatttaaatgaggcaatgttagaaggacactagaatagtgtatggtacacggtaggtgctttaagtggtagcatcttcctcttggagtccagaggggccttgggacacttgcgtcttttcttcttcatgttactgataggaaaaatgaagcccagagggctgcagggattggcagcatcagactccagagtaggatccgtcatttgactcctgtgggaggcactttcacttaggttataccaccaaagtgatgaccaccttgatcatgaataatgagatggaaagaaatgcatagttgtgaaagagaaaatatttggctatccgaattcgttgatagtatgtttttggtgcttgctaattgaaggcatgacaatactttctggaaacaggccctaagtggtcgtgtacccataactagatgggtgagacatggtgagagtgggtgttggaaatttctggaagtcaatgggaagaacaaaggcaggaatttttctttcttgaaagagcaaagtttatttccaccactttttttttatataatgaacaaaagctgtatagccctatgaaatactttattgcattttatgttacatgtaatctgcaaacatatatatttttcaacaccaaaactttttggaacgcatatatgaatatatggacacttgtagagaattataagcatgtttctagtcaaaagtatttctgacataaaagagcttttaaaacatacaagtcttgagaagtcaggagctcagttagtagaatgtttctttttatgtatgaacacttacatgaatgcgtcctgaaacctttttaacttagaagcccatcatactccttccatttttaccgtttcacttcagacacaacagaaagatctgcatttctccatttgaaagaatattagagtttcatggcaatttgaattttgggctgtcttgtgtttgcttccatctaaaagctcactcaagatgtatacatattttgaaaccctgctgatcagaattccactaatccacagcaattttattcactgctggagatgagctaaccaggttgattaataattacactgtttttgaatttagatgaaatgtattgaagtgactccatgatgtggaatttgattagttttgaatactgcttcaatcagggcttgcatattggctgggatagatgggggttagccaaccatttctccaagaacaagatgactattcattctcccttctcatctgatatttcatgcctaaaggctagaaaaaatggaagataatttcatttaaaatgtctttaggtttttaaaaaatatcctcttaagtagtaaattaattcaagatgaatattattaatattaaacagaaaatgttttcagcaaagaatttaagggggaaaaaagaaaaaaatatttaaaacttaacttgaaattgccacctaattgattctcatagagacctgtgcacacacattcaagcacacatgctcatccactgaggtttactgctaattcagggctccacaccacccccattctaattttaccatcacctttgggctttactgtcaccaatgaaaggaatattttgaaagaccttttctttatgcactcctggcaacttttcccaaagttgtctctttatacaacttttcttactaagggatattaattttgaaatttttaaaaactgtgatatctgattagctaaattgaccacttactaaatgcattggaaggcattgtaaatagtggttctagttgttagaacagatttgctgtagacaattaaattgggagacatcacatttttgcttttagtgctggactttagaataattcttagcaaattcattacatgagtttttttaaagttcaaatgtatgagataattataaccatttatttgcctttctaagaactgccattctttaacacccctcacccaaataatattgacaatggattcttacttcaaagaggaaaactgtaataattcacatttgcatttaaaattgaaatgcaggtctggcgtgatggctcacccctgtaatcctggcactttgggaggccgaggtgggcagatcacttgaggttaggagttcaataccagcctggccaatatggcaaaagcctgtctctactaaaaatacaaaaattagctggtgtggtgacacacacctgtggtcccagctactgaggaggctgaggcaggagaatcacttgaaccggagaggcagaggttacagtgagccaagatcgtgccactgcactccagcctgggcaatagagtgagactgtgtctcaaaaaaaataaaataaaataaataaataaataaataaataaaaatataattgaaatacataatctgattattcataatgataaaaataaacctatattaatatttcaaatgctccagaaacaatgaaattttcagcatgccaaacatacagtcataattttgaccaacgctagcttctgaattgctgatcttcatatgtaaagcaaaattgaggctgtgattaccatattgcatctttttggcgttgttgatcaactactatcaaataaatttcaacaccttgtatttatgcattgggttatattttattttattttgtaaagttttgaaaacagaggactaaataaacatcagctagtagtcctattaccgcacatgtgtggtgagaataaaagaagatgactacacactgttcacactggacatgtgttacttaatagacacctcatctacctcatcctcaaatacattatgtgtattaaactatatctgtgtgaattcaaattgcattttcctttgctgcagtgggtttcctccagtgtttctggcagtgagggaccatggtctgtctccctgggccttcatagtgcagccatatataattctgatctagttgctgggaatgcttatcagtgcctttagtggggcactttttgaacagtgtaagttaatatccatcataccaacatggccgggactctcaaacagtgggatattaatgaggaaaattccaaagcttatttcaaagcctttgttacagacaagagcaaatcttgtttcaaattacatttgtgcaccaagttctttgttggatatgggacaaggaaggatgtccccttaaaccatgtcttttcagcatcgtattgaaagtcctagctaatgcaaaaagacaataaaataaaatgtaaatagatgggaaagggagaactcaacagtccttgtatctcttgtaattaattaatatgtgttaatttatggaaatgaaatgaatactgccatttaacagaatcacttttcttttcccaaccagccagaatttatacatatttgctagagaaatccagacttgtttcacaacctcttggccagagcaattttctcattttctacttgttgatggatgggttatctgctgaagaaaaatatggacttcatcttaataatttatgtgcacaccggtgagtgactaagtattttgtatctaaaagctatgccttcaaattgtgattgcaatttggtagtcttaaattatcttcttacttttcagagacaaaatggtgagtaaaagataactgttggatactgttaggttgaaaccatccacataacaaggttcccactgtttcttgaatgggtgaagttgtatgtgtgtgaacaaacttatattttactagttttcagatcagaaaaaacttgtgcagatataaactcctatactccttttaagtattttggctataacatgagttatgcactcctaatccatggccctgttttgagataatgggcaatgttatttgagtaagtatgattattcattggtgttggatgaaggtacatcatggattaagatgcacagcacacataacctcaggggctgatttcctttaatggaggcagaaagcacttgtgttaaaattaggatgccttggtcataggagaatgatgggagtgacaggctgtatagacagtgagtgaagaatgtattctcaatgtttgcacttctgctaactgcctggtttagtgtgtctctgccacagggatgggtccagatttgcattaggatgagaacaagaaacaatatgggaaatgaatcctgttctgaagagaagttggtgggaaaagagcacaagagagaattggattctgatccaaactcaattcagtggcggtggggggcggtggtgggaactagactctgaggacatgtggattgacttcagatacctgctgatacctgatttatggcttattgggtgtttattattagatctaggggaacagtgtgagtttgcacaattttaggagaacttttgtgagaaaaaggatgctataggagaaaacacacacacacacacacacacacacacacacagagagagagaagggttgcttcactcaccttcatgtagtcaagacagtggttaaggccaagtgcttattgagagaacaaattggcggggggcaacttccccagcaagccctcctcttgagtacacacataggctgctttaagcctgcaaaaaaatatctccagttctctctgctttgctgtgctatttccccatctgaagccattatattctggttggggagatattaataaacaggttggtaatagttgaggtgatatgatgaaaaataaatgagggttggggaacagaggagcaggtgggtgtcctgcttttagatacgttaatcgagagcctcctaccaggtagtacctgtggtagagacaccagagagggccgttcacagatctgatgtggtgtccaagggagatggaagtgtacaaggggcctgaggaaacatactcaatgtttgagggacaacatgaaggccaggatctcagattagagttgtatgggaaagagggagggtaatagagacaacatgaaaagaacagccatggtcagaaatttagatttccttcagagttgtctggaagtgattgggggttttgagtatgcaagagaattggttttcacttcgaaggtgatttgcatctgtggagatgtccctatggtattcccagctggaaccagagagctaaattcctggtatggtagtggggaggtggtgttagcactcatggtaatggtggtgcaggcgatgaggaatgggaaaacatgggttatgctctgaaggtaggaaggtcaggattgaaggatgcactgaacaagggatatgaggtaaagagatcaagaatgattcctgtggctgtggcctgagcaacacatggtgttattgtgccatttacctcgtgacaaggctaggagggaaccagggtgctggggaggagaagagtggccagagaaccagtcctgctggttttaagacagcaaggtggagatgcaggagtgtcagcagggtactggagagaggagggactttccagtgtgatggagccaatgtgaggctgaactcctagaactgcttggagaaattacaggacaacctctgtcccgccactgctgtgaggggtgagtgatagtgcaggtgggctcagaggaagagaatgaattggcctaatttacaatcacattactaattattatcattaaatttcagtgaagacatccagggctatggatatggtttgtcatgttgtgtaggtagaaagtagtcaggaagtgtaaaaggccttatcaaaattgtgttttatttacaaagaaagactgttttagggttttctgttcccaaaatacaatagaagtttagaagaaaaagctaatattaaagtatggtaacccaggcaaaagtgatagaaatataaaaattccaagcttctaggacattagaaatattttaaatcaaatccctttatattataaaggaggaaatcaaagccagagacatgaagaagcttgtactcaagtgaataccttttatgcagcagcagtattgacaaaacccaccacctgagattaactttgtgattttctaccttgaacatcgctaattgaacatgttgaccctgggaggaagcacctaactggattctggggattgcatgttgagagatagcctgtgaggaagagaagagttttgggtttctctgctcccaatccttctaacgagcaacagctcaaagcctcaagcagatacgtagcttagagtgcatctgtgtctatgtgtgtgtgtctgtgtgtgtgcacgtgggtatgtgcttggcattgcagacgtatggccactgatgaagaaaaaggaataatgtaacctataatttaaataaacaatttaacttcttgatctgtggtttggatgagtctgttgaagtgtgtgagtgtgtgggagaaaacaaggatttctgtattgagcttcaattctgacattcatttctctttgcaaaaaagagtttggagtcacttaggctatttagaaagtcaaacagtcaggggtgactttatgaggagttccaacaggaaagaacttaggaagatcgtgaataattcagttctcttggacaaagcagttattttattgaaatgtatcataagtatctaatgggtgcaaaacaacattttccatgaaaatattcaccacccaccaccctccagattcatgaatacatcagttggagcatttgtacaatgacaatttcacaggaaaactttaacggtaaagcaagctgtttttcaagttataacatagtatgtatacagtattttttgttgtttatgttatacaggtcttctcacatttataatgttggtggatcttctcacttttgcaatgtcggttgggtttgagaagttcatatttgtttaatgtttaaatttaggttggtatctaatctttatttggtaattatgagtattaagttccatagttttggaaactgtttggcttgttcacaattagaaatgtaaacctgaatttgcgagctttctaacctttcacaaactgatggtcttctgaatcccttccttaaaattggtacccataggtaaaggatattgctatttgtaaaatgctcaataccatatgttaaagcaaactaaatatggctggaggaggactccgtgcttctgtatttgagtccttgtggacgaactataacctagcttaataggcagacaagactgaaaacccaacttaggtgtatgtgcctgtaacaatagctgagtcttggccaatcccagcggccatacttcaaccactgatagactgctgagtgttcagttgttcaaatagagcaaacaccaacctgtaaccaatccagctgtttctatacctcactgccgatttctttatggcacttccctttttttgtctataaatttgttctgaccacgaggcatccctggagtctctctgaatctgctgtgattctgggggctgcctgattctacatatatgtagtatatctactattattaagtagataattatatctactattgttaataattagtgtatttactattgttaatatatgtattatatatactatattatatgtagtatatctactattattaagtagataattatatctactattgttaataattactgtatctactattgttaatatatgtattatatttactatattatatgtagtatatctactattattaagaatggcattattattgtcacatcttcttgtctgatgtttttcaaaataatattgctattcctatgatgtagaataaaccagcctacatgtgaccacatgaacacagcatctctttgctcactcacttatcccacagtgtagcttttagtggaatttggatgaagtacactaagtcctaaagcaaacactacaaaacttacaagccttcttccttcaaattcattctctctcttcttccttcatagcaactcactagatacatgaatcaaaataaaatatacatgcatcagtaactgtgagctaaaggcatattcaatacttatcgtatcttatgtgattagacctccagagagaagaaaacattgctgtaattcccttttttttcttttatttgctctgtcgcccaggctggagtgcagtggtgctatcttggctcactgcaacctctgcctccctggctcaagcgattctcctgtatcggcctcctgaatagctgggattacaggtacatgacaccccatctggctgatttttgtatttttagtagggacggggtttcaccatgttggccaggctggtcttgaactcctgacctcaagtgatccacctgcttcagcctcccaaagtgctgggatcacaagcatgaaccactgcgcccgacctgtaatttggttttatcattaaagctacaaaagtgctgtttagctttgactctgtttttagaactaaaaatgttgaaagtatcacatgaaaatttatggaggtttatttcagcataaaatgaatgtaaaactactttcctgtttgtaacataggaatgatatctagaaacagcagataggacgtgtgcctaactttagaatataagtgatacagatatagacatcacctcctaaggcttagctgcatgaaaacagtatttataacactttgcataagcatcttcctccacagattattaaaacaacaagaaaaaaagtctgtaggtttctatattttgagctgtggcagtaagactgcacggatctggaattccacaagatggcgagctctccataaagtcagacgagaaaaacaaaacaaaacaaaaatccaaaccaagaaattaaaataaaaacagaaaaatgaagaaacacaaacacaaatgcttgttaccaaaagtttctttttcacttacggttcttcctatattgactgcttccccctaaccccctcaccagcagctgtttgttttacaagggctatttcaatttttcttaccctttgtatattatacaaacgttacatttggggaacgaatgtaatttctgcttttgggaattgagatttaatgaaagccagaaatagtcattcattgtttatcttcagcatactttaaatagcttagatgggtttagtcccagaaaagctaggttcctaaatccaaaaagttattctgaatctctttttgtattgattaatggtggaaatgattgtggtgctgcaggataacatttgtgagtaaaggtcaaattttgaatgctaagttgaaaacaagcagtgtttgactcagagcatgtgacctgtttctaacccatgtggccatgaaaggaaaagctgagtcaccgcgcgcttgaacttgtgatcctgctgggagccgtacctgtcacggggaagccacggcaagcagctcccgtgaaggtttggtttctgctaagggcttattatgaacagggaacctaatctgagagtgtcacataatgtttaaaaagaggtaagggaaaacttaaatactatttggaggtgagtcttcataattatgtgctataataagctgtttacttagtaagtagcttgaaggtgctcccaagacaaaagttcaagacaggaggtgctttcaccagattctcacagactccattattaataacctaagtgacagtcacagtcatgatcagcacagttcatggggcacttcccatgtgccaggcactctctgaagtgtttgttcactcactgaatcctcacccgcagctaagcagagggtgcaaggctgtgtctgtattgtatagtgagatgtcacccagtagccaagatctgaatccaggccctgctgaatttatgcctaaattgtctccacaacaatgctgcctacaaaatggcaatactgtctttatctcctcgtgtcactgagattttaaggcaaatgaaagagaaagcacaaagtcaaagtctgcatgtctgtctttattttgcattgctgaagcaaaactaacttacgacgttctagggattgccacctctaatgactataaaaacaaactacgctaggtctttattttaatctagaagatcataaaaattttagaactaacagagcttttgttaccctaggtggacagtgtagccattatatgagtgttagactacctgtgtaagttagcaaggacatttcactttgaaatgagaatgagaggaattgggtcagtggcttccgtcctgccttctgttcttgatgttatatataataaatcagaagccagatatgtcacttgttcaaggatatttagctggaatatttggtaaatgacagaggtggatttcaaactaaggtacgtttggtttcaaatttctgttcattggaacttcttgattggtagtgttagattcccaactctaacacatttaaagaaaaaagaaaaagggggagtgttgagatgagggcgtagctgaagagagcggaggttatgtttgccccaggaatgtgagatgcagaaactcgaatgtgagatgcagaaactcaaatgcggcttctctctgtcacactcatgcacatggcacatgcacgcacgcacacacacacatcagttttactttgtatgtgttttctaacacagaagagaacgtgaccacgtgctgccctaggccccctaacttaagagcaactcgtctctctgccaaaaggccatcttggtggctcagcccaggtcttaggcccatcccgggcccctaagttaaggacagaaggaagaaatacatttggctcctgcgtagggatgggagctatttaacaggaggaaggggaagggagagctgagcactaatgagcaaggagcaacatgaggccctgtgctttcccctgcatggcactccaactacctgaaagactcccagcccggcaggtgaaggtcagaatgcaagtgtcagtaagtctgggtaccagttattcagcactctctattagtaactctggccaaacttatcaccttgatttccagctactcatacaggaccatcaatagtgtagatctattgcatgaagcctatagatgaatattgcaatgtatttccacatgactttgattcgtatggatgttttcaaaaaatattgtatgaggttaagacagcagcatgatctgcctaagccacaatgtcattaaatagttagcataagagaattttggccagaggccctatatttgtggtctgaatatatctcaaaaattcagacttctacattacttttaaatggtcaaatttattatgtgatgacacattgttttggctgctgtgttggttttgttgtcacccttgtgatacttctgaagctaataacagctgtcattgagcacttctcatagattttctctttgtctactcatgataattgtggaagattataattgatttccccgtgttgcagacgaagtgactgagaactgcggttgctttgttaactaaccagcatggggcagagttgatgtttgaacttcaacctgttcgattctcaattatttttgtgaatggttttcaaatgattccatatagtaaaggaatttgcatcacagataaatttaactgcctctgcttcagcaagagaactatttgctaaaatcagcatcttaacccttctcctttctttttcatattttggatgatagtagcataattatgatttttattatgaaaatagaccatcattaagccaaatataaatataccaaatacaacgtcattaagatggtgtattcacataataaacacataaataaacgtgtgcacacaactgcacatgcatataaaattgcgcaagaaactaccttcactaaaattttgagtgtcaggcacaacactcagtaattaattctcacttaattcttctaataactctatgagactgttactaatattgtccctatttgatgaatgaggacactgagtcctagaggttaagtagcagcctgctcaaggtcaggcaaggcaggaggccagagatggtgcccagtggcccatctctcagcagagagggagggcctatctccagcagtcctggccactgactgctaatgctgtttgtccttgaggaggtgacggccagctgtgttgtttagaaacttggtctgatgctatggctcacgcctgtaatcgcagcactttgggaggccgaggcgggcagatcaccagaggtccggagttcgagaccaacctggccaacatggtgaaaccccatctctactaaaaatacaaaaattagccagacttggaggcaggtgcctgcagtcccagctacttgggaggctgaggcaagagaatcgcgggaacctgggaggaggtgggggttgcagtgagccaagatcacaccactgcactccagcctgggcaacaagagcgagactctgtctcagaaaacagaacaaaaaaaaaaaaaaaaacttacactcaaacttatactctgttttgacataaaaacctgaggccaatgtccagatagtcacgatttggggaaaacagctggaaatagactttttctccagatactcaggctcttttcagagttttgtttctggcccttgtacttcctatttgagcgaggccgtcttcccagtcatgtgtataaaaaagaggtgccacgagcattgtggctatcatgtctttttctcctgaggcagggcaggtgctggcatattgccatgcagtcccatggccctggctgggcccttcctgccccaccttccctcactgcacagcatcttaccttggtgcctcttcaatctcaccctttaatctcaggtcagattaacatattttgaatttcaatttaactataaaacctcctaactcaaaaatctttaataaatattgcttttctgtcacatccaatgcagtctgcttgatgacgcaaggcgacagagatggctgggccttggggaatttggcgtgagcgattgtcgttaaccggttctttgacatcttctcctttaggggtggagttggttatcattgaggtgacacagttcttggctgagtaaagatgtttgcttgatgctagatgtgcaagcagtgtatttaccttcagggtataaaagggaaagtccttcttgtgttgagagagagtcaaacactccagcctcacttctgcagtcagtcagttaaatgtcacaaacattctcagggttgttatgagtaaataaaattatgaatttaaggcatgttggtctacgtccttgattgcttacttttaatttcaaattcccaaaagttctgaaaaccaaacattcacgtatgactcatgtgctcataaaaaacatgacccaacctgaacttacttagcaacaaaatctaaacttgattgatgtaagtgtatttataattcttacatatttctctgactgtgaatattcatatggggttctccccaaattaaaatatttgactggggacactgcttcaaacctaccaaggatataaacactacattcacttttttaaaatctggatttcagaacatatttgtcttcagaagtttaggagaaggggctgtgaactgtgtaatccagcttgttgaggactgaaaacatggcagtcattatgtttctcaccaagttaaggacttaccttacgttgaaggaccacgacgcagatgtttgctaaaaatggttgataaacctgcttctgtgtctggacaaggaggctctgaattcgcttccaaaatagacctctgccttttgttccactcctttttttctctttctctttctttctctttctctttctccttccttccttctttccctcccttctttttctttcttttttctttctttctctctttctttccttctctctctctccttccttccttccttctctctctctttctttctttccttccctgtcatctctttctgtctctgtctctctttctttttaaaaacaaaaacagagtttcactattatcacccaggctggaatgcaatggtgccatctcagctcactgcaatctccacctctcaggttcaagcgattctccagcctcagcctcccgagtagctgggattacaggtgcctgccaccacgcccggctaatttttgtattattagtagagacggggtttcaccatgttggccaggctggtctcaaactccttacctctggtgatctgcccaccttggcctcccaaagtgctgagattacaggcgtgagccactatgcccagccatctgtctctgtctctttaacattgtttattccgtataaataagagatatttattttcgtatcttaaataatgaaccatatggagatgtgaaagaggctcagattttagaggacacttgcttgactttgccagtgattgtgatgtggctggtcactggaggtgtggccctcatagaccaatgcagtttgcagagcgtggcccaaatgtctgcttggagaccccactgccatttgagagggacacctgcacagttccacatgtgtgtgtgaacctgtctccttctttccaaaacctgcccatgtggctgtagcaaacagcatcacacactggaccaagcccgtctgcctcaccagtgtagtcactgttcagctgatatagtcggtgtttctttttctctcaacctctcctgccagtctcttcccacctcataggacatcctgccgcttgtaccgggcaaccccaagccaccttgtccaccgggccttcctctgggtctggagtgaccacctctttctgacagacctgctgggtgggttggcctgagctcctaggaacctgggtggatcatggtccatgtcccagtccaaatctactccagcctggccttgtccccttgctgacacagtgaccattggtgaccattcttacacatgatacataaaatgctctcttatcagtgtgttccatatgcactccccatctttgaagtttcctttgtagcttgcaggacatatagtatacatgtggcacagttgaagataaaatgcttttctttgtcctattgatataggacattgcaaaaatcaattgatatacatcaatagctgttagcaaaatcatagcttttaggtgtgtaggcctataaaatcgaatcttccatgactgcagccatttagagagattatatcctcaatacagggtgactgactgtcttttgcaatttgtgagtattcattgataactatgcttgaactgttaaaagcagcaggcttattagttgaaggcacagagtttacttaatccaggatctacatctccctggctggggggtttgggaaaatcatgcaacctctctgtgcttccctttgctcatctgtaggccaggagtagcctcagagtatggttgtgagtgacggagtgagtgcagtggaagcgttggctagtattgtcactattagtgtagaaggctccttcccattggagtcatgtgagaataactgaaataataattgttatgcaaaagttatgatttggagttagaggtttataatacgtggaataagtggggtctggtcttgctcctagcgtacgtctctgcctctgtgcggctctgtccagagctgtgtccaccctctcttgttggacatcaactggggtctggacttggattcatcatgtagctgtgaggaattacgaatttaaatgatttaaaacctaatgatgaaaatcaacccagcattttgaagtgagggtggctgagaatggacaaggagaggaaagaggaggaaagaggactgcagagccctgggaggcctgttgggtggggcagccagaacctggttacatgccagcgcaaggctcagcttctgtgtgtccctcatggcacagggacagagagggccacgctgctgagagagatctttaaaaaggcagcaatcgaacacttctgtaaaactccctctttcacgtcttccctggtacaaaaaaaattccattctcatggcttaaaatgctttgattttctgtaccagctagaggaggaaaaaagagagactttcttcacgtctaaaatccggtgcttatgtaatcagagatggcgaagtcaataagatttggaatgtgcgatttgctgtcatctgtcaaactcttcaggtggagcctatcaggttcaaaccagacatacgtcgtaggagttatgggtggttttggagttgatgacatattgtggatatttaggtagaatcctatgataaaaacaaaatgtgtgtttatgtgtgtgcacaggaatctgaaatgaccttctatgccataataggaattagcactttgaatctaatactttaaatcatgtaattaaaatgacaataaccaacatttgttcagcactgagtttaggagggagactatacgaaaaccttgacatatgttatctccccctatccacagcccagtctagaagcaggttgctccccttgctactcatgaaaaagcaaacacaaagagaggttccatgaacctcccagtcacatgctaggagcgtgagagccacggttttgtttgggcttctcttacgcacttcacaatttgcctttcaaaccctgattcgtaaaaacaggtgaaagattttgtggcggtatttgcaatgacccacaaaaggacaggagcacctagagtaagggccactcacagggaaggagaggcctgagcccctgaagacctgggggctgcgtgtatccatcttgtgccccagtccaaggtgtcactctcgcaagatgcgggatgacctcagaacacggttgaaaacagataggaatgggaaattcagacacaggagagaagggagcaattacaggaacttgtaataaggtgaaggcagtacagctcagtcattgcttttgctagcagttactgacactaggagagttatttcagaggagggggacaggtgaagccagcactgtttggagcagtggagggatccgtccaggcagactggtaagggcagtggggtttcccacacagcaggcgctgcctggacagcgaggaaggagaaaggagagggaacaccagctcgggctggtatggccaacccgctggccagcgcctcactacccacctcggtgtggggccctcgccttcctgctttcactgccccaatgcggccggggtgtttgggtccggagccctcagcctgcagacctctcttccccctctgcttcttagtgtctccttttccttgcagattcaggattctcagaattcaggctgagcacttttggcttttctgtctttggcttgtttgtgtgattctgccacaccgtgacttcatagtaaacctcatcaacaagcatacgtagattttgcattttacatgaattattcttagatcagcattttttcccagccagcatttgcatactgtgattttggaactgacatattggcattgttgtataggccgttacatttcatgttgttaactttttccgttttgacattggtatctttttactattgaactctttgggccatgaagcttcctcataaaatcttagagacagaaaagggtttctgccatcttccaccatcagtttagggccataaagtccaaagatatgttaaaatatgcccagtaatctctatgtttatatacattaaaaattcatttgagtaggatacttggccctatcattttgcccagctggacacaacagaatatgtgcaaagtgtcacgagatattgtagccatgtaaatagtgatgtgatgcagtcatgtgaatgtgtgtcagaccattcttcctgggactccaatctaaacgaagcttccaaaacagcttagagctgagctcctgcttttctgagtcacgggaaagtcattaactgtgcttcccaccttccaactctacagagtatcttcccctttgcaagtacaacctgctgagcaatcatcctaataaggtgctccagggagccaccctcaccccgtgttgtcagaatggtcgatgatgcttgaacttcaataggaagaaatgatcattattcaagtcaggtacttgaatacatgattcctgagtacgaatggaatcgcttagatccagattcagtagaaccatgttcccagacgtaccctgcttactgatttataagtgctgtgttgtttttcattactttagtctctgtattgctagctagggcacttccttgttatacaaaggaagacagtggcagttgcctgtgcacacccacaggggtcttcccagcaacacagcatggcatggcgactcactcctgacgtcacgtcttctgctatcagtcaggctagagggttttgttcagcttaacgtctgttgccgcaccctgacgtattcagtttaaccttttcacgttaattcatagcagcgaataaatgatttctgaattttgttgctctgaatgtgtcatctcttcttaaatatattttggtggctaaaacaaacccgttttcaacataggaaagggccgtacttgtctttctgggaatagaaggtgggagttcatgggcccatgtgttttcctgccactgtgttgttcagaattaagtacacagagtcattttttggattttgctgagcatcatccagaggcacccagagccaagggaagttgaaggtggagtgacttgggtgtccttgattctgaaagggcggcactctctcactggtcccggcatctctctgtgggcatcctttaagatgtttaacttatcttttaaaacaatgaagtcattgtggtgtgtttgctttcaggagtgacaatggggcaattggggcgagtgtcacagagatgaactagagttaaaccgagctccgccactcctcttcctgtgctgctgagcacattgcaggctctctctgaacctcaccttttacttacttgttggtagaggtagtatggatggtcttaaattattgacggtggggccagagataagtaagtataatatgatttataagtgcaagtaattaaatagtggtagtataatattttattgcaaatctttaatggctttgggttgaacattttgactttctcacctaaagaacctggttcccccaccaagtcttccctgtcccagtaaatggcatctccactcacgctaaaatctggaatgttattcttggctctcatccttcctctcacaccagcccatcggcaagtccttctggctctgcctcctgaacatgtaacaaacccgtctacgtctctccatctctctgctgcagtacaggacttcgctcccatcatctcccacctgaaagtcttcaagcctttctgttggactccctgacactgactggcccccatgaaaagtcatgccccactgagtggttcagagtgtgctttctaaagtagaagtctgatcctctcactgaccccttcctgcccccattaaaggcttccagtgtttcccttggacagtagaacagaattcatcctcctcccctgggcccttgcagcctcccttccagtctctgccactgtcaccaggatgccactgcagccaccttgttctgaccgcacaaagactcagagccgcgtgctccatggctcgtcctccagacctccatttggaaacctccttaattttcagatctctactcagacatcctgtgttgacagaggccttcccagaatgaaatacactgacgtgtttcagcgtgtgtactgaccagagaaagggaggtgtctagaagaccagccatccaagaggctgcagaggcgaccaataccaaggagtctgttgcacagagtcgcagtcttcactctttctatctccgattcaaagagtagctattatctattgtatttgaagtacaatgctcctttctgaagatgaaaaaataagagatggtccctgctctaaagttgcttaaagtcaaattgttcaaagtctaagtcatagcatataggcatcaaattgcaatgtgagaaacatccccaacatataactgaagaatctcgggtgcactcaaggaggcatcgtgctcaggcgcaggagaagtgaaaagcaggggtcgggagccagccagagagaaacgaacacacaggactctcccgagggcttcatgaaaaagtcaccaggaacaggagggcgtgagtggaacctgtcatctagagaccagcaggctaacatggaaaaggagaaataggagtgatgttttctcaagcagtttttggagagaagtaagagcagtgccatcgacattcaccaggggtggtggcctcatcccagaaaggctctttccttactggaagaataaatcatcaacagtgaaagcactgatgaagttgatccaattcacaatcaatgctccttttgaatagacggtgttaaacaacatcttttaaaaaaaacataccacagaaataatttattttcagattgcacgtagttctgtttaggctacaggcactgtcaactgtgataaatactaaaatgaatttctagagtcccggtatgggaaaggcccctggcacggtgcatatctcagagtgtagcatgacaacaaggtacacacgtggccctcagtcaagagccatgtcttggatagcatgactcccgagtgaacagaggtgaagccatctgtcaacaactgaagagagagagagagagagagagactgtcccagatgaagatatagcacaggaaaaaacacacttagagaaaatgagtgtgccagccccaaatgccagtgattctcctaagtgagatggtggtaaataatgcattatatttgcattttcggcatttagaatcttttctcctatttgccttcctccacccaacaacaaggatgatctttctaaatgagtgatttttcaacatcccttggcgagtgtcatacctctgaggcctttgacttcctgatgcctctggtataatgggcctggggcatgagccaggcactgggacttgccatccttgattctcacatgccctgctgaggacccctgctgcaggccaattaggtgcagtgggagccacccttctagagcttcccagaacacccaaagacatcccaagatttctggattgattttcaaataaggctttctgacatggaagtatatttatattttacatgatttttgaaatttcatgaaattttctctgagatgagggaggagacatgccacatgctctgcagcgtgtgaaaatgccaagcggacggacagacatggctctgtccttgcgcatgccctggaggtgtggagccctgcacaggaattcaactaacccgagccatcatgacagttccacgaggcaggcgtttcctgccctctccacggataaggaaataaatgcaaggcagagagatctgcactccggagtgcccgaggtcaccgggccaacgcgtgcacctggcctggagcctgagcatgcgctctaggctgcaccatctcgcgccaccacactgatttccaccagttcagtaaaggggccaggaattgcccagcaatggctctgcctgaagcactagggtaaggtttctagaaccttctacccttccatctccagcctgtctccttctttgctctgcgtttcacagtcacatcttccaacagatgccgatgcgcttgccttctggggcttttctcctttctctacaaggagagagggatgggagcagcttccatgaaagagaggaagctgggccacagggagagatgggcagagatgatgggaccagcctggaggtgaggaagtgtgtaccgacgacagaggggcagaaaggccaatgcaagtgccagacgccccatcacgtgtccggtaaatgcaggcgtccattcagctactggcaatatggttacggcactgtgtcattatattacatgatgtagtctattagctagggatctacagcaatgttatatagaatattatatgttatggcataggatgtataattacatataataaaatggtaattaatattcataatgccatgtgttttatctctgaagagcaacatggaattcttgcatttgaataagtcatgtccagtggatgtcaacgtataagcaaagactaacttctgatacacataaagaagtaaatatacaaatgactgaaagagaaaagaatggagtcgtttgttaggtaaaaggagtgtgtgtgaactcctgtgtacatttacaatttatgtcaaggaccacacccaatactataaaataaaaattcatagaaagggaatggacctaaagctgtattttcttttcagcttaaaatgcctaaaagtaaaataatgagcaaagatatgacaggtaagccaatgatagcttcataccaaaatctgtacttttcatatcaaactatatttcagacacgtgcagtacagttattttaaaaatggccatattcaggtcatggattatagcttaataaatttacaaaatcagaaattgtacagggcatattttccctccataatgtaataaaattagaaactaaatacagaagtaaaggtaaacaaagtcactagaaaactaaatgttgataattggtaatgaaaacaaaaggtatagtcacatatacagtgatactaaataaataaaaatgctttgtgcagatctaaaattaactgtaaatgaaatttttaaaaaatcaaattatgtgaataacatagaagaaaccaagactgtttccatcctgaaggagccaaactcaggaagttcctaaacatgaacttttaaatcttcaaagaatacaaaattgtttaaaccattacaaaaattaaagatgaagaaatccatggttccttttccagaaggcagcatatgcacaagtgaaaagctgaagttccaatacatatgtggaaagatgcatattcccacaagtaatgaaggatttggaaattgaaagaataatgaggtaccatttcacaatgaaaacattttcaataataacaaaaagcaggtaatatgaaaatagacacacacactcctaatgagggtttaaattagtacaactaatttgaagaacagtgcacaatatttggtaaagttggaaatgtgcataacacaccatcatacatatgatagttgatcttactccacggagcacacctggcaatatctggagattttttttggctgtcacaactcaggagaggggattctggaacctagtgggtggagtcaaattccagaatctagtgggtggagcacaaggtcctgccttccatgggaggacccgactgcaaagagctatccgacctcacatggcagctgcccagtgtttgagaaatcctggcacagagaaacccacacatgcattaaaaaaaaatgtacttagctattcactgatgtgtctcctgaacatgcaagtaaagggaaaagaaagtaaaccatcataactagggaaatgaataaattaatctgattataattgtggcactttaaaatagtttaaataaatgaacctaagctatatgcatgaataagaatagatctataaacctaaagtcaacaaaaagcaatttgctgaatgatgcatgcactataaataacattttcataattttaaatgcccataatcttatttattttataggtatgtacacatataatgtgaaaacagtttgaatagactgaaagcatattgcaaaattgatcattcttacttcaccaaataaggggataattgtgtatagatggattgttaactttatctgtgaagtttatttgtaaaaagcaaaactgaagtaaatatggctcagtgttgctattttcacactattggagaatgacattggctgtctttatagttctctgtatttttaaattgttctcattatcaattttttaattaaaaaatccagcatatctatgacaccatgaaatgaagagatatatcaataatagatggttatttgacttacaaagatagagacataattaaaacagcagcaaatataatctagcagtccattaaatactcaatgatcaatcataggaaatttaagtcttagtatatattacatccataagtaaaaaaagaaaagtcaattggccatttcaaaaggtgccaaaaggatgataaacgtcacttcccaaatcttattttaaattagaagtaaaaggagtatttcacacacaaaaaaattatgctaagttcccaaggagataccacccttaattgtgaagtaaaccctgtatctttttagcattgatcctcaagttttaatcaacataagaaaagaaatgaaatgaataaaaattaccaagaaagttaagactataaataccactatttgtaaataatatgtttgtccacctagaaaaatcaaatataaataaaccaatgggaaagcatttgctctatactgtattttagtaaagtttgagttataaagtaaacatatgcaaaattgaaaatatcacatatatgtgagccgtaacagtttagattaaatagataaatggaaatagttctttttaagatactgctgaagtataaaatatctgtgaatgaaaatgaatccaatgaagacactcccagagaaactgcagtcatgagaggaggatgtctgaatcgctgggctcccctgtaaatacacccttacacacttgtgtacactcacacacctgctcttccatctgaacagctgtttcacctgttttatatgttagaattcatatgattcatatttaaagtttttatgatggaaaaaattctaaaaccactgctctcaggcattcctgtctgcctaacaattctttgtgtctatctctgtctattctcattcaagttaatcccctaccagttcccagaagccttctgccctccaatagcaatgcactccatgcatctcgccaaacatgtctgtgaatgaaggacagaaggaatgccttggtatactctttcttttgcttggattctcctcctcctccaagaaaacattctcattctgaaaactcatcttgaggaccttctgctatttgtagctctctccaacgcctttccttgtcatttgtaggcacaggtagtccccgcaccccacttctgaatgtcagcatcctctgtgtgtatctgtactgtggaattcatcaggggtgtatattattcgttacattcctggtatccccaataaagcacaaattataagatttgggaccctgacttaagaaacattatgcccataagtcctggcaccatcattcacacataataggtatgtgataaaatgagtgaataaatgttgctctgtgcatctgtgtacatgggggtgggtgggcttatatttctagttttaccacaggaaccccagatattagtttttaaaaattaatcctgcttaaggcttcttctgatttgcaaatcatctgatgcatttactttaccagttcgaaaaattgttggccatgatccttgtgaatgttcccccttcttcatttttttcttcctttcttttgagattccttttagaaacatgctgtcctttctgattctctctgctcctctaatttctgttttacattttccatttctgtatcactctgtgcttcattccggataatttctgcagtgctttcttacacttcattcctttgtgaacggtgattaatgtgaagtttaactcatgcattgcattttaatttcaatgacttttgttcacttctaagagttccactttgttctttttcaaatctgtctttttctcaaatactgtttcttgttcttttctcatatttctagttctttttatatccatagttgttttgttaaaacctgcttattacataatctataagcaatcatcgtatatgtgaagtaattgagcttctcctactgctgcttattctgcctgccgatggttgctcagtgagattatttctccatgttttgtggtttggggtgtgacttggtattcctcattggcttggctgagaaggtcttgtgtggcctaggtcaagggttagctctctagagattgctttggcattggtcaaggcctccggagtgttaccaaccaaggactatttttatgttaattccataaatacattcattaaattccttcattaaaatgatcaggtgacgtgtgcagtctatgttgaaacctctcaaaccaagagagggctggctgtggccatgatttctccagggatagacatttattttcccacccagtatctacccaagataagtttccttgttgtctggctgtgcatctgtgggcagagatttcatggtataccttcccactgagatagtgactttttgatcgtcaggcttacatagtttctagggccaataatgtgccccctttccgcactggtcctttgaagcagaacctcttgattaataaaataagccaaagttcccacagacactgagaatcaggtggcagtctgtggggggcccatggactgtcccttacttcctgagatgtcagctctccttttgagctgacaatatctaccccatgatgaattccacggtagagatacccttggaggatgttggcattcagaaggtggaggatgtgcctgcgaacgacagagaaaggcatcagggggagctacaaataacagaaggtcctcatgatgaattttcagaatgagaatgttctcttggtggagcaggaaaatccaagcaaaagaaagagtataccaaggcattccttctgtctttcattcactaactgtgtgtggcaagatgcatggagtgcattgctattggaggacagaagacttctgggaattggtaggagattaacttcaatgagaatagacagagatagaaataaagaattgttatgcagacaggaatgcctgagagcatgctttcagctgatctgatccacatggtctcagaagtggactaaacaagttgttctttcctaataatatatttcctacttgaagaaatgaagaagctctttgtttctcttcattgtaagtccagagtatacagtggacttaggttattttaagatatattagatatcgataatgtaagatcgattatttggatgtgtgtgtgtgtgtgtgtgtatgtgtgtgtgtatgagattaaaagcatccctgcaataaccccaggaaatagatcttactaaattttattttatttttatttttcaacttttgttttagatttgtggagtacctgtgcaggtttttttatctgagtatattatgtgatgctgaggtttgtggtacgaatgatccctttacccaggtactgagcatagtacgcaacagttattttttcagctctttcccctataccttcctcccacctctggtagtccctagtgtctaccattgccatttttatttccatgagcccagtgttcagttccctcttataagtaacaatgtgtgatatttgcttttctgtttctgacttatttcacttaggataatgtcctccagctacattcatgttgctgcaaaggccatgatttcattcttttttatggctgtgtagtattccatggtgtatatgtaccacattttctttattgaactcactgttgatgggcacctaggttgatttcaggtctttgctattgagaataatgctgcaaagaacatgtgagtgcatgtgcctttttggtagaatgatttcttttcctttggataacaaaggaaatggtgttatcagtggtgaatggtgttctgagtttcttgagaactctccaaactgctttccacagtggctgaactaatttatattcccaccaacagtgtataagcaagcccttttctcctcatcctcaccaatgtctattgttttttgactttttaataatagccattctgattggtatgaaatggtagctaattgagattttcatttacatttctctgatgattaatgatgaaaagcattttttcttatgattgttggctgcttgggtgtcatcgtttgtgaagtgtccgttgatgtcttttgctcatttttcacaggggttatttgttttttgcttgttcaattgtttaagttccttatagattctgaatattagacttttgtcaaatgcatagtttgtaaatatattcttccattctgtaggttgcctgtttactctgttgatagtttttttcgttgttcagaagctctttagtttaataggtctctctcacttgtcaatttttgtttttgttgcagttgcttttgaggatttaatcataaattctatctcaaggtccatgcccagaatggcatttcctaggttttcatctaggattcttattgctgcaggtattacatttatgaattaccaggtattataaaatgaatctttaattcattttcagttaatttttatatatggtgaaagataggggtccattgtaatttttctgaatatggctagatagctatccccacactatttattgaattgggagtcctttctccattgtttacttttgctgactttgttgagattagatgacggtggttaagtggctatatttctgggctctctattctgttccattggtctatgtgtctgtttttgtaccagtaccatcatgtttgggttactctagccttagagtatagtatgaacttgggtaatgtgatgcttctggctttgttctttttgttagcattgctttggctattcgtgctctttttttgtttcatatgaattttaaacagttttttccaattctgtaaaaagtgacattggtcgtttaataggaatagaattgaatctgttggttgtttggggcagtatggtcatattagtgatattgattcttctaatccatgagcatggaatgttttcccatttgtttgtgtcatctgtaattccttttagcagtgttttgtagttacccttggagagatctttcacctccttggttatacatattcctaggtatttgcatgtggcatttgtaaaagggattgcactcttgatttggctctccgcttgaacattattggtgtatagaaatgctacagatttttctacataactttcatatcctgaaactttgctaaagtctatcatttatcagcttcaggagccttttggtggagtcttcagggttttcaaggcatagaatcaaattgtcaataaagagagatagtttgacttcttcttttccaacttgaatgccttttctttctcttccctgatttctctggctatgacttctggtactatgaagtcctagtgaatagaagtgttgagagtcggcatcattggcttgttccagttctcaacaggaatgcttccaacttttgcctgttcagtacgatgttggctgtaggtttatcatagatggctcttattattttgaagtgtattcctttgatgcctagtttcttgagggtttttttttttatcatgaagggatgttggattttatcagaaactttttttcacatctattgagatgattatgtaatttttgtttttaattctgtttatgtggtgagccacatttattgatttgtgtatattgaaccaaattttcatcccaggaatgaagcttatttgatcatggtgacttaactttttgatgtactattgaatttgttttgctagtatttcgttgagatttttgtgtctatgttcatcagggatattggctatagtttccttccttccttccttccttccttccttccttccttccttccttccttccttccttccttctttccttcctttctctctctttctctttctttctttctaaaattctgtctttgccagcttttgttatcagggtgctgctgactttgtagaatgaattagaaagaagtccttcctcaccaattttttctatagtttcattagaattgataccagctcttctttgtattttgtatggtaaaaatttgctgtgaatcagtctggtccagagctttttttggttggtaggttttttattatagatttaatttcagaagttggtattggtctgttcagtgtttcagtttctccctgattcaatgttgggtgattctatgtttccaagaatttttctatttcctttagattttctagtttgtgcacatagagctatttataacagtctgtgaggatcatttgtatttctgtaggagtggttataatgccttctttgtcctttttttactgttactgatttaaaatatattttatctaatataagaatagtgatccctgctttttgttttgttttgctttattttccatttgcctggtagatctttctcccaccctttactttgattctatagctgttgttacatgtgaggtggatctcttaaagacagtagttggatgggtcttctgtttttatacaacttgccactctgtgccttttaaattcttacatttaagagtgtaaattgtgtttagactatttacattcaaggttaatattgatatgtgaggttttaatcctgtcatgaagctgttagctctatgctttgccatttctattgtgttcttgctttatagtgtctgtgtactatgtacttaagtgtgtttttttggtatcaggtattgttcttttgtctgcatgtttagaactcccttaagggtctcttataaggctggcctatgtgtaatgaattcccttaatgcttgcttgcctggaaaatattttatttcccctttgctaatgaagcttaattgagcaggatacgaaatttttggttggaatttcttttctttaaaaatactgaaaacagacccccaatttttcctggcttgtaaagtttctgctgagaagtctgccattagcctgatggggttccccctttgtatatgatctgcttttctctctctctctctctctctagctggctttcagatttttttttctttagtattgattttggttagtctggtaactatatacctcggtgttgttcattttatataatatctcacaggttttctctagatttcttgtatctggatgtccacctctctagccaaattaaggaatttttcttgaattattccttcaaatatatttttcgacttgtttactttatattcttttctttcagaaatgccagtaattcataggtttggttggtttacataatcccatatttctcaaaggcgttgctcattttttaaaattcttttttaatttttgccagctgtgttagctcaaaagactggctttcaagctctgaaattattctgcttgcttcaatctattgataaagctttcagttgtattttgactttccttaagtaagcttttaaatttcagaacctctgatactctgattgattttagaatctctgattgatttctttaagatgtttatctcttctttcatttccttgattgttttggaactttctttgtgttgattttcaaccttgtcttggatctcaataagcttccttgcaatccatgctttgaatgctttacctgtcatttctgactttccatttttgttagggaccattgatggagagctaatgcaatcctttggtggtgtcactacattcagatttgttgtggtagcagaattattgcagtggtttcttctgatgtggagaaattggcacttctaatttttgtaattatttttatgcatgtgttttttttctttctttccctataatgttgttgttgttaattattattattattattgtgttttcttttcctctcccttttccccctctctaggggtgtgactgtagagaatgttgggtacagtattttggctttgcctgtgtacacctatgtacttttttttggcaggttttatgctgaactttgcagttcatcctataagcctgtagctggtgcttatagctaagagctgtctgaggccaacattcatatatacttgcttattgtttgctggctgaatctctctgttgcctcaggcactgggctgatccatggaatgcacagtggtctgagctcactgctcagccctgggggtcaggagccaggaagggctggactgggcagttccacccacaggtcccctcttggcaggcacaaaccccaatgctaagggagaatccagtggatggccaccaagcgctcagtgcctagaaatggagctgggaaaccacctagcccccaagttctctgcagagagatgtgggggtggcctaacctcctactccaggagagtgggtgctccagatgcctggagatctgcctgggcatggagcagagagggaccccctgcacgaagttctctgaacaggcattctccaggcaagcaggtgctgtgaatgcctaaagatcagcctaggcatggagcagagaggatctcactgcaccaccatctatgttcaggtaaggtgcgacagctcagactgctgaaccaggtgaatgagtgttccaaatgtccagagatctgcctgtgcatagagcagagagagccttgctgcaccacaatctcaggggagtaggctggtgaacccatcaatggcacacacagatcagatccaggtcaccaggctggccatggctgcaagactcaccgctcaggagaaacttcacctgtagcagctcccctcttgccccaggcctgtggagagagcacaaagcatctactgctgaggtactttcacagttctggctgtggaggcctttaccccactccagagcaggctctccaatctcaggcccaagactaatatgcctgcacagccacagtgcaaggttgttaaagaatggctgcctttgtaggtgcctggattaaaaacggcatcctgttcccagtcctgggtctggggaatgtctgagtttttcccagcatctttttctcagagcatctttccaagcctctccgccaggtaactccccgagttaacttcagggcttgggaaaaacaaagtgctctccctctgccagggttgctggggtccccgggggaaaggggagtcacagagggatattttctgcctctctcatgcactggggcttcgctcacttttattagtcacatgccatcattgaggctgtttgctggtatcctcctctccaggatttggggtgtcttcacaattctgctagattcctgttttccttactgaattaaaatggggttttaattgggttgatccttctgtactatcttgctatttccaggtggctgaggcacactgaatgcctctaatgtgtcatcttggaaataaaaatctaaatttcattatagctaaatattctgatagattctaaccacttttcttcttatttgagaatattattggagataataataacaaaacatattcctaatgtctctaattcagagttttagctattaaacagattaacacatttatcagagaaaagtacagaaaacatcaatatcaatataagacactgtgtggtactacctatagtgttgtcatactatcatacgtgatgcgtcatatatataatatgtatatgtatatatacacacacacttcatatcatatattagctttactgtatctgtgtgtgtgatatctaagtagaggagaatttgtcctaggcatgttgcagtatctcacctggttaaatatttcttggtaaacagaacaacatgcaataatgactgattatttttcttaattgtctcttacaccaaatacattaccatggtaaaataattcacatattgtacctgtaaactcttcccatgaaatttctgcttgctgataatcttagaaaaataaaaatttaaagacaccctaaacacaaagaacagcagagaacacttaggagtaattgagaagttaaggggacaagattcagatatcacattgagtagctcttcagtgagccctgggagataagataaaattccggtattttggcctatgttgcccaataggatgcttcctatttctcataaggaagattatttgtactatgttctgccaaatgtgggccacttccctgtcacgcttctgtgacagggaacctccctgggtcccctgttctaataacaattgacttgatcagaaactctctatgtgcattccaattagtaatggagtaaaatgttaacaattctgcaaatgcacttactcccatcagcacattttctaaggggctttatgatcttgggaattcttcaaacattattagcacaatcccatgtctaagggaagtccatttagaagtaacacagacgcttagagtaaatgtgcttgtaataataattatattatgtaatatggagaaaaatagtcaaacaataggattactatttgaaacaatggatgaaggattaaaaagcaagtctttaatcacagaagagttaaatgaagcaccagctgcactgccacaatcaactatcaaatgcaggcctgttagcctctctggtattctctggaagtgcagaattgtatatactatactgcaaatacaattatatttgtgccagttaatccacaaaatagtttactgtatgtatgcataattaaattaactcttaagcatttaagaaaattcaaagtcaattaaacaaaacaaaatttgctttgagtcaaggagtataatgtgtctgtagtaaccaaagcagcaaaatatgttaatttttaattaatttgaactttcattgctgcagtgaggttttcacaccaacaacaaaaaccagtgagccacaggctggaaacaaaaatgagtgagacacaggctggaaacaaaaacgagtgagacacaggctggaaaggctcagcatgccccagcttcccagggagaagctgctctgggcaaggccttctgtgcctgatgagtggttttggtagaatctgaaagagcatgaatccatttccagtaagaagcagccagacaggagaggtcactgggagtcagtttcaggagacagatcgaggggatgctgacactgacattagccttctacgaggggcctacttcctgccatgccccaaagcattctggagcgaagactgcccatggaataaaatcaccccgacaagaatgagctattaaagtgcatgaagaactttgggaggccgaggcgggtggaccatttgaggtcaggagttcaagaccagcctggccaacatggtgaaaccccgtgtctactaaaaatacaaaaattagctgggcatggtggtgtgcacctgtaatcccagctaattgggaggctgaggcacaagaatcatttgaacctgggaggcagagtttgtagtgagccaaaatcgcaccactgcactccagcctaggcgacagagcaagactcagtctcaaaaaaaaaaaaaaaaaaaggtaaaagaaaaaaaaaagaaagtgcatgaaggggccagaaaatggctatggatgtccattttctcatttgttttcttaaagagttttcctgaaacattgattcaaacaagagaaatgctctttcgtgtttgttgttggtgtgaaaacctcactgcagcaatgaaagttcaaattaattaaaaattaacatattttgctgctttggttactacagacacattatactccttgactcaaagcaaattttgttttgtttaattgactttgaattttcttaaatgcctaagagttaatttaattatgcatacatacagtaaactattttgtggattaattggcacaaatataattgtatttgcagtatagtatatacaattctgcacttccagagaataccagagaggctaacaggcctgcatttgatagttgattgtgacagtgcagctggtgcttcatttaactcttctgtgattaaagacttgctttttaatccttcatccattgtttccaacagcaatcctattgtttgactattttttctccatattacataatataattattattacaagcacatttactctaagcatctgtgttacttctaaatggacttcccttagacaagggattgtgttaataatgtttgaagaattcccaagatcataaagccccttagaaaatgtgctgatgagagtaagtgcatttgcagaattgttaacgttttactccattactaattggaatgcacacagagagtttctgatcaagtcaattgtttttagaacaggcagcagctttcagtgtttaaaaaaaactcatattttaaatattagtttgccttctctgaattaataattaaatgatcattgatattgtgcatatcactattctgtataatatataataaaatgtggtatatgtatatcttactgtaatttcgtctttacagatctgttcccttggctgatttgtttgatgtctctggataagcactgagtctcattcctcttttaattccccaataatctcagttcttggcacgtgtagaaacccagtatttttgtttccttgactgaggacttactatcttaaatcagcagtttataataacaaaaccacaaaacactgtctgtcacaagtatacaatttgttcaagtcgatctttataaagctaatctgcttcccccaagcagcttggagtactacagccattacctctattctggcaatttccagtctaaaatttaacatcttctgtgagtaacaggagggtaggaaccttgctttattcaggtctatgactccagtaaggaagcatgattagtatcaaattaaacatttaaaaggatatcaattggtgaatgagaaacagttgaatttgccgtgatgataagaatgtccatctaacgaaagaaatgagtattctggcccaaaagaggaaaggtatgaaacatttctggaagtacccattgcccaaacataaacactgtatttttacctgtccacactaggaaaattaattggtggttgataaactggtgcctttaacttgctgctttaactacaagaacattgtttaccaggaccacatccttattatatacagttgttgctgaaatgcaaaatgagttatgtaacatttcattagaccctacgacgagttcctgatctagatcattatatagatgtagtacttttgtttaagggtgatatcatcaacatttttaaaatgtcaaatgaaccttgtttcctcttttttttattttttttattttttttgagacggagtctcactttgtcgcccaggctggagtgcagtgacacgatctcggctcactgcaacctctgcctcctgggtttaagcgattctcctgcctcccaagtcgctgggattacaggcgtgagtcaccacacccagctaatttagtatttttagtagagatgaggtttcaccatgttggccaggctggtctcgaactcctgacctcaagtgatccacctgcctcggcctcccaaagtgctgggattataggtgtgagccaccacgcctggctaattttttgtatttttagtagagatggggtttcaccatgttggccagaatggtctcaatctcctgacctcgtgatccgcccgcctcggcctcccagagtgctgggattacaggcgagagccaccgccaccggctttgtttcttctttagctaaaatatgtcattgattccagttagtggtgatttcagtttccgcaggaagagatgtcctctctgaaaatggaacttagtgggaagtgagaaggacatttagaacagttgcgttagcaaatcagctgatcagggttccagccccaaataatccgaacacagcacagcacatgaggctgaactgtactacagggtattgtacttctgactctgtctcgtctagatttcttctttctctgctgtgaccacatatagagttaatgcttttgagcagtgcttgttgtaagaacattcttctgggagataaaaaaaaaataatattaggttagagcaaaagcaattgcagtttttgtcattacttttaattacttttgtaccaacctaatagtaattaaagaaagtagcccaccttattcttaaataaaactttttaggatcacctgttaagattgaagaggaaaagggaaaaagggaagggcactctcaactgcatttgataatgacaacattaagactactttttcactttattggttcatttgtgtaatttaatttccaccccccacttaaagtttttaattccctaacaaatcagaagtaaatgtctactgatataaatcttgctaatttagtttttattttcgtaaatgttgagatttgttgttaactgtttgaagtatttgataccttaaatgtaattattgaagttaaggcattaaaagcagaaaattgggtggaaagatagtatgagagcgattactaaagaataatgtctaaagagcctacaatatcataattccatttcaatttatttctaaagaaatatatactttgcatgttttaaaattgaagatatatttgtcagagatgaagcacctgagtttaatcatattttccttataacacttttattagtatttttaatgggtgtaattggtttagacaactgtagagttattttctaaataggaacaatattgcaaaatggcagtagtaatagtaaatgagtaacccagtttttgctaggtcataatattgcttcatttcctaagtgcgtgagaaagatataacagaatgctaattatttctctgagtcaacaaacatattaagcccagtatgcgtgcttgtctcgaagtttccagaatccatcttttgtaaaacaggttttaaatattttgtattgattcagtatctttctatgtaactgattgcttcacaatattcttgtgtaacttacttcgatttctcacactaacatctctaaattagaatattacaactggagctgaagcacatcagtccaaactttactgacaattagtttcagaatttttcactttccattaattttttaatgtaaatgtatgatgacatttagacaatgtgattgggtctttctggaaaatttctttaatgtagaagtgattgtgacctgaaagcacaattcatggccagggaccacttatttggagggttattcattatttgaactttgttatttcataactagcgtttcttattgaaaatatgtagcatataagtaatcacaacaatggttctgaaacacatccttgactagaaattatttttaaaataggagccaaatcctatgcaatagaacattaggtgtcaaaatggaacccacatttctattctttttttatcttgacttattaggattaattataattaactaggcatttttactcagcttttacatttagcagaaaagaaaatttagattatttagttttatttactttatgagtctattctgaaatagccagatccaatatcctattactgatgtcatttagttacatacattgttttggataagtttacctcagtaggtacagcctatatttgaatacgtttttgtggttgaaaaaaaatcttcctgaattttacttttaaagattgcctgtagagtgtacacgttttactcattttaagttcttcattaaaatctcaattttaatgaatctttaaagctggaggtgctgatgtttctaattaacatgtcagaaaggtgtttagcatgcttcccccatgatatcctgaagccagacttctgagctgtgtacctggaaggtgcgtctgtgtgcctgggggtagacatgccattttttgaagataaaatttgctgtttgtctaattatcttatcagtgaaggcaatcagactaagtaagtggagtatttaaatttctgtttgtcagtattttattgtatctccatcccttccctcctccccattttgtcatacttccttccagagcatctctgatcaatatttgtatgtttgtttcttatactaaactctctttactagataacttttcctaatacgttctttgttagagtatttgtttcttttgattttggcaaaaaaaaaagggggtttgacttttatggcataaatttttcacttattttgacaacctttgaccaaaggaaacgagtagagctggtgttcactatggacttatcagccagctatgtatggcacttccagatatactgggaacctattgggtaaaaatgtaaccaactaggtatacatatggaaactttgaaatacatatggaaacttccaggtatgtgtaaaccttctgtacacccaatattaatttaaattttatgagaatccaccaggaattttaagacatgatctttatctgtaaacaagttcatgacatttaattttttgttaaataggagttattaaatatttaaatgtatgaataagtgaaatgcggagaagagagtgtattggtcagggttctccagaaaaacagagccaatagccaagagggtatggatctatacagagatagagatggatttttttttttattgagatatagtctcgctctgtcacccaggcttgagtgcagtggcaggatcacagctcactgcagccccagcctcctaagcccaagtgatcctcccacttcagcctcccaaatagcagggactacagttacaggccactatgcccagctaatttttgtatttcttgtagagactgggtaattaaaattttcttttagtcctgctaagctgaaagaggttgcttaatacatttgtgggttacattcagcgcgatgttgttcacaccatactttatcagcatttgatgaaggtcaggggtgggcctggatgaacctgcctaagaatacctttgtcagtagtaactatctgtacatggtcatgtgtctgaatcaaataaactataatatttgcatattactaaagttttggtgaagatgcctatgttagtcggtatttaagacacagggttgggttgaagtttatccttcctgttggtgctgtggacatggccttacacatgctttctggtcaccttctcccctgaggaggacttcagcacctgttcagcctcgcctgcggcatatttctgtgtgcatgcgcgctgccctcttcctgtacagaaccctccctaggctgaggatgtcttggtgtgagttagagaaagttctgcccacctctccctccagtcagatgcagctccccaggccttgagttgttaaactaatcctaccatcttcgaggccaggccaacccacactttctgagcaaaaaggtatttttctctccatttcacagcttcactcactgaaatatcagcagttctgggtgtgtgtttctggctgtgtttatgctggacacaaggctcggggatgagttcaggctgcggtcagccccttaaccgttgtccagggccttctgtgcaagacacagccaccctgtctgtctccaccccccggctctcccaactagacgtttccaagaaacaaataattggccatacgatcattcactatgtgtaaggtgtcaagagttttgaatttgtttcaccagatgttttgaaatatttcaactgattagaaaaatatggatgaactattctgggaatgtcacaagacccgaagactttctgaatgtgtaatttgttaaaaggattctgttcttttcctgaatttattagattctgttcttttcctggagaccactgacaagattttctctttccaaacaaaacagtttgtgactcatatattaatactttccaggtggagacttgtgtatctgaacgcatggttaataaaaagttgtactcatattccttgaggagggggagacttaaaatttaaaattagttaatatgtttcagatagttcgaaaacaatacagaaaagaatttctgttttaggagcaaagtgagggtgcatgggcaaaaagcagcacttggccatcgtcattagcaaagtgtgctgtctttattgataccaactgtttaattttgccttatttggcttctgtttatatattaaacatcaccaagtaaaaaatagctctgcgcacaatagagaagacactgttcctttgtattcgcacagcagataaaaaaactgagcaacacattgtgtttgtactctgcgagtctctgacttggtgaatggactaaacaagtttgtctttaagtagtaacatttttatttatacttgaaccttcaatcccagcatgccttgggtacacaagtaggcacacaaggattgtttcatgcgcgctgatctctgcgcctgctgagtggggccacacctgcaccctggagacacagtaggtgcggcctcagggagagcacacaggcctttgaagttccatggggatgtttttggcaaacagtcaatgtttgtatttgatctttgaatcatatctattcccactccttagagtgatgcttcatgctggatgggaacattttttgtctgtgcctccacatagcacttcttgaaagaaatctccagtgtggactcctctgttcaaaaggaaaaccctcctgtgatttagtccatggcttaatcttacttatgcgttctcaggtgacacaagaaacttattccagaactagttttactttgcctcaaagcaaaagtattagcacacacacccacactcacacctcacacctcacatatatacacaaattattttggctatgttatggactcactttggaagacatagcatcagcctgctctttgttgtcaggacaataaacaagttggttaaatggatgagttaattagaaatagcacatagtcaacagttgttgttacagacttattttcaataaatttaacttgtaatgaaaaccatttcttgtccaaagcacaagtcgaattttatacaattgtaacacatattcatctggtttgccactgtttcttctgtaagaacgaagataactgtattgctggagaaggtgtgcttttttcatactgattgataaaattttaatttagaaacttagtctaaagaaggcaccatcaggctttgtgaaaaaggggagtgcgaagaaccaaggagcttaaaaagcaaaagatctcctaaaactagtgagttcagcgattgacaggatatgagatcagtgcgcaaaatcaatcacatatattaatcattatgtattaacagtgaacgtgtgaaaactgcaatttaaaacataacaccctttccaatttctccaggaaaattaaatacttaagtatacacttaacaaaacatgtacagaatctggaggctgaaaatgaaaaaaaaataccaatgaaagaaaaagagacttataatgttcatttattggaagattcaatatagtaaaaatgccaatcatccctaaggtgatttataggtttagtgtaattcctgttaaaatcttaacaatattaagacacgtatggaagcttattctaaaatttgtatgtaaaggcacagaacttctaatagctaaaaaaaataatgcaaaagaagaataaaatcagaggaactactctacccatattaaggcctaccatgcagctagagtaatccagacattatggtattggtagacagacagacacaaagatcaaaggaagagaagggagaatacagaaatagactcacacaaatatactcacacaccaaaaggtgattttttgatgaacatacaaaacaatcgagtggaggaaagatcaacttcaacaaaaggtgctggacaactgggcatccataggcaaaacaagcaaaaaaaaaaaatagtaaagcaaagccaaaatctcacatattatggaaaaaatcaagatgatcagagacctaaatgtaaagcataaagcaatacaatttttagggaacaaaagaaggaaatatttgggatccatgactaagcaaaaagaacttaagcttgacatcaaaatcataatccacattaggaaaaattgataaattatatgacatcaaaatttaaaactcttattcagaagacttcattaaaaatatcagacaaggttcaggctgggagaaaatattgcaaccttcatatccaacaaaggactaatatttagaatatataaacagcactccaaattaacagtaggaaaataaaaattgttctagtccaattagaaatgggcaaaagacatgaagggatatttcaccaaatatgaatatacggatagcacataagcatgtggaaaggtgttgagtgttattaaccactagataaacacacattaaaaccctgataagataccaccacatacctatcagaacagctcatgaaaaaacattgtgacagcatcaaatgctggtgaggatgtgaagaaactcactgccccctgcattgctggtgggaatgtaaaatagtgtacagccgtgctagaaaagagtgtgacagtttcttataaaactatagatgcaactaccgtatgacccagatattgcacttctcagcatccgaccaagagaagtgaaggtgtatgtttacataaacacctctatgtaaatgttcatagtagccttattcataagagccccactaggaacactctagatgtttctcagacgggtaagtggctagacacactgctgtgtgttaacactggaatactgctcggcagcagagtggaacagtttagccgtacacagcatgaatccacagaaaactgtgctcccagtttttgattcatagtttggtagagcttctttatttttccctttcgaaaaatttgtattgagaactttataaacttgataacagatgtagggatgatttaaaagcattaccttcctcaaaacgtttttttgtttttgttttttactttaagttctgggatacatgtgcagagcttctttttcttatgattacgcgtaatactttttgatatttagaaagactggggaatatggaaaagaacaaaaaaagaagaaaacgattggtatgcaccacgaacacctgtcttggagaaacccctgtagatgggtgctcagattcttccagctgctgtctattccttccttttagttgcacttggttttcttgggacttttgtgactagctcatagggagacagaaaaaatgccaaaacctcatgatatgaagttaatcaatggaaagtgaattatgcatcaacctagaggccgtggagagctgggaggagtgggcgtctgatgatgaacactgtgagggcaaaggctgtggggttggctggacgccttccccagggcctgtatgttccccaggatatccctgccaattaaatacctgttgaaattatgttattaagtggcacttttcacagcaattatgacttttatgtgatttgacactttaagaacatagaagtttatttttcctagaatttgctgtaaggagaaataaccatgcaattattatttaaccaaataataattggttaaaatttggagtgaagaaatgaacagtatataaattaataaacaatggcgatgtagacagatttctggtgaggaaagatattaactagtctccttcagttgccaactcaacccagcacttaagatcaagacacctcttcactgcttaaaaaatacaactatcggcctggcgtggtggcgcatgcctgtaatcccagcactttgggaggctgaggcaggccagatcacctgaggtcaggagtttgagactagccttgccaacatggcgaaatgccatcactactaaaaaaacacaaaaattcgccagacgtggtggtgggcgcctgtagtcccagccactccactcaggagactgagacaggagaattgcttgaacctgggaggcggaggttgcagtgagctgagatcatgccattgcactccagcctgggaaaaacgagtgagactccatctcaataaataaataaataaataaataaataaataaataaataaataaataaaacgatatatagttgatatcagtgttattaaaatttctatggaattggactaccaaatttctacagtgtttttatcctttttctgtaaatgaaatgtaggaggctttaggaattgctgactttcaggagaggtggaacagaaagaccttcagtgcgtcccatccgccttgcaggaaactcctaagcttgagagacactgggctcaggggcaagacggggtgtgttggttcgccaatgactagcttcacaactttaaacaaacttcagtgcccttatttctgaaatatgtaaaataatggcttcttttgtgaattgttgtggagactaatggaggaagtgcctcaaaaacacccagtggagaatttggcccatcagtatcaagaaatactagttcccatcgcctttccctttgagtggaattaaacagtattaatccatctgtagtttttattcctctatagcaccaatgttaacagtcttctaccccatgatagaaacaacagccagaatattcccttgatctgccaatcttttaaaaacaaaacagcaattactcttcacaaatgctctctgaaatttctgactctgcacatggagatatctagatactgccagtgttccaagttccaaagaggataagaaaataggcttaagctatagatatgcaattttgactcatagaagaataatatagaagatactgaatattaagttaaagggtatgaacgctagaggttatgtgaccatgaatcaataatggggcaaaattggaaactctcagatgaaactcttgctttgatttatctaggatgtttctcaaccactgtgttgagattagtgggataacatctgtggagctgaagcgagtccactggccactgggaagtccatgacccattacccaccattattcttacctatttcaaactgttaaaaaacaaaaaaagtctgggaatgccattgtaacattgcatcaatgattgtcaactttcaggtgattcacgtcagtatacaacagccaagtgtaaactacgatcttttccttttacctatttgttacttttatctgtctgaggagtatagaaaagcatattttatggtttaagatgattaaaatttttcaaaatgtttattttactcggcacagttatttatttgattaagagcttcattaatgacagagtacattgactaaaagttgcctgcataggcaagatgtagtcattctgggaaatactcacattctgtacatgcattgcaacctgagtgtaggaggcataccacatgcaatatctcatttgtcattcacaaaatcactgtgaactagaaatggagaatttttaaacctatttttaatatatttttactctgttttaccgataataaagatttaaatgttttgagttttgtttttttttttttagaaattgtcaaatattacttaaatatgtctccagattcttggtttccatattttaccatgcatattttccaagtttttttgcccttatgtgagatttcgtgatggagtgatgtcaaagggaaaattagtatttttaatctccaaaaaataaacatgtagtttttttaattcccattttaagatatagttttgctgataattaagaacctcatttctagtgaaatcatcctagatgcttttgaatagtgggagaagtttaagcattgtataaaaggcattgtgtttttttcttcgtctttatgacaagttttctggctacagaggaaaatgctcacaaccaagctgaagccatctttcctgccatcaggcaaactgccctttcagattgtctgttttgaattggttcccacctgacccattacgtagttaacagacctgtctgcaactaccgggatttcttcacagggcttcgtctacccagaattaactgaaataaacatgccgctgtattcgcactttctcatggagcaggtcatagctgctgtaaattctaggctaaaaagtaaaataaaatggaggatggggaggtttaaagaaatacttaagctagctggtgcagggctgcagggagcttactaattaattacttatcaagaattgtaaaagaaatttttttttgcccctttgactctaatgaaaacaggagccaattgttatttgcaaaacaagtggcccctcaatggattattaacctgtgcaatgatcaagtaagtcagaaaaaaagagaatgtcaggaagatgcatagaaacctgctgcgaggaccagaagtatggagaggggttacagttttttatcattaaggtttatcactagggccagcgtgtggtggctcacacctgtaattccagcactttgggaggccaaggcatgcagactgcttgggatcaggagttcaagaccagcctgggcaacatggcaagaccctgtctctactaaaaatacaaagaattagccaggcgtggcgacatgtgcctgtgatcccagctattcgggaggctgaggtgggagggtcacttgtgcctgggaggcagagctgcactgagttgaggtcacaccatgccctccagcctggagacagagcaagaccctgtataataatagtaataataataataaacatttattgctaaaggtttatagattgcagacagaaagaccctctgaccatggtaagccagtttcttactgatatcattgtccttgaccttttcctgttccactgctccaaaccccagcttgctcaccctccatcaggcatttgaggagccctagaagaagtaacaccaccccaggagctggtcgccactgccacctgggcacggcatcctgcggcatcagctgagctcctgctgctctctgctccgcagctgtgtcccttctccgcagcaaatgtcttaggttcccacgaccttcacctagtcatcgaaacctccaacctctttctctcctggaaaaaccaaagccacaaccattggttgccctgctcccctgagatggcaccagccttcagggtcatgtttgtcaccttacctgtgtcgtcctagaaagtcaggtcatttctgcagcgagaggcagaccttccctgtgcaccaactccacaccctctccttacctcatccatgtccccctcttcaggattttccgcagctccttttcttgaagtcttttatgtggttttttggtgcttctatctcagcagattcatattccaaagtctctcccacaccccactccagcccctagattgttcttccaccatcagccgagattggggaaaaagaagttctcacagatccagctcacatggccaccatggtctgcttctcccttccaattccaggaaacattccctttgtcaagggcacaatttcctggtttctgtggtctcttttccatcactatcattcagtcttaaagtcaccttctccagccaggcgcggtggctcatgcctgtaaacccagcattttggaaggccaaggcgggtggatcacgaggtaaggagttcaaccagcctggccaagatggtgaaaactcgtctctactaaaaatacaaaaattagccgggcacggtggcaggcgcctgtaatcccagctacccaggaggctgaggcagcggaattgcttgaacccgggaggtgaaggttgcagtgagccaagattgccccactgcactccagcctgggcaacagagggagattctatctcaaaacaaaacaaaacaaaacaaaaaacaccttctccttttgttttaatgactcagattttttgtaacattcttactctgtcctggacacgccattctttcctcagccctaattccagcgtctcattttgagtgagctcacccactcccatggttttagccttctgcgtattgatgacttccagatcctattctctagtgtttttctgaattccagatctttatagctattatttcttgggactacatttaaactttaacaagtaatttaaagtcaatatgtctaatatcaaatataagactttatctctccagaaacctattcctcctcttgagaatgttttccagttgaatgggcccgcaatccaccctgttttcccagacagagacttgctactcatcatgagctccctgctttccacctccccgtgcccagttcacccccttgtactgccagctctctctcctcccttcccctctccccatccgtcctcttcttcaccactgctggcctctcactgggccacacactccccttacttgccttacctctttgcaggtaatcttgccctgggctaccaggatattctttccaaggcgccaacatgatcatgccacttctttgttgcaaggccctcagagctgcctgtcacttccaagacatgacaaactctttttttttccaagctatacaaagccctggctacttctccaatctcatcaatctttgctcatctcaccgtaggctccaattttgcacacatggatatattttccccgtatgcatcatgcttgaccaattctttctgctttgtacatattctaattattccagggataacctgaaagcctgggagttgcttggcaaattcttggaatcacagcctgcctttcgccactgtgtttcctcattgcctacttctggttgcagccccttcctgcacacttatacctagactctatctctctgattttacctcccttatctgtgcccctggatagtttattttgctgttgttgagtccttttccttcacattctcagctgcttggtattgcctgtattagataggtgattcgtacatgtttgttgagggaaaggagtaaatcaatggcataatcaaccatctcattattgaaaagtaccaacaaggaaaaataataacttactataaactaggcatctttagttcaaatattaattacaaaccatatgatagaacctgttgaatttttgtatgaaattcatgagtcacggccaggtgcggtggctcacgcctgtaatcccagcactttgggaggccgaggtgggtggatcacaaggtcaggagtttgagaccagcctgaacaacatggtgaaaccccgtctctactaaaaatacaaaaattagccgggcgtggtggcacgcacctgtaatcccagctagtcaagaggttgaggcaggagaaacgcttgaacctgggaggtggaggttgcagtgagccaagactgtgcactgtgctccagcctggatgacaagagtgaaactccatctcaaaaaaaaaaaaaaaaaacaaaaacatgaatcacttgtgaccttctcctgtcacaaggaaaggtgcagctaagatgaaaaccgagtaaagcaatgtaaatatgtcctggtacaacaagaactaatgttttcctttcctgagatatcatgtgctgtgatgcaccaaatgctttgaaaacacgtggggacaccatgtccaggtgattcccatcattttagagatcaaatacggcagaagtgacttttaaccacagaagtctgaccggaagccaggcgataacgttacgtgccttgtctcctaacaggtatttgaaccagaccatacaggatgatgcatccacaggggagcgttctctgaacagggagaaattggctgttttgaaacgagccctgaatgtagttggcttcagcagcttggtgagtcatgtcataaatatttcactgagaaaatcaaccttctactaatttataaaagttattcattcaaaagcatttactgagcccctatgacattccagatgttgccgaggacactgatgattcggcagacaacaagccccaatccctgcctcctagagctgacatgctagtggaggcagggggcaggacttcatccacatgttgaggaagaaaggaactaggaagaaaacagagcagtcagcagagagtggcaagaggagagggtgcagtttccaagagggtggacaaggagccctttcccaaaatgaatataatatatacattatatatatttttaaatatatatttataatatatcattttaaaatatttaaaatatattttaatcataaactttataaattatatttataaaatataatttaatatatttaaatatatataatattcaacatatatattttatatatgtatccaaaacagatcaaataactttatacttgatcaactcatgaaaaaactggtaaacctgaagtaactgttcatgtaaagaatcacttgaaaattaacataatcaccttgttaaaacatcttcttgaacaatataaatgttttaatattgtcatatttaattgcacagaatggccaagtacctgcaagcattatgaagctgaaaaattacactttaaaacttttagatcatggccgtgccgtagaaacatctatgatgatggaaaagttagtgacctgcatggtgctgtaccacagggtagtttccagccacgtgtggctcctggatgcttgaagtgtggctagtgggctgaagaaataaatgtttaatatttctttattttaattaatgtaaattgacatagccatgtgtggttagtggttactgaatcaaacagcacccagccagtgaataagacataagaaatggtctaagacttgagagaaacctctcagaattcccttcaatctctatttcccagaggcattatctctgcctccattcaacatggtggtgttttggattatggtcaatttacggccaattcctcaagaatatttaatataatatcacagggataacttggacatgccagtagttcacaagcccagattaggtcacagatttaaatctcttctatttatttttctgaagccaatacatggatggatttgggtctgtgtttatttccctgcccacaccgttatggctgacggggcagtgagtaggtggggagggtggagaggtccacaggaggaaggggaaggaagtgaggcccaccctaaatgagtgaatgcaggggcaccttgctgcacccacccttgctgttttgagagactggaactcgaggagcctgcaatcacatggcatctcattctttttggctctgattacccggcctctgtttttctcctttagtttttctcctttactgagtcctacccactggcactgttctgtctttgcacttgctgctgtggtacttttttgttttgatttttttccctccttccatgcctgaaatgtctgcttcctcataggaagtgaagctagagatatggatagaaaccattctgccaaaatatcagttgcctggaaacagggctttgaaaattcatgactgatcctcaaaggcagggcaagcaaagtacactttctgactaaggtaacccagggagactcatagccttcttggtaaaagaagtatgcacaccctagcaaaaaacatgaaattaatttcttcatcctgaccctgggagtgacttgaatggtgagttgagtccactttagagggatagattatgtccagtaagattcaaaggaaggtatttctgggccagtgaagtccttgaatcaacactggtgattgtggtcctgacagatctgttcgtaacagtgcctccagctctcccgtctagccgggcggcagggatggctgctcactacacagagacgcagaagcacagcctcctttctgctcaggaaggagtttatttttacttttgtcatagggtccaccacactgtaatgcacattatagctattttcacagctctgtaaattgtgaggttcttgaggacagcacagagtcttcggctgtctatccagaggtgcctatcttgtaggtaccggaacctttcatgaagactaattgatttaaaggaaaaaaaaaaaaaaagctgggcatggtggtgcacgcctgtaatcccagcactttgggagaccaagatgagcggattgcttgaggccaggagttcgagaccaacctgaacagcatagtgagacctccatctctacaatttttttcaaaaacattagctggacactattttttgcctgtagtcccagctactcaagaggctgaagtgggaggatcacttgagcccgggaggtcaaggccgtagtaagttatgattgcgccactacactccagcctgggcaacagagtgaaaccctgtctcaaaaaaaaaaaaaaaggaaaaaaaataagttgacaagtagttaagaaatttgagaggcttgaataatgccattttatacagcataagtaaattaaatttgaaaaacaaatttatgatttaggggttaaccaaaaacatttttatatgtatatcactttcataaaatattattatacctgaaaattagagatcattcttttcaatgctctcactttaaaattggtaaaatcataccttattatgaaaactacaagctctggggaaaatcacggaagtctcaagaagtgtattgtttccactgtgtatttataaagcacatcagcattgttcttagaaccgcttccacagtagttagggaaggagtttttgttctcaaattacagattaggagactgagaacagaacaggctatgccacttgcccttcacggggctcaacctgttttactgttgatatcatcatgctaaatatttgacattctagaaaagtacagtttaacttgcagctttttcttgatttttcattcttgccaaaaaatgactatccaaaatcaaatttaaggtctcattttttttatgcagcgttccagattctctttcagcattctcttacttcctgctaccctctgctcaaagatagctcttgccaacatccatttttttctgttttccttaaaataccttaaaaaacaattagcattttttgagtctaggcacagttgttttcattaggcctcctttagtttttccaggagaagtaaacaattctgtaatcatcgtgttaatttatctcataagagagatagcgaagaaatgaacaccatgatgtaggttcttgaatgaagcggccacagcaactgcaaagtctaaatagcgtccaacgtgagcctggagaggagggggagtgaagtctaaccttacaagtgaagcccagccagtcaaaccctaagcacacaattattcatttttgttattacaattatctacaagctgttaatttatatcagaatattatttcctgactctcttatatttcaggaacaggaacattgatttagagaaaatatgttttgaattatgaggttttgatgttgaggtagagactggtagttttcttgccatatcgaacatttgggatctgcaaactcccaacctcattaatagggtcatcatttttgtaacttacttttagatatttaaaaattttgccttttaatctttcttctaagcaccctattcattctctctgtttgtaaaatgcataggaggtggagaatctgttcgtaattctagcagcaatattgcaccttggagacattcggtttactgccctgaatgaggggaactccgccttcgtttctgacctccagctcctggaacaaggtcagtggaacatgaccttctgacattaaccacattgatgtgcaattttgtagatctaccagtagatggcgacatagtacagaaaagccagttggcttaaaccctttcctctatagtagaattcagtgagggggggaaattgtctactttgttttttcttaaaatctgttgtggaaatgagtagcaagatgtacttttatgttctcattctgtgcaccacattagcaacactgattctttagcacatacttgttgtttatttatattgttctaagtacccttcaccccactacccagtgtattttgggagcatgttattagctcaacattttaaacagaatgtaattaattccctttcaaagatcttgccaaaaatctctctctttgaagttgcctcgttagtcgctcccagatttttaaaaaataccttaaaaccacagattgtcaggaaacaacatatcttcacctatatcaaagagatttaaccaggtacctggaaaaaaacaattccataccatctgtgaggacagggaggaaaaacatccgctgtgatttaatgcacagaactgtaagaactcattaatattttgattactgtaagatgtttctctagttgaatttgacaattacagtggtaatgactttttaaaatactcatgttttgtaatgtgcctatataaaacttatcaattatggccataaaattcaatgttcttggtatcaaaaaatatactaactttatgtttataatgctgatttaattttagtggctggaatgttacaagtatcaacagatgaattggcatctgccttaacaactgatattcaatattttaaaggtaatttttttatgctctaacatctttgtgcaatttagaatcaaatatgaaaattaaatacagtttgacttgtccccacttagtgaaactatttctatgaattgaatgccaaatgaggaaagcattctgagcctgtttggtcatttgacatgactatagtgtagactctttatgctcctgagagaccattttgcctaactggtcaccctttctagataatctgtcaccttagaaaaacaaaaccatcaatccaagagggtttcttcaaagaaaatattggatccatttgcatgtgtggtgccatgctgcactcttcaatgaaggaccaaccttttcctgctacctcattggttagaacagctgtcatttattggacatatataaactgataggcattgtgccaagtcctataaaaattgtagtgtttgaattctcacagattgctctgatgtgggcattactatttccattttaacagaggggaaaactaaaattcaaataagttaaataactttgaacctcaaatcactagtaagtgacatgtttggaattagaatctagcgctgtctgactcccagatgacatgcttaatctctatgctacatgcatctctactcagtgaacaaagagagtggttttcccacatgatcttcaagtactcactctaaatgatggccttactattttcctctttattgtgattgtgagaactcaccattcatctaatcttttttctctaaatcgctactattctttctctatggccttttgggcctatgtgcatgtatttaggtaggtgagtcattattcctgcctcacttctactctcagaatatccccaaacgtaatgaatctccccattgttcactcagttgcccaaaagttatacttgatagctctttctcttctacctcctccatgcataggtcagacacacgccataaatatctcccattcctactgccttcccttcattttcatcagcactgctgaatttatcattctttccctgccttacagcaagacactcctggttcctcttttatctcaccttatctcaacttgccctccttccacactacttctgaaataatctttctgaaatgcaataggcatttcaggaataaggccaacagtctttcaaagatacaccagctcatcactttagatggcttaggaggccccactggcacccttgcctccagccacactaagcatcttgaagacattgttcttcttcgcaccttcttttgagaaacattgagctcactattagtatctatgatttcctctgcttacaccaccctcacttgctaccaccaccctgtgggtgacccacctgccctcctcagtcacatggctctaggaacgtcaatttcacaatgtcataaatggccacacccactttcactgccccttccccttgtgttgttccatctcgatggccttgaacttgcagctctctgactacattttccgccagtatcagtaggtatccttcctcacccgtgcttctaacagattggaaacacctcaacccgcattgcacgtggaccccgccctgttcctagtctcctgctctgcctgagacgcaatggtcagcaagtttggccaaggccatagaatatgaattctaggctcccattcacactcagccctcctgcaacagtgatgggataggctcaatgccaaaccacccttgctcttttttccttgggcccacctctattctagtcccttccccaaacctatcactcaagagttcaatcactgtctctttgagaatgacatagaaattcctacctaaggcccaatcttctttccaaactccagaaccacattcttgttgatgagatcatgcctttgaaaatatttaaaatatatctgattttccagaaagcccgtttccacatgccttaggatgattcagtatccaaaccagtgagttgttatcaaaagccttgccaggagggaccctgtgaagaactgtttccctaactgaggtgaaattacacaacctacaataaaggtggaacgctgtggtcaacaattctaacaaagaagattgcaatgtacatgacttctgctttaggaaacattttgcataataactgacggagacctcatttatgagaatccgtataatttttatacatcacttgtcttgtggatgtgtggggaattaataggatatgtggagttttggttggcttctaaatgagggaacccttgtgctcactcctccttttctttctaccattttaggggatatgataatacgacgacataccatacagattgctgagtttttccgagacctcttggccaagtccctgtacagtcgtttgtttagctttttggtgaataccatgaattcttgcctccacagtcaagatgaacagaaaaggtaggagttgatggatgttcggttctgttgtcattactgtaataaataacttaaaggctcaactccaaaagcagcttcatattacagggtaaccaataagttaaacttcattaatatattttattttaacaaggtaatctgacttgatgggttttaatgattattctttaggaagtgaaaccctctccctggggtaccctcccgtttacactgatgaattaataatttcctatgcatagatatgcaaatgcattctttatggactgaaggtagatgtggccttttgtgcaccaataaatctaaaaattttataaatccaggaagaagacactctaagaacaggtaaggcactggaatttgtggagtaactcatgcctccttcggaacctatttcatgatgggttttggatcagtaattcttcatcttatttcttcacttatttcgtggattatggatagagggtctctatggtaatcattttggttcatatccctaatcttttttttatttttctttttctgagacggagtttcactcttgttgcccaggcgggagtgcacgggcacaatctggactcactgcaacctctgcctcccgggttcaagtgattctcctacctcagcctcccaagtagctgggattacaggcatgcgccaccacacccggctaattttgtatttttagtagagatggggtttctccatgttggtcaggctggtcttgaactcctgacctcaggtgatccgcctgcctcggcctcccaaagtgctgggattacaggcatgagccactgcgcccggcccctaaacatcttaaacagtagattttcagggctatttcatcatctaaaaattatatctctccattacatattatcagtggaaaactttcttgttattcttgtcactaatagtgaccttgagcagacaattgagagcacagtcatattcacaagtcttcacgtacttgtcttcgaatgaaacctgagaatttcttagtcatccgtatagacttcttaaatttaaattaaattcctgaaaattgatgcctttagaggtttcttggaaaacattagaactaatatatattaatgggaaagttcttaaataaatatagacatctcagaagatttcaaagacaagaggacactgaaattcttattaaaatgtacacatctcaaatcccactgaacattgatcaacatattcaatagtctgtgatttgagagtagctatggtataatccatatttcagcagaaatattgtagtatttactatgatgaggactcttgattttgctattgtttattgttatcagttaatttgttaatttcctataagtataaagatgattcacagaatgatactaatatgctaaatctaccaaattagctatgtataaaattattgacagctctgctgaagttgacactgaaaaaatgaatatataagtccagctgtacatagaaacttctagaaaattttcatttgacatttaaattttacagagccttaaatttatataattggaaatacttatataatggtctacagtttttgctacaaacacacacccagagaaaaactacaaacataaaccgtggaaaacacattatttgtctttgcatgggaatattgccactgtggcaatgtgtaaattcataaggatggtcttatcttttaaaacttattactaagcatatgaatgagaatagagattaatgggaaattagaggtgaatcaacacattagaagtttgacttataagagacagtattctcatttctgtcgtaactcccatattttcttctctatttctcccatgagtcacccaaacctgaatttaaatccccagataatgcaagaaaaggttatatttgcagtatttctaattcatttaaattcatggaaagcttatggttttgcagatttataggcccatttcctaagtcacagaaaagtctcaaaaatttggataaccttagaataggctcttgttgtttaccaatcctgtgtttttgaaatgttgtaatcgtgtcaaaaaagattatataaataaataatatccttatggtcaaagttgtagagcacattgattgtgatagaatagacatatttttcacagtatatatgtatttattactgtatatatatatacacacagtaaatataccttgcgatagaatagacatacttttcatccagacatgtatatacatatagtatacagacatgtatactgactatatatatgtgtgtgtgtgtgtgtgtgtgtgtgtatgtatttgtaaatttggcaagagagaataaatatcactacaatttactctaacaagttataaagggaaaatgagtgaaattgaagcaggtgaatgtctatttgttacacgatggattcatttcttggattacagtaaaataggcccaatattaatcatatagcattttaaaataattctactttctctacctggatccaaataggttttgcttctaaacaaaaaccctgggtatcttgcaggtgaggttgatgcgattaattaaaatgagcagaagtgtttgccacgtttgctggatcagaatccagtctacaagtaatgtgtggctgcctactggggtgttgtcctctgtgagcctgactgctgtgcagtgcttggcccggaccctgcgggctggggaccactgagggccacacgtagtggcactttaaatattgaaacacactgaaattttatttattaggcttagctgaaaatgatttggtccaaacaggtaaaataataacagtaataaaaaaatagcaataatataatgccgtatatttgcttaaaactttgttgttcaccaagcatgtacatgtaaattacctggggaagaaatgttgttaaatagctaaaaatgacacagtttattgttaaaacgatgactctaggaaaatgggaagcactgctcacagttgtgactacagtctgcttcctcacatctcctcccaatgcccttcctgtggagaaactcatgtaaaaaccaaaggcttactattttcatcattttctgaggcatttctttttctaaactataattttatgacttctaaaataaaggatattgcatatcatttacatttgtatgcgaatgtcattattacaaaactcatgattacagtctccagtaacgcaagcacagtttcgctccatccactccaccttggtctcccgcacacagacagagcgtcagcctctcacggcagtacctgtgctctcctcaccgtgtcttcacctctcgtatgctcctgctgcatcagacactcatgtgctcaactttgctcagtgctatcatggtctttcgatgagggggggattacttaatagcacccatttccatctctgattcttaattgattgaggaataagacaatgtagtaagaggccaggcacagtggctcatgcctgtaatcccagcactttgggaggccaacgcgggtggatcacctgaggtcagaaattcaagaccaggctgaacaacatggcgaaaccccatctctactaaaaatacaaaatacaaaaatacaaaaaattagccaggcgtggtggtgcatccctgtagacccagctactcgggaggctgaggcaggagaatcacttgaacctgggaggcggaggttgcagtaagccgagatcgtgccactgtagtcccacctgggcaacaagagcaaaattccatctcaaaagaaaaaaaaagacaatggagtaaggcatttgggagtcaaaatagcaatttgatgagtgacacagcagacatgagaagatgccatttacaccatgaaccagttgctcctgcctgctgcgcccctgactcagatcgacatcaccaccagttccagtaagccctgaagtggccagtgccctcttagagcttggaggagcagaggccatgacgtgctccccacgaacgcaggaagactgccctgagccctccttgtccaggcttcctcctagactctgagggaataagttggtcttccagaagccaagagacttacagctaaaggggcttccttttcctgtaagaaaacctcaagactgtgaataagcatctccacctagcacatgtgagtccatgaacttgaaagattgagggacagtctaatgcacaaaggtatgtgggctttgagactcccattttgagtgagttggatctttttttgttgttgttctctagtgttttcgagagtatagccctgaacttgtctggccactaggcatatggaagacccatgtagtttattcataacttgccatcagttcacattaaattgatcacatttagcaatgaaaatataatcttaaattacatcaaattatttctaaagaaaaactaataaagttgttaagtttgttttgacttttctaaaattgtttagcctctgcatctctgtgaattgtcagctgacacccaatgaccaccgaaggtattaacaaagtccttgtttaaaccatttggagaacccatacatagattcccataatttcacatatagaaaattggcacccactgatgaacagggatgccatggatcttccattccactctcttcactgtccacttttcccccagtggatccaaaggcgtgtggccctctcttcccacagataacagccattctccccaaggaggcatcacctccactcgggtgtttcatgaattccacccagaccaaagccatgctctgctcattctttttaggaattgtgaggttgccagggcttcttttacagtgttagcacgtttgagaggcaaacagcaccattgtagggcttcccaaatgagctcaatcacctctctgcccgactacagcaatcacatcgagaactgcggattgttaaatatttttttttctatagctctgaataggtttctacccagggtttcaccactgtgatttagagcatcatcttaagaacacaccttgtgagacagagaggatttggtgtagaattttcttaacacttctcctctttcatggtctgttttgcctcattactgaagaaacccttttccattttgtgatactagctggctgtttctaatgtaatattgaaaggcttccattaagtatttgccattcttttgcttaagaaaattgcaaacctttgaaccagatagctgggggaacacgttaaaattactgttgatctgaaagggcagcattatggataatattatggtggctgccagaaatgtgtctgttttatggtggtcaacattataggcagaattgttcacaacttttcaaactgagttgccttatacttatttcagtgtaaccaaattaaccattatatgaaaccattctcacttgttttggtgtaacgctattaaaaaagcatgacttgtggtataatgaaaacatgttttctaatgtcccacctccttttcacatttattcaatgggggtaatatttttctgactctgagataaaacttaatcaggtcccgagacttttctggtcacttttaaataaatcacagttctatggacgctttaatcctgaaatagccagcattggagcagaaattaagtatgttcaaaggtgagagttcccctccctctcccacaggcaaggcctgcgggggcagctgtcatgctcctgggctgccgcaccccagtgtcgaggtaaaatagggacaggaacaaggaggtgagggatttctggacttgctgattgacatcttaaggctttcctggccacgaacatggctgtcactgaccctttctcttcaaatcctcataaattgtcatcactgggattcctttccctgcaatcctcaagacgtgtgaaatgcatgtgtgtgtgctggttgctcccaccccctccgatagtccagggcaacccttcagactcaggttcacctggctaataggttgaggccccacactttcccaagtgtgcctcttagacaagaattcttggggttgaaggtagagaggggctaaagaatgggaaagtgtcttgaggagttgtacacactccagttgctcactttttataaacaaagtccatgatctaaagtgtatttaatttttataaaggatatcatccataggattctgaaatgagatacatgattggagctactaaagtataatgaaaaataactgttttaaaaaaagatcaataatttttgcaagctctaaaattgggcctattttataacgcagcacttacatccccaagattgaattagcaaatgttaaattcaatgttaaatttaaaattattgtttttcctcatttgaatccttcttcagggttttgcaagcacatagaagtttgggcaagtacagggttatagaaactttggagtgttctccaaatgccttcaaacatcaaaacctatcatttatttcaacatcagttctgaataaaatggtgtgtgtgtgttgattatatatatatatatatatatatatacacatataatctacatgtatgtggatatattatctatatctgtctatctatctatcagtcatctctctatctatctagtctacagtaatcctatagagggttatttgagtatacttttattcattcattcattcttgtcaacttgatatgacatccacttttttgggcagcataactggactaatatattattaataatgttaaatattatgtatattaatacattaaaataagttgagtttctaacatatatatggagatcattttttcactaagcctttggtttcttatgaattcttatattacattcttatagtattttagttgacctaaacataaacatttaaaaatattatgattaatcgcattgatttctcatgagttagttatttggttatccaagcctgtttctttgacacccaggttacaaaaacttgtttatttttcagggttatttgaaggttaaatgaggtggtgcatattaagttgttaggagagtatctgacacaatgggaatggtggctgtaatgataatagtgatggggctaggcgtggtggctcatgcctgtaatcccagcattttggaaggctgaggtgggtggatcacttaggtgtttgagaccatgttaggcaacatggtgaaaccccatctctaccccaccccccaaaaaaatacaaaaaagttagccaggtgtgatggtacatacctgtggtcccagctacttgggaactgctgaggtgggagaattgcttcagcccaggacggtgagtctgcagtgagtcatgattgcaccactccactccagcctggatgacagactgagaccctgtctctctctctctctctctctctctctctctctctctctctctctatatatatatatatatatatatatatatatttaccagccacagccatcactatatgtatgtgtgtatatatatagccatctatatatatatatatatagccatatatatatatatatatatatatatatatatatatatatatatatagtggctggtaagaaagcatcttagtttatattagcttatttatggggaaggggagagttgtagaaaacaatgcagatgactcacatggtggacacccaagatgcagcccagtcttccttttacatttcactcgtgatctttttgtttcacagagtagcagataagggagatattttgttcttgggaaatagatatatcaggattcacagaacactattagagataggggcattgttttttagtgttttgctcgggtgtgacttgtagtaagcgaggatcatcgatttgcattgctcaactgccactctttctcttagggcacaggtctgacatgtttgtaacatgcctgtctagggtccagagtggtttgtggttttttagtattgcaaaaataaggtccacatgggttagaaacaatgatatttcctaaacggtagggattttttgtgggttttctttttttgttttttggtttttttcttttaagaaaaataagatacggaatgacacaaggtcctgccagtggacaggggctcacgcagtgcctgaacgaaggaactggcatgctgagatggggaagatattgggaacagcggacaggtgctctgtagagatggggatcccatggagcatctgggagcaggtgggagaatgaagtgaaacaggaatgaaagctcaaggatttaagtataaaagtagcaatgtctttcaccgagaagcaaggggttcccattccagtatctgtctggagccttagtttttttgtttcacaagtcgaaactgattatggagggaaaaaatgaaggcttttgacaatatatcacttgtgaaatttctcaaactattaaatcttctctttgctacccagtataattgtattatgggtttaaataacagaaggaagtattgaacagatcctataccaatgaaaaaagagagaatgtttcaaagagaggtggaagtcattttctcttaaggttattatttgtttaattcacatgttaatccaatgattcaattcctgaaatcatcagcaggataatttttgcatcttaccacatttctaaattcacatattttgataataagggaaattatttttaagccaatgtgagatttcctagagatccagattttcatcagcacattcacaacgttgcccctgtgtccccaagtccgactgaggtgatctgtagaaggtggcaatattgacagtgaatcacagcttcctagggtctcaaaactagtgactccactcagaaaagagaaaaaagaacacatccagtaggatgtaaattaaaggtgatatcagtgtattaggtgagtacattcatccctagcatctgacagcacttaagagaatgttagtgtctaaatgaacatagagaatcggcactaataagattgtaacaagcaatttaatattcttcagaaaaattgtacttcttcattaggtgagacttgttatctttacttaattagagggaaaaatattccatatagagaaaacataattatagctttgaagaattctgctggctggttaaaaaaaaaaactcccagtggcattttggataatccatgtttggtctgaagactgtctaaccaaatgacagaaaaggctgatctttaccttgatgctctgaaagtgaggtgaattaatcggtttaagtggattaagttaaattggcttacgttctcatttcctaattctgcactttgattttgttctactaagaattcagtttgtatactattagtttttaatatgtataggtgtatcttaatgtgcttttcgggtatccaaggatttcaaatataagagaatattttttgctgttcatattaagtgatagaattttctatgatttcatatgtctctgattgatacaatcaggtagcacttaatatacttatgaaactttatagtgtatctcaacctcttctaggtcaaggtctaatgtgggaattcagtgaataccataaacatacacacacaaacacgcacacacacataaatacagttttccatataacttctggggattcattgttcctcctcccccaaaaatccataaaattgggttataataatttcttagtttattgattagaaaactaatacattctgaattaatatcctcaatgttgttcatagtctccttttagttcttgaggatttttaaggctaagtcttttgtataatgattttgtcattgactttgtaaattgaagaattctatttttgtattttaggtaaaatttgtgattttaaaaacatattctgagatacctcctaatagatggataacataatttttaaaacagtaaaatgacactaagcatgttaagcctattttataagattatttttaatggatttgattttcagctctaagagagtatttctcaaggatcttggtcattagggacagtaaaccagaactttgtttataaaatattctctgagcctgaagatggagctaaggagggaacatctttcagctgcactgtaggcaagctattaaaataccttttgaattacagtttacatctatactatttgtacagatcacttatgaagactttacctagcatctcatgactgttttcaaatttcatctcataggtttattcatgtatttatttatttgctttctatgcagggtgggttgccattacttctgcagaaaaattacccatctttactgtaaaatccttggtatgcttgctaagtacaatagcatttggagatatatcagtatgctttaagctttgggatactgtttttgtttttttttttattaaaaaggccactattgcggtcttcagggttcacaattttctcatgttttgctggattaagcataggcccccaattccagtcaggtgtgtgtgtgcttggggctctatgtgtaaatgcttgtgattattttattctcaaattattcaacaaagaggttttttataaaataaatcagatgcaatttatgactttttaaaaggactggaatgtagccatatgagcaattaattgttcttataaagcataaatagtagtttgcaagtaattgaggtcaacttgggcaggttaaatctttgagttaaaactttgaagattaatctctttcaagggacgcagccatcaggagcatctcaggtatgatgagggaattttttgttttggaaaatctcaaaagggtgtaaacacctcattttcccagccatgcttccttatagacacgtctcctttgctttacatgaaggcttgccattattctctctaccaggagcctaaagtggagagtacaccctcctttttgaggcaggtggttgggaaatattttaatgaaaaaaagcagcatgattttttagaatgtatatgccttccaccctccatgtgaaatggaacttgtataataagcatcacctaacttcacatttaagtgttttctgccctttgggactatccatgtcattaactagatgatctataatgattgttagtagtatggagtgaggtgggatcagtggctattcattacaaagcagagacatattaaaattaagtattttttgtcaacccacatgcaattcacccttaacattccaggaatcatggtaagagagaatatgcaatgtttctcagttttctgaggatgaaataagtttaaaaacttaatctaaatggtagactagatgatagaaaagcagagcaataagaaaacatctagaaactgcagaataataagaaaacttccagaaattaaacttttttcactttttgatgataatattggaaattaatgttcccaggaaaatatctgaccatatgacatatttaacatctcctaagtgaagttttatctctctctctctctgatgtgatgtatgttttatcaattgctgttaaacatttggaaaaggacaggagatataatctattttcatttaacagggacaaaaactgggaaaaaaattgaaacttgcttctgaagcagggattgaacacagataaatgaatctgattaaaaccaaacgttttttatgtatgtttccactttccttgtatcagttattttattgaaatgattatcaagattcaaactctttggtgggaattacaaaccaaaggatatgtgtaagaaagatgagaatcccaaaatctagaccatccatttatgagtaattgagtgttggtataaaatacattttatgcattactgtatcaattataatgaaagtacttaattcgtaataaatgaatttatgtttataattttcaaatgcattatagaataataacatttcctgtgcatttgtgagaaaataaaaatacgcttatcccgacttttctttgtccatttcatgcataaaagcctctctttttatatgctatcttttttgggaaaaattcagtagtcaagaagagtacaaaaggaatccaggcaagcaacccatttacctactaccttgaattaatactattgacatttttcaacttttgcctcaggttttcgttatcataaaagacgtagatgattacaactaaaagccaagattccttttgttttcctgtagagatacatttttccccttccctccccagagacaacaatattatcgaatacatgtaatcttccacattttttaattttctctagccactggtttttcataacaaatatataacattgtgaataactaagaattacagaaacgctatcctatggtgtattttattctgtacatcctttgctaagttcatatggtttttgaaatttaactatattgatacctcaagacctagtttattctttttaactgctgcactacttgtggataaagaaatctcagtatactcacctagttcactattggtggacactgaagtctcttttcattttttttctcagttacaaacagcgctgtatcctcatacttgtctcttgagatatatgtttagaattttcccgaggtgtatatttagtggcagaattgcaaggagaacgattatttgcattttcttgattgcaagcgaagtcgacgtcttctggcaagacaagttgtgccctgcatcctggcacatgcccacggatgttcactgggctttatgcaatcatataccatgctccaacttcaggccttatcatagacattctgttcctaccgcaaggtcatcttatatttttttaaaaaaaacctttaaattttcagcacagcaggaaaattattgtgtatgtgaggagttgatagtttaatttttagttgaatattcgatgatcccttccctgtttgttagcaatgtttctttacccctctctagatttttaatctattttactaaaactgtatcaatgatatattgctttaattacttctcataagttctatttttcttatgtgttttggttattttggggtctttattttcacatattaattttataatcagtttgactctatccataaaacaattcttctgggatgttgactacaaattaatttatagattaatatgggaaaaattataccatttaggctattgatttttttcttccgcaaatatatttcaacatttattattgtattccttaaataatatttgatttttttctatcaatttcatgcacacctttattttatttctttttctatgaatcttttttttgtgtggctataatgagttctattctattatacattaatttattggaatactgaaccttgagtttcttatgttgatctcatatgtagaaatcctgctgacttttcttattagttctaataaatttcctgtgaaatggcttactactttcttatgtaaatgatcgtaattatctttttgtctttatgtatcttacttcttcttattttattgcattggctagcactgccaatacatgtgggaaatttgtgatgataatggatcttattgtttagtttacaaaataatggcaactaaatatttgccattaagtaatacatttacttagcattccagtaaataacctctgcctagtgttttcaatcatggatggatacaaatattttctaatggttttctttctttattaggaagatcatagcaatttccttctttcctttgctcttgtgagacattgcattgatgtttattttttgatgttgaatcattcttcatttatactgcaaaccctgtttgctcatgatatactagattctgttttctagtctttatttatgttcgcatttattttcattagtgagatgagattcttttgtttttgtcttatacaatctgttgctatcaaatttacattaaaagtaggttgggtagctttctcttttcttcctctgttttttctctccaaaacagtttgtactaaatgaagatcatatactcctttaatgtctggtgaaatcgccctaaaatcttctgagcatttgaaaggagagttggcttttggatactgattattttaaaatgtatattatagattcagattattttctttcttttttgactcacatatattttctggaatttcatccactttgatatttttaatttattcaccagctaaatcatagctagctttgtttagtaatcttttaatctctatttcaactgtagtttgacatttacattcctgatactgtttctttatgcattgtccccaagatcattgataattattgctcaagaatctgcctatgcaaattattttcaagaatcatattttcatttagtcactttcacatttatattattttaattaatttctgaagtttcaaaaatatattttctgtagttttattatatccttctttttcctttctttgaattttgactttttgggtgatttttttttcctgaattcatgagctgaatatttgtttcatagtttccaatgatgttttttcctgagtctataaagtatcatctcctaaatacctcttagtatattccagaagttttatctgtagtgcttcctttgttgtttagttctaaatattttgtctttatgttctttcagagataaaataacaagcagtttgtcagaaaaataaatttgacacaccatgtttttcccttcttcatccaaactggggatttttttaccattaaataatgagatttctttgattcttatgaatatagtatgagtgacttctatttctgtgtagacttatttaaatcatgttgcttattaccatgacaacccaaactacacaatttagcaaatatcggagacaaacctgctttctaaataatcccccttctgctccatttccttaccaaaatacccatatgtataatgatttcctcaagagctaaaaaccttttctctgcaattgtgcatttgttttttcattactttgtgagaccatttttattttcaaaaagaagaatatagaggaacaaaaaagtattggggttttaccaaagtatcatacagattataatacttaaaaataactttaaattatcagataataaatacaacataatagttaaaattttgccactcattatttttaaaaaagtatgctatagacaaaatagtggttaaatttaaatattaatcatgatatctatgataaattgcttcaacaatagtgtagcttattgacccaataaagaactatgtattttgccttaagtacatgttttcaggagatggagaggaaaatagatttatcagatctaggagaatatgtcattttttatattaaacattagtgttttctttctgttaatgactaatatgttattacaaatattgagagccacatagttttaataataaaatgtatacgaaatgcaatgatttaaaaggccaaaaaatccatttagcattttgttttgctagctctttcttgagccaagagtgcagaggctaaagcttgtatattttatataaaggaaaaaattcattgcactgttagctattcctgctcttgtttcatttctaactggggaaatgcatttggcctcttttcaacccctgttaactgtcctgctcaatagagttagccgaatctttgtttattatgctctctgtgcctgtcatttgagcatagtggcagttctgccagaataaataacactgcagtgccgtacagaaaggagagcagaatgtccctttttggctctccatgaccctgtctgtccccgaaaaaaacaccaggaaggaaatgtcagtaccactagttaaatatcgtttgcctttttcgaatgtaattttctaattgaggaggatgtgctttgcaacaaaggacattttcagtttttgtcagcctcaaactttgaactattctctcttcacatactgtctagtggaaaatacattttccaagcctggcatctttatgtgtggaggtgtgagaagttgtgaagctacgattattgtggttattattttttgaatattacctgtaaatgagatagtcttggagctgctgattattacagtttacattgacattagctatgaggttggcattcttgtctcccttttacagataaagaaaatggaactcagagagattaagtacatggcccaaatcacacagccagaaaatgatgggctagggatatgaaccccagtatgccagacttaaaagcctgagtttttgcaaaaatgcctcccatgttgatgaccatcaaaatagtgataaaaaagattagttttaaagctcaaatgttttctaaataaccctttaaaatataggtaatttctttatttcaaatgaaattgttttgaaagttaaatttatgtgaatatggacatgccccgcaggcgaggttatcctgtattcctttctctctggatctccagcatgcagcacagtgctttcccaatcaaggtgctcaatatgcatttattgaaatgataaatgaactcatacaatagttaaataaagcctagcttaaatgccatcatcaagagaagtgtcatgtggtaaactgcaaaaaagtgatcccaatttttattagtctgtgcatccatgccatgtacaatataagtttgatgcttctcttataagaggttaattctttttcctttccctttgaattcgagctggccttgtgacttgctttagccaacagaatacaactgcaatgatggtgtgccaattccgaagccttgcctgattctgcttcctctgacccctgtcactgccatgtgaataaggccaggctggcctgctggaagatgagacagacactcgtgttgctccagccttcagctggccaattgcggggccgctgggttaggtcatcctgaacctgctaatgtctgccaggcggcccaaggtgacacacacgattatgaacaataataactacttactgttttaagtcactgagttttgtggtgcttggttatctagaaacattgacttgctacaagtctctaattcaatgttcatagctgttacttggaaccacacattttttgtatgtacatttgaaggtcattattgaaaagacagctctccattttatgagtgatttgggagattctgagattatctgccttcccagtgttttcagactctttggtctgtcatcttctgggccattaaaatcccaaaccttcaggtaatgaagactgttggtttttagtacttgtactagattgcagaaagatccagaagtgctttgtaaaatacttagtagccagaagcccctggaggaaatgaaataaggagatggagatagaaggatacaaagtagcaaatatgtatgatgaacaagtgaaaggactaatataggacatgaggactatggttaataccagcgtgttgtattcaggaattttgctcaatgagtagattatacctgctcttgccatgaggcaggggcgtggctaactatgtgtggtgatggacatgttaattactttcactctaataaccatttactatatatgtgtatctcatagcatcatattatctactttaacatacactttatttttactttaacatacaacttattttttaaaaaacccaaataaaaaataaaaaaggagcgtttgggctggaagataattaagggagaaaaggaactgtactaataaaagcataataagttaaaaaaaagtaaacagcacttttactgtagcccttagctactgggttgaaatggcatgcagctttcaaattttgtctacatgcatatacagtaattttatcttttaattgggttttaattttttaaagggtaataggaagcaaaagatctggattcctattctgagcctactacttaacattaatgaaatctttagttaaacatttatgtcttgtgaatcttaattttcttcatccctaaaattgtgataatcatatcccatctgcctacagatggaggtttagcctacatatctctttggcttgtttttgatcttaagacctatgagtctataattcctagttaggataagtttgaaattgtcagtaacactcaaatatcctatgctcttaaaatacattttggatacatcagaccaatccatacattatagcactccaagacaccgtcagttttctgattgggatggctaaaattggaatgatttagtgccacactttctttcatttttaattaagaaaaaaaaaccttttcaattgatatccgtctcccgactgccagtaatatttgaacattttattgataatatgtgtgagctctaaggccaaagactaaatcaaaacaagaaaggtagattgtaattctctaattggtttgaagtacaaaataaatataccatgcaaagtaaaatcaaaattatatttctggaaacaaataccatctgtaccattgatttcatctctccattctcctctttctctctcctgtcttcctccttctctcttaccaatgcatttctccatctgaatctcacgtgagaaccgtgggaggaagaaagtgatcagccccaggacagtgtttcccagagaacattctgtgggatattcatccaagatttccgtgaaacaaattttaaaattcaagaaagggagtgcctgttgtccaaaaaagagttgcacattctcttgaaacagcacaaagtccaatggactgaaaagctttgaacgtaagataaagagtagccaggtttggttggccatagaactgaggacacacttgaaaaactcttcaatagcctatttaaaaatatttaggaacattggagcccaaaatgctatgtgccttcggagactgctgctttctgtgagcggaagcaggcaagcaattcaatgttaataaaagtgaagatgacctctcccagcttgttgctctccaaatagactaaacgctgcctgaggaataggttccatgccttccattcttaattgttaagactgaagggcatggtgaggctttacaggactttctaattgacaggttgaaattgtgaggaagtgcccacagtcttctccttccatttgcaaaacagttatgttgagtcctccctcacctctcattagtaaaagttgacccaactacctatagcactcctactatactgatctaacatcaggaaaaggcaaaatagaatttatcagcctggaaaggttttcatccctgagaagaactagttattctgtgaatgcttctaaaatattcacagagctcaataagccacccttaaggctcagccagcagctgtacaaagtcttcactctgctctatcacaaaactttctttctgcaaatggattctcactactttctgccataatgaatgacctctgaattggccttcctcaacccaaattatgctaaaaatgcatccaattccatgggtcctgaggtcttaggagaactggtaggaccactattaatgggtgaattttgaagcctgcaaatcagaagatcactcttagaaatcctcatacccatgacctggattagcttgcctctcccagtgcatcgaccttaacaagcccaagtcccagagaagcactagaactccatggagagcctggattcctgcctttcctgcagtcaccatccgcatacatttgccgtggctttctcttgcagggtagcatgtgcctgctagaacttgttcattcattcacacaagggattcagacatagggaaaactctcttttcagtggttggtaatcataccttttctttgacaatcacagaaatcttccaccccacctatccagattagtcctgctggggtcccaactttgtctctgtcatcctgaattgctggcctctaaaccagacccatgtacttgggtttcgtgctttttgagtttccttacaattttcctgagcactccttgacagaccttggtcatatcctctgactcaccatcttctctgtgaccctcaggtttgtcaaaaaccaacacataaacttcaaatacacctcacggctcagtctcctttcaagcctatccttatgttaatgtgcgtggatccttttgtggcatgagatctcttaaagatcactgggctaacttgattccgagtcctgaatcctgatgctgaaccttgtcccacagtcatctacaaactgacacagacagacagtaaggaaagaagtctcttattgatataatactgacattaatatttccttgaaaagacaaataagctgcagatttcctgcatcttcatataagttttcattttgacttcacctttctaccaaaagttgttcaaatacaatgatacagactcatttttttaaaagaatgtagatataaccactctgtgttattgtatgggatgcagaataatagagttggtcactgactttgagatagcaagtacaaaccacacgtagtggacagctgagttgacttcacgtgctgctgttgtttgggttttttaaagcttttattcatgctgtgtttctttaattgacgtgcatggtcaggaaatccatccctccttgacaacatacatcagcagcaagcagcctccctctagtttgtctcgctgactcacatccacataattggttgaacacaaggaagtatttatcgtttttgtgggaaggagtaaagtcattatactgaagatacccccaagaagtggacctccgctttgacagcgtagcatgtagctgacgtgtcagcagacgtgggaggagaccagatataactcttaacgatcagtgaaaacactagtgggaaaaatacggcggtcagtgtatttaacttcatgaagaatgtattttcagttcttcctgaagttctgggccactcaaacatcttgctggtaatttgcttccttgctgatatctttctactgatagatgatgcttgagcttcttgtagtagccagagccaaccgtaataatttcactattctaacatcgtgtttgatttggcattgccaaaatgaatctgcatttaagtgcttctcatttaacaaatatttatctaataatctatcacagtgcatagttgtgatccaagtgagcatacattttgtttgtttgttttctactgttttattgacgtatgtattagtctgttttcacgctgctgataaagacatacccgagactgggtaatttattaagaaaaagaggtttaatggactcacagttccacatggctagggaggcctcacaatcatggcagaaggcgaaggaggagcagaggcacatcttacatggcagcaggcaagagagcgtgtgcaaaaggaaccaccttttataaaaccatcagatctcgtgagacttattcactatcatgagattatcgtgagaaaaatctgtccccatgattcgattacctcccaaggggtccttcccatgacacatggggattatgggagctacagttcaagatgagatttgggtgggaacacagccaaaccatatcaaggtagaacatagctacagtgcacgttatgtgtaaagttcagtatatttttatacatgtaatctccataaagactaagatgtagtctgggcatggtggctcatggctgtaatcccagcacttaagggaggctgaggtggatggatcacctgaggtcaggagtttgagaccagcctggccaacatggagaaactctgtctctactaaaaaaacaaaattagctgtgtgtggtggcacatgcttttaatcccagctactcaggaggctgaggcaggaaaatcacttgaacccgggaggcggaggttgtggtgagccgagatggtgctattgcactccagcctgggcaacaagagcgaaactccgtctcaaaaaaaaaaaaaaaaaaaaaaaagatagtattcaggcttttaaagtctgagtgtggctttcactaatatgaaggatataattgatctgttattatgtatactcttctcactactacagttattgatgaactgctcactttcttatctcaaatgcagacagtgccctttttggtttctgaggagaacagaattagactcgggtgtaagaccaccaattggaaatagttttctgcagagcttcatagaacttacagacacaggccctacagctagatggccaagttcaaatgcttggtctatctaatactcatctgtgtttgggggcagcttacttcaccattctgtatctcagtattccctaggattaaatgaggagaggcatttttaaatgctcctaacagtgctttgtgcacgggactccagtgttgacctacatcctggattttctctaagtctaattaactgcaatgttcctcgcaaggggtccgcagttctgtacttcctaacatatatttctgtggggaaaggtgcagggaatgactgcatctaggaagatgctagtttgtacaataccatatagaatagagaaggccggacggcctctctggttactcccagcctctagtgcaactgtcagaattgcaaaggctttccataatttctggcatggttgcagaaagtgagaagtctcaagtactttcttcaaagaataaaagagaggaacccccaaaagtatgcaatcctagagtcccacttcttccccccaagtttctctcatagactaaaaaacaccctgagaggttgaaataaggtaagatttaagcagggttcacctccacagcgaggcatcaggccaattaaggaaagcaaaactttttgtaaatgaataaatcagcatattgacagggcagttggtgaatgccatagcatagctcggcatctccagggactttctggcactagcctctatgtacgtgcagctgatcccaagggcagtaagtctggacaagattgctcacgtctggaatgtgtttatatttaattcttgccccatctggggtcctactggtctaactcagtctaagggtttttgtgccaagcagggttaagctacttcctaaactgactacttggagaactctctagggaatctccttgcctgaggataattgaggacaaaagctgccttgtacacaccatcagattgttctgctcagatgaagtgagtttacccgtgttctaagataggcattctctttaattcagtcctttctccactctatatctatctacataaaaggtaaaatgaaaaccagactgatgtcttggcgtttaatattttgtctgatgtaaagggtgttgcattttactaatatgtcaatgcaagctgacagttttgttaactatcaagaaagctctcgggagaattctaaggcagaatttgaactgaaacagatcatctaattcatatgttaattttgcctataggattgagtcttggctggatcacatgacctctctgctcccagttgtcagaaattgaatgttaagttaaatgcctgtggaataggagtcagatatcaataaggggaatgacagtcaggtcaactgctacgtagtatgggcgttttgctggctgaaagtttttattactatcctgccaatgttgctattgcagtaacagacgcatatttcagtcataaatgatgaaataaattattttaaatgatcatgttatgcctgtcagtaattgcaaaagtcgtccttaaaatgctttaaacttgcatttagtttttctcctgacaatggaattttcttttttttttaaaaccaaatatgtttggattcagtatctataaaatgtgaaaaaaagcatttaggaggaatacccttccaatcaaatgtatgccactctaaattaccaattaataattcactttccccaatgtgaacccatcctttaatgattttgcccacccacacatgccacagtggccaaataatctcttctctgtgtgttgatgcaatttgccatccttgtaagggagggaggtaggtatgaagtgacatggtgtcactgatctctgctgctcttttccctaaattctatcaaaacaatatgccatgattatagggtctcttctgccaaggtcaactgggaagcaaggagggtaatcggacctgagagcctgacatagggaccctgatgtcagtggatagagaggcatctgtgctcgggaccagcacccggccttcaggggagagacccagtgctttttctccttattcctgaagttgtccctgcatcggcagcatctcttaccactggcaaaaccagacacttttctcctaccacgatggggctctagtatcccctctctgcccttaaggttattggtgtcaattttctctacaaaattagaaaatgcccaaatatattttttaaatgaggttaaagataaatattcttataatactagtatagaacatttaagaaattaagaaatcacctccaggtctaccatcttattacaggtactgttaacatagattttatttttcctgtggcttaggtttatttgacatagttcaaattatactttaagaatactaaaggtatacattttgtttctggcttttgttttgggattaatgttgttcatgaacatttcctatgttttcatattacctttatatacacatcaatgaaatatttgctggttataaaaatatatgtttcaatatagaaaccttagaaagtggggaatagttaaaagaagtaaacaaagcaatatctccatttcctctttcaaggctcactctatttctttccaggccttctggatatataattggggttattctttatacagaatttatatattgctttcttaatttatcatagggttcatgctatttaattaattgtgtttttagtgtgggatataaataaatgtttctttttgtagttatagtaattaagataacaatgaacatccttgttgataagtctttaaaagcatttctcatagtcttcttggaataggttcctatatatggaagtactggttcaaatgatatgaatattgcaaagctttataactaaattgtttttgaggaaggctctaccgatttaaactgtcagaaaaagtatataggaaaatatctttctcattctaatttttttcagattgtatttctttgtaattttaataagattgatacttttaaaaaacttattttttaaaaaagaggcaactttttggaaacactatataacagctatttgttttagaactttgcatcacctctaattctagcaatgatctagctggacaaattttacttggtctcctatttgtatacatgatgaaactccagttcaaaatatttaagtaacttgtctaaagttaaccaacccaaaagtatttaaacctaccccaagactgaacatctccaaagtctgacaaactttatcaccaaactgctttaagaaaaatgatgcagctcatcacacagacaatacacacacacacacacacacacacacacacacacacgaccaaaacaaacaaaaaatcacgctaagcctcagcatcattgttagcactgaatgaacatcattccagacatctctttgtgcatatcataaggagggcaggatggagaggaggatgcatggatgctggatggtgaacagaaaactggagagacatatcagcagattgaaaaatagtgatcaaaacgaatgacacaatacatttttacataacacttacctataacagaaacagttttatttatattacttatcctgcaaaggagtttaatagttgaaaaagtgttcaatagtttaaaacacttattttgaggtttcccaaaactgaaatcagaaaaaaaaattgcatttgttttcttataccattttaatttcttgttctaacatttaatccatgtagagtttatttgtacacactatgagttataaagctatttttattctttcttcttataaactaagtcaattaggaaaatatattgaatgatttctttttttctctcactgtattatattctttaccgtgaaatttgtacgaaggcttttaaaaaattctctccctcctacttatgaagcttatattctaccatatataacaaaaaatattacagacaggatattacagaattatgactacatttttagagaaaaaatggtcattgaagtgatgtattatagaccctcatggattataattatgtactgtacgtgaaaaacaaaatacagtgcaaagactgaggtggttgccagttttgttctgccgtttggaaaaagcaaggaaataacaatttaacgaccaatcaaataatggatattgatcctataagaactataataataacagaacagtgtacccatagcgtacccattggcagaaaattacgacagcagttgtcccattcatactatacgtcaatgatgtggaagaggtggggtacgtgcccctcccagaaattccagaattatctctgggcttccttgcaagaagcaagttcatgccgacgtccccatgctacccttccctgccttccatgtaaccctcttcacctgatcaccattgctagagtggctgtcattgacttgggcctgtcttacatctttccttgcttaccaagtgggctcagacatttgagatttttatcatctgtaactgtagtaaattctatttccaagagtgatagttcacattgaaaaaaaagattgatttctttaaattatccttcaaaagttctgcttttttcattcttcttttaaaagaattacttctggaagaacttttaaagtgactaaatttgatccatcaaagaacatgcatgtgacttaattgtgttttaccttacatcgcacttgggtgtgacgagaaagttctgactcactgcttgcatagcatgagaagacacaagtatagctagtgaggaccacctgactcactgctcgcatagcatgagaagacacaagtatagctagtgaggaccacctgactcactgcttgcatagcatgagaagacacaagtatagctagtgaggaccacctgactcactgcttgcatagcatgagaagacacaagtatagctagtgaggaccacttgacatgtaggctcagttccttaagggaaaagaagtccaacctaaggagatagccacgagaactatttcagagaagcaaatattaaatcacccacatagtgttacatttttaatttaaaatcaatttggtttttggtttttttggcctcaaattcttgttttttaaaatttttaagtttaagggtgcatgtacaggtttgttacataggtaaacttgcatcatgggagtttgttgtacagattattaaaagacactatcaacagagtaaatagacaacctactgaatgggagaaaatttttgcaaactatgcattggacaaaggtctaatatccagcatctataaggaacttaaaacagatttacaagacgatgtgtttttataaatgtgcatgtgtttgaatcaaagcattaaaataacagttttgggggggctaactttcagagttttttttaatgagactctaaaataattatttcacatttttagtccaaattggcagcaatgtgctaagtggctggattcttctgacctgaataatgaaaagagggtcatgaaggagttttaaggatgcccatttatcctggtgtattgttttgtttcagcatgcagacattggatattggaatattggacatttttggttttgaagagtttcaaaagaatgaatttgaacaagtaagtagtctttcttttaaaattgtgtgaacttgaatggcttttgaaactaagttctttttttaattctgtaaagacagtgtaactacttacaaatatggaattaaaataagtactctaatgttttaaaattaatatctctggtttatcaatatattaaccattttatgtggtcttgtaaacaactggcatagtcacacattgaaagcagaatcacttgttttaaaagacaatgcaagatgaagaccagagttgtgctaatggaaatgctatttcaactaggtcagagagaagggagaacatgaatatttgaaataaggcaaaggctttcaaaaaccttggctaaacatcagaatgaaaatgctctgttatgctacatgctgttatttgtagattcatctccatatgacattcatacataggactattggaaaatcataaaaatacattagagaggcatgggttgtttttaatccatctataatttggggcattttaaaagtattaaattatgtagtcatcttaatagcactgcatgaatagttttattaagtatacctaaaaactaagtgttaataaagacagtagaaatacaactctccttatcaaacagaggagaaaagtcaacctgtaggaaggtaaacatgaaaaaatagaaaaccaagctacattatagtacgggaagaattacaactccatagcatttgggaggaattttcatagttacgtaatttgtttagctttattttcttaaggtggtgtggtaggataaacaattaaatagaatgtgtttgagatgcaagtctgtgacttttagtagcgtcgatttcttggccaagatgaagactctatagtgaactttggttttcttgtttgtaaaatcaggttaatagacttacagagttctgagattaaacataattaaacaggttctcgtgtcagttactctcatactgtatatgattaagaaatgatggatacctacccgttactgttgcaaatgggagcactttaataacttaaaaattggccaattttatttttagaaaagctctgcatcatcctgtgtttagatgttaattacgctgacttacctaatccagggtgagtcagcacgaaccacgttccttacaaaacttcacaaaatgtctagtttgaactagaactatagaggcaatagatctcttctcctttcatagttttctgtggattaatagaaaaggagatacttcatgtgtttatttttattgcttactgtgagaaaagtaatgatgaacataaggaagaaagcagttgagtgtgaccaatagaatatatgacaatatatgtgggtctgcagggtgcttaagaaggtgcatctctcagctcaagggtttgaagctgtctggcatcagtagagattccttatgttattatcttagaaaacaggcaagctttcatgtctgcaatgagagtcactggtttatccatctcctggtaagcgacatgtagaaattacagatggaatgatgtcctctaaagtctgctaggggacttgcctcacaagctgcaactccacacccagacataattgtcaatagagtgtcctaatgatgaatacgtgcaaaacttttaagttattttcttactgaaacatatttattttactacaattatataaatcccttattagtccttcttttgctaaatatttttatgatttattttggaatacatttacagcctgagatttctgtataatagtaatggcatttttttcacatctaaagagccagtctctattaaatgccaaaagctagctttaggcatttatgggtaaaaatctcaagaacaattctgggacttaaattttgaaaaaaatttgaaatacacacacacacacacacatatatatatataatttttaacaggtttgctttgctattgtgtacaaaagcaactaggagtcatttagaagaataaaattatttccattgtgatgagtgcaaatctcatcttatgataagtacaaatctcatcttttgacgagtgcaaatttgcatgtaattttttttaagaccattggtttgagcgatacattttagatttctgtgttgctaacagaagctggactttttgtcttttattccactacaaacttgcaacaaaatgcttaacaaatcaatgctgtattcagaatcaaacctagaagaatattagtgcttttataatatgttttttattctgttttgcgcttattgacccatccatcagttcttcactcgaacgtcaactcctgcagagttgaaattgtgtctgtgctttgtatataataaaagttcaacgaacatgttttcaattgaagtttaaagaagaataaactcctaagaaaaaagtcttcatagtggatttcatagtggttcttcttgttcaggaataaatgacaattgttcctccacaggaagcttgacaattgtttagagtagggacacatttgaggagatgttaagaaacactccaaaacttcagcatctccaacctcagtctcctccagtagctccaaaagattaaatggattctcatctaaaagatgagatactacagctaataggaaattctgatcgcattttctctgactttatcttagtcagttcaggcagctagaacaaaataccttagaggaggtaattgacaaacagcagaaatttatcgctcacagttctggaggccaggaaatgtaagatcaagatggcagtggacttggtgtctggtgagggctctctgcttcatagatgctgccttcttgccacatccactcatgagggaggatcaaggcagctctctggggcttcctttattaagggcactaatctcactcgggatggtggcgccattatgacctaaatcgcctcccaaaggccccaccttctaatcccatcactttggcaaattgtggaggaacacattcagaccatagcagaattaacgaatcatttctattcaaaagtatttcttttttttattattatactttaagttttagggtacatgtgcacaacatgcaggttagttacataggtatacatgtgccatgttggtgtgctgcccccatcaactcgtcatttaacattaggtatatctccaaatgctatccctcccccctctccccactccacaacaggccctggtgtgtgatgttccccttcctgtgcccatgtgttctcattgttcaattcccacctatgagtgagaacatgcggtgtttcgttttttgtccttgcgatggtttgctgagaatgatggtttccagcttcatccatgtccctacaaaggacatgaactcatcattttttatggctgcatagtattccatggtgtatatgtaccacattttcttaatccagtctatcattgatggacatttgggtttgttccaagtctttgctattgtgaatagtgcatctcacaccagttagaatggcgatcattaaaaatcaggaagcaacaggtgctggagaggatgtggagaaataggaacacttttacactgttggtgggactgtaaactagttcaaccattgtggaagtcagtgtggcgattcctcagggatcttgaactagaaatacagtttgacccagccatcccattactgggtatatacccaaaggattataaatcatgctgctataaagacacatgcacatgtatgtttattgcggcactattcacaatagcaaaattatttcttataataagtacaatactagtgtaaaaaatatagttcacatagctcagcagtaatttggtacttccagtggtacttttcagtgtgtggaaaactgtacaggacaaacaactgacttcttcaacatataaaatgcagagaaaaattgtgaaaggagggcacctgtagattaaaacctatctaaagacatgtacaacagctgaatgtgtgggcattcttgggccctaatgtgctaaattatgtataaaagctataattaaagtaatgtgcaatctggacagttgatgaaatttttaaaaattattatttattggattatgtgtgataaagatactaaaaaatgtgtttctctaagttcttgtatctcagagaattatactaaagtagttacctgtttaaggacataccatctgcaaattgcttcaaatgagtccacctttgaggacaataaggaaatggaaaaagcagaagtggccataggttggtacttactgatgattgttgaagtcagttggtggctgatggaggttattacattattcccttcatgattgaatatgtttaaaatagttcatcatgtgccatttttaatcaatgagaaaaatttaagattatataagtgttactataataaatgatagaattttttctctctaaacatgttattatagagctctgcagatctgcaccaatgagcaaagtcatggaaacaaatcatttaacctacaaataatttccctacattctcccactaaacacatacatgcaaaggcatgtagtgaatctcttaaagccatgatgtctagtaaaattacatgttaacaatatgctggaatgacaggtgcattggctcctgtctgtaatcccagcactttgggaagccaaggcaggtggatcacttgaggccaggagtttgagaccagcctggccaacatggtgaaaccctgtctccactaaaaatacaaaaattacccacacatggtggcacatgcctgtagtcccagccactcaggagaatgagacatgaatatcgtttaaacctgggaggttgaggctgctgcagtgagatgggattgcgctactgcactcccatctgggtgacagaacaagaccatgcagaaagaaagaaagaaagaaagaaagaaagaaagaaagaaagaaagaaagagagagagagagagagagagagagagagagagagagagagagagagagagggagggagggagagtgggaggaaaggaaaggaaaggaaaggaaaggaaaggaaaggaaaggaaagggaaaaatgctggaagaacttagagaattgaagaattggagacagaacacatttgttcaaaataaaagctccctttgcagaagatagaattgtgatacataggccgggcccagtggctcacacctgtaatcccagcacattgggaggtcaaggcggtcggatcacttgaagtcaggagttcaagaccagcctggccaacatggtgaaaccccatctctactaaaaatacaaaaattagccagcgtggtggtgggtgcctctattcccagctactcgggagggtgaggcaggagaatcgcttgaaaccagaaggcggaggttgcagtgagcggagatcgcaccaccgtactccagcctgggcaacaagagtgaaagtccatctcaaaaaagaagaaaaaagaattgtgatacgtaatttatcttcaagccaggctttatctaaattgatttcatcagacttgtcaagaattcaaatcatttccctgcttacagactgttttctaacaactgaaatttactggacacttcagatgacctgggcttgggctatgtggtcagagtttggaaaaattgagatactttgacttctaaagttttatgaaatgatatgatataatttggcagtctcaacctcaagaaatattttaatgcccttcattgtgaaatcatgatgctagagatgatagaaagaaaaatggaatagtaaattaacttttcttaattggacttttccacatactcttcacatgcgttatcacatttcacagatgagaaaattgagactgctatactctgtgctttgtaagtgcatggtagcagtacctagtaggattcatttttctggcttagttgcatcagtaatctaggattcattcattcaataaacatatattgtatatgccccaagttccagaccctgttctaggcactaaagtttacatagacattatggtatggcaggtaaggtacaaatgttaaaagggcaaattccttttttataaattagattttctctggccagataatatgttcccacttctgcaccaattcttctcttttccagtcctacatattttttagtgttccagcatttatgattatataatgaattacctgaaaacttaatgacacacataaacatttattatgctcaccaattctttgggtcaagtatttgaacagggcatacggagacagattgtctctggtccatcatatctggggccttagctagataactggagtgtcggaggccaatgccatgtgaagcttccatcaatcgcgaatctagagggtgacactggctgttggctgggggcctcagttcctctttgcatgagtctctccacgttggtctctccatgttggtctctccctatggcttctatgtacatgctagttggggctttctcgcagtttgttggatgatttttctagagtggcttccccaaaggagaaacacatgcggaagctggatgctttttttgataacctagcttcagaggtcacatagtattacttcctctgtaggttggagcaatcacaagcatgcccaggttcagagaggtgggtaaattgagtctacctcttgatggtgaaggaccagttttaattggacatcatgggaaaaggactggggatgtttaaatgggtaatggttgctatattagtctaagtatgggacaggatccatgtaatttcactcacactgtatcatgtgatagctattagatatcaatattgatttgtctgctgatcaattgatacacaaatatgataaaatattattttcagttgtttcacacatagatttcaaaatcatacatgtgttaaatatctacctctatcttaaagcatcttctaccctgtgtatctccttttcacaatgatgttgaactttccaaaatcatttcagggacttaccagctgttgatctgatatttttaaaaatttgaacaaggaaatgcatttattttcgctacgtgtcagaactctagcataatgctattcaggtttctacagaaaaacaaatagaatcattaaataatgagatgctagtataatatacctcttacaatcatattggattctgtgtttatagatagcatgattattggtcttctttaaataacagtcttcaaaaacctgttttggggaaataaaatggggagtggcaacataattaagaattttgagcatataaactatacatttaatgacttttccctcaaaatctctgtaagttaagtaatatcacctctgagcttaaataatttaagtagctcatagaagttcacacaaaaccaaggtctgaattcaggtttaataacaagctattttcagttccaaaggttcttagaaagctaaacataaaattttattagtatatattttctaaacttcacttgatgccccttttgtttgtatttctcttaggactcaatattatttattctattatgtttagaaacaataaactcttcgtaaattttatgtgccattgttttttccatagtggaatttatcaccaaatccgtttaatataaataagtttcataatggaggtgtatctttttcattgtagagtaccaggatgattaaaaggaaatgttacaaagcttagtaaggagaattaatgcatttgaaaccatctatcagattactttagagaagagtgaattgagtaattttaatgaccaggaaaaggcttaagttaatcattgtggctgtccagctataaagctccaatcccagatacgtaaactaggaaaatgctttcatgtagttttgtgctaataattgataatggctacaatttcttgagctcctactattagtcagattatttttctatataatttttaactcttacaacagctttttcagaaaattaagagttaaagtccccacaagttttatgaggcccagtgggaattcagaggcagatgtgtgaggccgcaggagctgctccagcacaggccatgctgtcagtttgtcagaacctctaaactttgcatttcattctgaatcattacaactatttgaaaaaggcttattattttggtagaaattatacattaatcattggttttggactatatgaataattttatatgaaaaaagaaagcatattgattagaagtttattactaaacaagaaaacaaacttttttttgaaaaatattgaacaatttgatagagtgactgaagctctaaaataagagcattttaaccagaggttatgtttctaactcttgggcatggcttctatttaaattgaggaatatattttatgtacaaggtatcatacaaaatactaaaaataatttttttaatatgtgtttttcaatcctgatcttagcatattattatataagatttgtcaataaatttagccagttagtttgtagtcgatagactcctttttgaagaccaattcttcaaatcccaaagtagtaattatttacattaaaggagaatatagtcatgaattaaacccatcaaaatactagatttttttgttctgagtaacagaataaaataaaagttgtaaaaagagaaagtgtttttcatttgtgtaaaacaatgtctttatacatgtgaagtagctgaaatttatatttacttaaaatttgttatatatactttaattttaaaatatctaaggaagccagagaaggaaagatgattgattcctttaagaaatagtaacagaataaaaaatttaaaaaaaaaaaaagaaaaggaagagaaggggattgggaaatagaagggtgaaaaaagaaatacaaacaaaaacaaatacggcagcctgggccaggtggtagctgtgggtggtagcgaatgtgtgcccagtccacttcctgggtgctgactgcgggtcccaatgtggggctctggtaaggaaagcaacccttctctgctgtggctaccaagcacccaagtcctctatttttaaaataagattagcttatcggcagaggtagtatcctctatcaaggtaagagtcagtcatggtgctagcaaaagagtaaacatgacctttcccaaacaagaatggtaggaaagaaaggcctctacaattatagattctgagaagacaaaataaactagacttttaaaactgaagtaaacaagagagatgctatcccctcaccaacctcctgtacctgccgtttcataggcaatatatggaaatcagggataactgatttgtcggagaaccacttggagcagtctggtgagccccaaggtaatcttcaaatagttgaagtttatagtatgcttgaagtgttcaagtcccaaagaagtcctgcagagaagcctaacttaactccatatttccccaatgggcttctgcttaggtagggtttttagacaacagctattaaagtctcacacaattagtgttctgctgaacatatttcagcaatgctcagtgtctaaaatctaacactattccttctctctctctctgtgtgtctgtctcatgtgaacacacacacattaatatcttatatatacacatatatattaactaatgagcaaattagttgatgcatagtgcattctcagttctatgatctatctcagtgtgttcaaccatgtctacccattagaatcacctggaaagctttttaaatatttcaatgcctgcaccccactccaatttaattggtttggggtcaggcccagacattagcctttcttaaaaaactcctcaattaattccaatgtgcagataggcttgagagtcactgcccagggctctgccttcagctggagtcagctttaattaatctcctactttaattctgtgatgtgtatgccatgctctattatatttttgtttcagatatgtttcactgagtaatgaaagtaaagggagagcagttggtggaaatttactcaagaaattgtttgtcattaatacaaatgatgagccatctggataagcaataagtttccgttcctaaagagtgtgttccaggggtgcatagtttttattagtaaaccacttagcagtggcacttcatgtacaaagctgtattttaattagagaagagcaaatactatctaagcagctacttgataattattcatgagcatttatgaatactcacctttcacccacattcacgtctactctgaggaatacccggagatctaattgaaccccaaaacaactctacagtaggtagatttgaaaaagtaatggttgttttccattgaagccaatgatgccaatgattgatgcagatttatgcttctaggtatacgaactaatttgcctgtaaaaatcttcactctatctttctctgattgtgttgaacacacgcccacatatgcacattcacatacacatacagagtttagtgaaaataaatcaagaataaggttctgtccatgactttggcaaaaccatttggtttgtggggtacatttttttaaagtttcaatgaggtatccgatattgaatgatatgttcctattgttaaccttagctacatgttctagtggttttgaatttcatgccacagtacgtctatattttaactttggttcaaacaatgagtgctttgaacagtttagaataaaggcaaactttaagtaaaacattttaatggacacattacaccaaaattattttgaaaaaaaacattctactttaaactacatatgtttccagtgactcactaccactccacatcactctccactgttggaaacacaaatatagatttagttccagaaggcaccttcataataaaaggtacaaattggaaatcagtccacaggctacttggttttacacatgaagctggaaatttctctacgggattttaataatttactttaaaattttttcccccagaacacaaagaacatgatgttcaataaaaggttcaggtgtattgcaaagatcaccctatgccacaaaaagaactcgccactgacgctgcagcttaataatgctagaagtccagcagagacgctgtaggttttatcaatcattttgattgaccaagagaggaataaattgggttgctctatccagagacacaggccacatccatttctgttatccaaagtttggtagattgctttagacgtttgtggaaaaaaggaagaaagctgagacctggcttcttcccgtccttgtgtttgccacggtttcatctacattcatacttggtttcactgctttgattaaaccaggggatcaattcagtgaagccaatattcaattcagtaaaatattagtacgaaaaaaacaattacagtatctgttttctattatcagaagcctcaggtcagtcaaaacaagacagaggttgtgttctgtaaggcagtcaaggccaggaggatgcaatcagattgtgatcgaaagcagtttttgtacctacagagctgcaacctattctgaatgcaaaataacaaaagaattgtattagatatgttagagtcatcaatgtccaagtattttcaattagagaagctcaaaaggagaggaaaagaaaatgtcatataatgtgggtatgtcttgtaaataatcagccactgagtttttaaaatttggaatcctgtttatcgaacttcttatcatttcgcacagtaatagacattaccttatttcatggattcaacattgtttctcagcaatttgttccctaaaatgtattccacttaaccacactatccataaacagttttaagtcaaattgttgcagtaaatgacctatttgtgttaatttttaaatgattcaatgtatttttaataataaaaaacttgagaagttacagttgtatatatcatatagtcaaagaagatattttccagtggtttcattccataagagaagtcattagtttctgtacattttcagtaaatatttcaccccaaactttaataattgtatagcatttattattcctttataacaaaattaccttattattggagtttaacaaattattaaaggaatgcatcaaaatattatttctgaagcaaagtgaaatagtttaaacagtttttatttctttttaacaatttttattttttatttatgattgaaatgaaagtgacaagtagatgtactgcttgaacagtagggatgccattgtggacagatgctacatagttgcatggaaagtagtttttctttccaaaaccattactggagatttatgccctgtaggataagataaacatagaaactgatcatgaagatctggattgcctggcatcacttggttttgatggaataattcaagaggataaatgtgctagactgtatcagttacaagaaagaaaatatttttcatatgatatttagatactgaatgccactcctccctctgccagctataatgtgcagaatttgttggtctgtgtccatattcaaatcgtatttgccttaacaacaacgcctttaaaattaaatgttttatatggtatgttctcatccgaagcaactgttttaattaagagatgatcacagcagtgtgagtttacctaagaaacacttaaaggtttaaaaggtaaagaacttccagctttgtgcatttctcttgaaatctagttgtcagaagacagagaggaaaagttctagttacttactgtgcaaataatgtacaaggaagaaaatccagtaaccacagagggaatgctgggggaagaagacgataccaggagagtctcctggtttatacaaatcctctcaagttctttaggtttaaaatgacttctatgacaaccacaacatggcaagttcttctttaatttttaatttagatttcatgttgtaatagaatgttttagggaaacttcttctatctacagaaattaatttatcactgaatttaagaaaccatcttttaccatgaaggcagagagacaagaaaacccattgggaagggtggtagtcatggagcaccattttttgacctgaatctaagaattatttttgttactatttgaatgtcaatatgtgatattcagatcttattttaatatggttattactttaatattttgtttggtatatgtctactatactgttattctccacctgtcatattaataataataaagaccatgtgcattcatcattaaaataactccatcaggttgtaagaacctctgcactttgagctctcctacctctgcttcagtcaaggacccccttgcctgccaccctctcatgctctaatcaccccgtttctgaagatgtttgagctagctacacctacgcacaacattctaaccctggcaagaagactagaactttacagcaagtccacccagtcccacgccacactcccttctgtgttcacaccaatgttctgctctttcatatgtttgtttcttctctgaagaaatttccccctgagacttcttcatgccctacaatgtcataaatttccattctcccaagtaactggatttttgagaaaatgtccttttccatctaggtgcatgtaattctcaagtcattactagccacacccttaagggtaagtgggagctccctttgggaggatatggagtgacctcgtgctggtcacttgagaaggtaatttgtcttgctcattggaagctgtccttatatgggctagaaggaggacatgaatgcccattagcaggaccagaacatctagaaggagctcctacttcccaggtgttgtgatgacatcagacttggagaagatttgggatatgtggaaaagaggaacccaggaagttctttcttttctgggctcttctttccagtctttcttatttattttatttatttatttgagacggagtcttgctctgtcacccaggctggaatgcagtggcgtgatctcagctaactgcaaccttcgcctcccaggttcaagcgattctcctgtctcagcctcctgagtagctaggactataggcacccaccaccacaccaggataatttttgtatttttagtatagacgggatttcaccatattggtcagactggtctcgaactcctgacctcaggtgatccacccacctcagcctcccaaagtgctggggttacaggtgtgagccactgcacctggctaatattttgttattttttaacaaaagctttcgcatttctttatattaatacaggatatttctcattaaatattatcttagatattattccccttgcagatgagatctaattttctttcaaatgttttatcaattgtttccagctatataaatattgatctgtaattatttttagttactgagcagtaaatatttctaaccggctttaagttttgtctagtataacatagtggtttagggtgcagatgagggaacataaaggtctgtaaaactgagtaagctcacaaaagaagtgggtataggcagagaagagacaaggtccacaggcagagcccctggacactccaatatgagcaggccaggagtccacgaagagtcgggaaaggagatggggaggaagcagccagtgagctagaaagccaagagagtgtggtgtcccggaggagaggggagaaagtgctccatggaagaagagaaaccgactcagtcaaataacgccggggtggggatgggtcaagagaaacaaatgtgagagttgaacattggatttagaaatgtgcacactgctagccaggggcggtggctcatgcctgtaatcccagcactttgggaggccaaggcgggtggatcacgaggtcaggagatctagaccaacctgtctaacatggtgaaaccccatctctactaaaaatacaaaaaattagctgggtgaggtggcgggcgcctgtagtcccagctactcgggaggctgaggcaggataatggtgtgaacccgtgaggcggagcttgcagtgagccgagatggcgccactgcactccagcctgggcgacagggcgagactccgtctcaaaaaaaaagaaaaaaaaaaaagaaatgtgcacattgctgatgacttctacaaaagcaagtttgatggcgccatggtgtcaaaagttttattagagtggtttcaagagggaatggaaagataagaatttgagataataagtagaaatcagccgtgtgtgtgtgtgtgtgtgtgtgtgtgtgtgtgtgtgtgtgtgtgtgttgataggaaaggaagcacagaagtagaagagtagcctagaggggaagtcggattttgcgctggttagatttgagttatggtatagttttttaaatactttaagataaataaaggtttttctttaagattaagaaataacatatttgtttcctgatgggaatgtcttgtggaaagagaaaaattgacagttggaggaatgtggaaaattttctgataaagaaaataatttcttcaatataatgatttgactgttgattactatttctgaaagaacccccacattcattcttgcccatcactaatacgcaatcagaaatgaggccctcatgaaatgcttctcttttctctgggatctcatggtaaacccagctttatcttcatttcctgatgagagctcaaatatattttccttttggaaatattttaaatgctcaaatatatttgagactcaacgtttgtaatattggaatcatacttttcgttgtttttagcatactttgaatagttagatgatatggtatcagatatacttgatctgtgaaatatgtgcaagtccattcctagacttcagttgaaactctgacttcccaggcaacgttgtcatgctttattttggtagactaattggttggaaactccctgagtcaatactttcccaatctgaaactgtgtcattgaacaactgaatatgcactgctgtactatcttgtgtatgcactactgtactatatcttgtgtatgcactactgtactatcttgtgtatgcactactgtactatctatcttgtgtatgcactactgtactatcttgtgtatgcactactgtactatctatcttgtgtatgcactactgtactatcttgtgtatgcactactgtactatcttgtgtatgcactactgtactatctatcttgtgtatgcactactgtactatcttgtgtatgcactactgtactatcttgtgtatgcactactgtactatctatcttgtgtatgcactactgtactatcttgtgtatgcactactgtactatctatcttgtgtatgcactactgtactgtctatcttgtgtatgcactactgtactatcttgtgtatgcactactgtactgtctatcttgtgtatgcactactgtactatctatcttgtgtatgcactactgtactatcttgtgtatgcactactgtactatctatcttgtgtatgcactactgtactatcttgtgtatgcactactgtactatctatcttgtgtatgcactactgtactatctggtgaaatgttttcttgttttctccacaacagctttgtgtcaacatgaccaatgagaagatgcaccactatatcaatgaagtgctttttctccacgagcaagtggaatgtgtacaagagggagttaccatggaaacagcatattctcctggtaaccagaatggagttttggacttttttttccaggtattcatataatataattagatacttaacaggatatatgggtttaaatatactggagacaaagaattttctttcaggacgccttatttttgagatatctttatatgtgagattctgcaataatttttcaaaatgtattgaggtgcacaagttatctttttatgaaaggacatttgaaggatcaccaattcattaaaaggacaagaaaatatcattttgatatagaaatattcaacactgtttattcaacatcactaaaactctccttttggcaattataagtgcctattgtaaaaaaacagactttttataaaataatacctaagattaatcataccataaaacaagttcaatggaatcttttttgttaatttatcttcaaagtttctaagatttaaatttggaaaaactggcaggaaaaacatataaacacatatataatgtcggttaaattaagagtctcacagcatctgcaggtgtttatagttttagtttttctactttacaatgaaaaacaatttgactctgtgtctctatcatataagccaaaatctatcacataaacagcaattgcgatgtactaatataagaaaacattatatggatttactcacaatatctccaagatacatggacattgttgaaaacagacacaattcagctatttggagaatatgtcattctttactctctttccataaagatagatttctaaattattttattttatgaatttttctgattaacacattcttgttcttgcttctaacttgtcagcattcttctttttctaaaattacagccctcttcctccagaaagccctcgtagtgacatacataacctataattatttaaggtttaaaaatgtcttcaaaccggcaggactgtatacttaattgtatacgggacgcctcaggcatctagcaccttctctctagcttgccatgttctcttccactgctaaccaggggtcatcagaataaaaacttgcatgggccatatttatatttcaaggattacctatttgtccctggccctgaggggaggggttgatccagatttttaccaaatactccaagtgtctagtacattttgttgcactgtgtagtatttgatgaaggtgaaactatgacaacctttcacatggagtagagccatgcaatctcttctaagccgttactactaaaggaattggaggtcattaatccctttcttatggcttatttccctaggttctatttttgtctttaggcacttccacaagttttcaaagtctaaaaggttaattgccccattcttttattgctttatttcagacatccagaaaacataacacacaagattttgtttttaatttgaagacaatacaaataataatgcttaaaaaatgttgctagtaatcaaccaccttatccatggagaatatcatcttgatttttggagcagaatcagttagctctctgaatgtctatctcctttatactgatttggggccctgtctttgagttactgcaatatccattgacagctttaccaaacaagtgaatattttcaccccagagaagaggtctgtcactgcccttgaaacagaaacagacttgcagacaaccttgcaatggctcatttgtccttctgctgtgtgtcttgtgtaagtttgtatgtgaacctgtaacagcatttacagaagtgtggtgacctgatgctcacagatcaatagatgaagcaatgatggataatattgtaatatcaacactttacttactcttcagtaaatagcttgctattagttgaaataaagaattgtttgattttgaaaacatcacagatggaaccagtccttggcaagcttctcacatagaccgttttcttctagggctgctctctattatatatattacatataatattatatatatatatatatatttcttcacctccagcctcttcagaggactcctcatgggggcccccggccactctgagcttcttgcagtgtactctatggaacttcctgttgagccagcactcccagtaaggggctttcttcttcaaattcctttatctaaaaacacttttgtgtggcaacagcagtctcaccaggcattgctgacctcagataacttgctgaggtgggttagcttgcttttgcaggcattcctacttccttcctagtggcattctcctctgcattaggtcttcttctctttctttccttcccagggaggttatgtggcttctcaaagaaggtggctgtcattattgctgagtatcttcaagaagcacgctctgctgtgtgagccccaccaggggtgtgcgtgtctcatggctggcattattagctttcattccctttggctggcaagggagtgatctcaccattgcagctctcaggcaattgcagtctttggattttatttttctttttgcttttttttttttcttcctttcttttttttttttgttgttatttgtttgtttgtttgagacagagtctcgctctgtcacccaggttggaatgcagtggcgcgatctcggctcactgcagcctctgcctcctgggttcaagcgattctcctgcctcagccacctgagtagctggaactacaggtgtgtgccaccacacctggctaatttttgtagttttagtagagacagggtttcaccatgttggccaggatggtctggatctcctgacctcgtaatccgcctgcctcacctcccaaagtgctgggattacaggtgtgagccaccgtgcctggcctggattttctttaataggagcaggagactctgaaaggcctaaaacaattaaaatatttaagacacaaagaaatggcctttattagccaaataaataacattttgagttgcctgtagtggtatggtttggtaacctcaggtcaaaatacaaactgaattcacaataggggtcaatatatgtctctttacttcctgagaagaattattatcagagtatctacacatttaaaagcacagtgagaacgattaagatatattagggattaatgtgaagaagtttcataaattaccttattgtgaaaggtagatttgaaatgtcaacaaaaactaaactttcctaggggacataatagaaagaaaagataaacagcactagggaagaagttattcaatagtcgtctaaaccaggggtccccaacccctggggcacagaccagtactggtccacggcctgtgaggaaaaaggcttcacagcagggggtgagcagcaggtgagggagcaaagcttcatctgtattgacagccactccccgtcactggcatctcaccgcctgagctccagctcctgtcaaatcagtggcagcattaggttctcataggagcaggaacctatgagagggatctagctgcacactccttatgagaatcgaatgcctgattctacattatggtgactgtatcattgtttcattatatattacaatgtaataatcacagaaataaagggcacaataaatgtaatgcacttgaatcatcctgaaaccatcccccccacccctggtccgtggaaaaattgtcttccacaaaaccgttccctcttgtcaaaaaggttggggccctctagtctaaaccatgtggtcagaaggtattccatatgtgggggatggaagattagaggttgggaagtgatttaagcagcctttgctctcagatgagatttatttcaaattgttgttatatgtgtgtgtgtatatatatatatatatatgtatatgattttagttttattgttcagtagttataaactgtcagacttctaatttaagttttataagtcatagcttcaaactttcttctaggtctaaaaattggaatatcacagtcacttctccttcctgttgagtaggattttgccaccttgttttttttttgtttttgtttttgctttttatactttaagttctagggtacatgtgcacaacatgcaggtttgttacatatgtatacatgtgccgtgttggtttgctgcacccattaactcatcatttacattaggtatttctcctaatgctacccctcccccacccccccccaccccaccacaggccccagtgtgtgatgttccccttcctgtgtccaagtattctcattgttgagttcccacctatgagtgagaacatgcggtgtttggttttctgtccttgcgatagtttgctcagagtgatggtttccagattcatccatgtcactacaaaggacatgaactcatccttttttatggctgcatagtattccatggtgtatatgtgccacattttcttaatccagtctatcattgatggacatttgggttggttccaagtctttgtattgtgaatagtgccacaataaacatacgtgtgcatgtgtctttatactagcatggtttataatcctttgggtatatacccagtaatgggatcgctggttcaaatggtatttctagttctagatctttgagggatcaccacactgtcttccacaatggttgaactagtttacactcccaccaacagtgcaaaagcattcctatttctccacgtcctctccagcacctgttgtttcctgactttttaatgattgccattctaactggtgtgagatggtatctcattgtggttttgatttgcatttctctgatgaccagtggtgatgagcattttttcatgtgtcttttggctgcataaatatcttcttttgaaaagtgtctgttcatatcctttgtccactttttgatggggttgtttgattttttcttgtaaatttgtttaagttctttgtagattccggatattagccctttgtcagatgggtagattgcaaaaattttctcccattctctaggttatctgttcactctgacggtagtttcttttactgtgcagaaactctttagtttaattagatcccatttgtctattttggcttttgttgccattgcttttggtgttttactcataaagtctttgcccatgcctatgtcctgaatggtattgcctaagttttcttctagggtttttatggttttaggtctatcatttaagtctttaatccatcttgaattaaattttgtataaggtgtaaggaagggatccagtttcagctttctacatatggctagccagttttcccagcaccatttattaaatagggaatcctttccccatttcttgtttttgccacatttgtcaaagatcagatggttgtaaatgtgtggtgttatttctgagcctctgttctgttccattggtctatctctctgttttggtaccagtaccatgctgttttggttactgtagccttgtagtatactttgaagtcaggtagcatgatgcctccagctttgttctttttgcttagggttgtcttggcaatgcgggctcttttttggttccatatgaactttaaagtagttttttccaattctgtgaagaaagtcattggtagcttgatggggatggcattgaatctataaattaccttgggcagtatggccattttcacgatattgattcttcctatccatgagcattggaatgttcttccatttgtttgtgtcctcttttatttcattgagcagtggtttgtagttctccttgaagagatccttcacatcccttataagttggattcctaggtattttattctctttgtagcaattgtgaatgggagttcactcatgatttggctctctgtttgttattggtgtataagaatgcttgtgatgtttgcacattgattttgtatcctgaggctttgctgaaattgcttatcagcttaaggagatttttggctgagatgatggggttttcaaatatacaatcatgtcatctgcaaacagggacactttgacttcctcttttcctaattgaatatcctttatttatttcccttgcctgattgccctggcagaacttccaacaatatgttgaataggagtgatgacagagggcatccctgtctcgtgccagtttgcaaagggaacgcttccagttattgcccattcagtatgatactggctttgggtttgtcataaatagctctcattattttgagatacgttccatcaatacctagtttattgagagtttttagcatgaagggctgttgaattttgttgaaggcattttctgcatctattgagataatcatgtggtttttgtctttggctctgtttatgtgatggattacgtttatcgatttgtgtatgttgaaccagtcttgcatcccagggatgaagcccatttgatcatggtggataagctctttgatgtgctgctggattaggtttgccagtattttattgaggattttcgcatcgatgttcatcagggctattggtctaaaattgcccttttttgttgtgtctctgccaggctttggtatcaggatgatgctggcctcatcaaatgagttatggtggattccctctttttctattgattggaatagttttagaaggaatggtaccagctcctctctgtacctctggtagaatttggctgtgaatccatctggtcctggacttttttggtttgtaggctattaattgttgcctcaatttcagtgcctgctattggtctattcagtgattcagcttcttcctggtttagtcttgggagggtgtatgtgtccaggaatttatccatttcttctagattttctagtttatttgcacagagttgtttatagtattctctgatggtagtttgtatttctgtgggataagtggtaatatcccctttatcattttttattgtgtctattctattcttctctctttttttctttattagtcttgctagtggtctatcaattttgttgatcttttcagaaaaccagctcctggattcactgatttttttgaagggttttttgtgtttgtatctccttgacttctgctctgatcttagttatttcttgccttctgatagcttttgaatttctttgctctcgcttctctagttcttttcattatgatgttaggatgtcgatttttgatctttcctgctttctcttgtgggcatttattgctataaatttccctctacacactgatttaaatatgtcccagagattctggtatattgtgtctttgttctcattggtttcaaagaacatctttatttctcccttcatttcgtgatttacccagtagtcattgaggagcaggttgttcagtttccatgtagttgagcggttttgagtgagtttcttaatcctgagttctaatttgattgtactgtggtctgagagacagtttgttgtgattactgttcttttacatttgctgaggagtgctttacttccaattatgtggtcaattttggaataagtgtgatgtggtgctaagaagaatgtgtattctgttgatttggggtggagagttctgtagatgtctattagttctgcttggtgcagagctgagttcaagtcctggatatccttgttaactttctgtcttgttgatctaatattgacaatggggtgttaaagtctcccgttattattgtgtgggagtctaaatctctttgtaggtctctaaggacttgctttatgaatctaggtgctcttgtagtgggtgcatatatatttaggatagtcagctcttcttgttgaattgatctctttaccattatgtaatggccttctttgtctcttttcatctttgttggtttaaagtctgttttatgagacacaagtattgcaaatgctgctttttttgttgttgttttccatttgcttggtagatcttcctccatctctttattttgagcctatatatgtctctgcatgtgagatgggtctcctgaatacagcacactgatgggtcttgactctttatcctgtttgccagtctgtgtcttttaattggggcatttagcccatttacatttaaggttaatattgtcatgtgtgaatttgatcctgtcattatgctgttagctggttattttgcccattagttgatgcagtttcttcctagcattgatggtctttacaatttggcatgttttagcagtggctggtactggttcttcctttccatgtttagtgcttccttcatcagctcttgtaaggcaggcctggtgatgacaaaatctctcagcatttgcttgtctataaaggattttatttctccttcatttatgaagcttagtttggctggatgtgaaattctgggttgaaaattcttttctttaagaatgttgaatattgacccccactctcttctggcttttacggtttctgccgagagatccactgttagtctgatgggcttccctttgtgggtaacccgacctttctctctggctacccttagaattttttccttcatttcaaccttggtgaatctgacaattatgtgtcttggggttgcttttcttgaggagtatctttatggtgttctctgtatttcctgaatttgaatgttggcctgccttgctcggttggggaagttctcctggatatcctgaagagtgttttccaacttggttcccttctccctgtcactttcaggtacaccaatcaaacgtagatttggtcttgtcacatagtcccatattttttggaggctttgttcatttctttttactctttttttctctaaacttctcttctcacttcatttccttaatttgatcttcaatcactgacaccctttcttccagttgattgaatcagctgttgaagcttgtgcatgcgtcacgtagttttcatgccatggttttcagctccatcaggtcatttaaggtcttctctacactggttattctagttagccattcgtctaatcttttttcaaggtttttagcttctttgtgatgggtttgaacatcctctgttagcccggagaagtttgttaacaccaactttctgaagcctacttctttcagctcatcaaagtcattctccgtcctgctttgttctgttgctggtgaggagctgtgatcctttggagaagaaggggtgctctggtttttagaattttcagcttttctgctctggtttctccccatctttgtggttttatctacctttggtctttgatgatggtgacctacagatggagttttggtgtggatgccctttttgttgatgttgatacagttactctctgtttgttagttttccttctaactgtcaggtctctcagctgcaggtctgttggagtttgttggaggtccactccagaccctgtttgcctgggtatcaccagcagcagctgcagaacagcaaatattgcagaacagcaaatattgctgcctgatccttcctctggaagctttgtctcagaggggtacccagctgtatgaggtgtcagtcggcccctactgggaggtgtctccaagttagtctacatgggggtcagggacccacttgaggaggtggcgtgtccattctcagagctcagacaacgtgctgggagaaccactgctctcttcagagctgtcagacagggacgtttaagtctgcagaagtttctgccgccttgcagttccatctcggactagcagtgagcaaggctctgtaggcattggatccgttgagcgaagcatgggatataatctcctggtgtgccatttgctaagaccgttggaaaagcacaatatttgggcgggagtaccccgattttcctggtacagtctgtcacggcttcccttggctaggaaagggaaatcccccgaccccttgcacttcctgggtgatgcgatgccccgctctgcttcagctcaccctccatgggctgcacccactgtccaaccagttccagtgagatgaaccagctacctcagttggaaatgcagaaatcacctgtcttctgtgtcaatcacattgggagctgcaggccagagctgttcctattcggccatcttggacatactctgtttttttttttgtttttttttttttgaggcagggttgcgtctgttgtccaggatggagtgcagtggcatgatcgtggctcactgcaacctccacctcttggggtctagtgatcctctcacctcagcgtcctgagaaactgggactacaggcacacatcaccatgcccagctaatttctgtattattattatttttaaatagagatgaggtcttaccatgtttcccaggctggtctcaaactcctgagctcaatgacctggctgcgttggcctcccaaagggcttggattataggcctaagccactgcaaccagctttgccataatttttatgacttaacatcacgataagctttattttttgataagtttcttgtctcatcattggtatggaatattttatatggattataggtcaagaaaaatgataattttcctgtagtctgaatttcatttttcttattaagatgaaaatgtactttttaaataactacagtattttaatgacattacaatacgttttttacttatttgttcattaatttgataaatattattggggacctactttacatcagagccctgctaggtggtggggtagaaatagaaatatattaaggtaaagactgattcattttctgagtgtctatatgaatctaacaaaaatataagcaagcatgcttgaataataacaaaaatatcaaactaagtaatagacaaaacaactccccatctcttcttaactctcagaagccatctggatttctcaccttattggatgaagaaagtcaaatgatttggtcagtggaatcaaattttccaaaaaaactacaaagtctcctagaatcctcaaacacaaatgcggtgtactcccccatgaaggatgggaatgggaatgttgccctcaaagaccacggtacagccttcaccatcatgcactacgcaggaagggtaagtggccagaactgcataatttttcatgtgcactaatgatcaaaggtccttgggacaagctctagagttattgatattttaaggtgtgttatttggataaatggaagctggatgaacaacccacaacatgtacttttctaagtgattttcttttagcctgatgaggaattaacatcttcagaatgatgacgcacactgtgtgggccttctcataatgtttctagaattataactttatatgagcaaaggatccctgggtttaatacaaagagctctgctataaactttggaatattattcataatacagatgaacattggacatctgagttttcttgccttgaatatagtttttagtattaaagtattttttattaaagcatgtcaacttaaggaagaaagaaagccactctctcatatctttcccaattctctaaccaggtttgtaaaacatgcttcttacttcaacaccttcaaggacttcctcttacttgtataaaaatgatcattctccttagtccaggctaatatcaggtttctccaagctgatcataatttttttccatatcttaacctgccagaactcccctgtgcaagatctctgttcaggttatttttctcaaccactcagtgtttctgcattttcagcctcccttaaactccattacattaagcttgatatatcttccttgtcttcttaacaagatcaaattttatccaactttcagtattaaatccatgtttgtttatcctcagtccaaatcccagctgtagttaatgtcttccacttttgcatgtacagctctctgtctcctactcttaactcctttgaccccacttagtacagatggcgtgctagagggtaaaatctctcaccgctgtcttacagtgtatttcagttcatttcgaccagtgtttctagactctgccttatgacaaagaaggagcatttgagaatcaaagatgaacgaagcctattccttgccttcaaatatctcagcttcgaatagggaaaggcaaatgaacaaatattaatatgaataatgtattacattgatataataatatcaacaaatgtatatattacgatagggaaggaagcaatgcgtggcttaaaaaatgtgtagatgctttccaaacccagaccttcaaaggtgattgagagctcactaattataaaagagaaggggggacattcttggaaagacatagaattttgattcaggattcagttgtataggagagaatccattctacctatttaagtaggaaataatatagtttgagaaaataatcattgggagactctaaattgaactttcaggaatgacattaaaagcacaccacagaaaagagttactaagacagttacagccttatcttagatcaggaagcctctagccaaattaagaagctgctgctacagctactgctactgctcccacctgcacaagtagcgtgtgcaaaccctagcactcaacatcaaaggagtgagggactagacctggagattcccactgcaagggaaaatcatcttcacggaggctcaccagctaacacagcagaagcagcagcagtgtggttttcactgcatctacttctgagtcttgtgccatcataacagactggtggaagctaaagagcaactggatcccagtgcaaggatatgtggaaggcaggcttctccttttcagccttggcggtacaggcagcaaccaggatgcatgggcgatgccattccaacacagcacctacctagtatttgggaagttgtgtcagaagttcagtgcagggtagaaagggcggtaggtgacatgtctaaaaagattgggtggggccaaatcatgagtaaatatgcatgtacaaccaagggctttgtcctcttaacactgttaactcacgaagtatttttagacaaagtaggaagatgaagcaataaaaacaaaaaagcagagggcctgatacaggagatattggtatcatagaaaccaagagaaatgaagaaaaggggtcaataggaaatgtacctgggtgatatggtagttaggctaaacaggagctttgagaggcattagagtggcaaggcctcagaaggctggggtggtgagtggcacgtcagaaggaaatccatggaggatttttatgtatataaaatgtatatgtatatgtatgtataatatatacatataaaacatatttatatatacaaatatatatacatatatatatttatatatacaaatttatatatacaaatatatatttatatattatatatttataatgtatttataatttttatatttatatattatatatatgtatatatttatatatacaaatatatatacatatacatatttatatatacaaatataatatacaaatatatatttatatattatatacaaatatatatttatatattatatacaaatatatatgtatatatgtatgtattatatatacaaatatacatatatgtatatatgtatatattgtatatacaaatataaacatatgtatatatttatgttatatatacaatataaacatatgtatatatttatgttatatatacaatataaacatatgtatatatttgttatatatacaatataaacatatgtatatatttctatattctacatacacatataaacatatgtatatatttctatattctatatacgcatataaacatatgtatatatattatatatatgcatataaacatatgtatatatttatatattatatatacacatataaacatgtatatatttatatattatatatacgcatataaacatatgtatatattatatatatgcatataaacacatgtatatatttatatattatatatacactatgtaaacatatgtatatatttatatattatactcaatatataaacatagtatatatttatatattatactcaatatataaacatgtatatatttattatatatacacatgtaaatatatgtatacatttatatattatatacacatgtaaatatatgtatacatttatatattatatatacacgtaaatataggtatatatttatatattatatatacacatgtaaatgtatgtatatatttatatattaatacacacatgtaagtatatgtttatatttatatattatatatacacatgtaaatatgtttatatattgtatatacatataacaatatataaatttatgtatatgtttatgtattatatatacaaatacaaatttatgtatatatttatatattatatatgaatataaatttatgtatatatttatatattatacagatataaatatatatatttatatattatacagatataaatatatatatttatatattatacagatataaatatatatatttatatattatacagatataaatatatatttatatattatacagatataaatatatatttatatattatacagatataaatatatatttatatattatacagatataaatatatatttatatattatacagatataaatatatatttatatattatacagatataaatatatatttatatattatacagatataaatatatatatttataattatatatacaatatataggtatatatttattatatatacaaatacatgtatatatttatatatacaaatataaatgtacatatttatatatacaaatatatagacaaatatatatacaaatatatgtatatatgtatatatgcaaatatatgtatatatacatatatatgtatatatgtatatatacaaatatatgtatatatgcatatatacatatatacgtatatgtatacaaatatgtttttatatacatattatatgcatattctacatttatatacatatatttatattttatatttgcatttattagatatttatattcaataaatataaaatttattaaattttattaaatacttatatatttaatcaatacatatataagtataaaatacataaatataaaatatgaatatatgtatataaatatatactatatatttctatatgtatatatttctatatgtatatatagaaatattatatatacaatgtgtatgtatatatttatatttatatataaattctcatatatttatttaaatataaatttatatacataaactataaaaatgtatacattttaaatataattaaatataattcatgttctttgaatttgagagatttcactattacaaattctttaggaaaacagcaatcttagacttgtatttcaatttttcaggctatattttcttcatagttaatatttgttgaattcatagggagtattttacaatttacaatgaggtatgatgatttcaggaaattacttttcctaaggtttcatggaagtgactgtaagcggatatgtacttgatgtgccttctgagtctgtttgtactgtgtattggagatgcactagatgttcaataaatgctaattgcattaaagtcagtggaaatgtgctttggaataatagtttttaaatcattttatgttcagtttaaaaaattgtacattcacttaaaatttccagttttagtttcaaatatttttagaaaatttttgggaaatcaactaagtttaagtcaatgtaattattttgctgaattctgatagaaataaagcaaaacagagaaaaccaattgattagttggtgcacagcctaaacccctgtggaaacatgaatgttcctgttaaatcaccttaattttttaagcaagatttttctcatgggagtcagttttgtggttttataaaaatcttttattgtactgagatgtactaatgagtcttagccaaaagactccctgaggactcattcacatgttcagtgtagattatatgtaatttgtggcaatatgtcaagccatatgccatttgaataatcaaatgtagacacatacacttaaattttgagctactgcagtttcaaaaaaagcagcaacacattctgaattttataaatcaagacacgtagaaaaagttaactgatttgaaatcaacatgcaaggtctagtttggacaataggaggaacattgctaaatagctctatgatagtaaagttgggcccaagcgagagctcaatggccctggggttcttggctttattgccactgttttggccagaccgatggggtagaatgtatctccttcatcaccacttgctcctccacgatgggattacctggtctttttactggaaattcattacatttcataggaaggataattattactcctggatgatattggcatccagccccacctggagggactcgcctatcctgaaagctctgaccaggaagaccggccacgcttcagagtcttgtttggaacagaggctctgaggtgcttttagaaatgtttaagcaacattatttaaattatagctgaagatcttttctaaacacatttgaatttttcattactcataggagcacaatatattttccaatcaccattacagaaatattttaaagtaaatgggaagaggccgtacatgaaatattaacacagtctcattaatgagcatgaatctgaattaaagaaggcttgtagggttttttggctagatatttgttttagcaaatattaaatcatatatgggattatcacttataggggcttctcttaaaagtctgatgatttacatgatggataagcattaaattcagaatgtgtctaattttattggctattaaaattaagaatcttgaaagaagaaagaattatgggttggagaaagacattggctcttaggaaagttaaatttccattaagatgattctaaactaactctagtaagaaatagtatttttaagttcctaaattttgatgtgagatgagcaaatagattaggagatagtaaaacaacattaagtaataaaaattgcattaatgaaaatgtaggtcaaaagtaatagttatacaatatatgacacctacctatatgagccttgtttgttgtctgctcataggatctttgtctgaaagttgttttttatgaaaatttatattagcatgaagtgaatctctttggatctcagataagcatcccattgtgattggcctgaatggtttataggcaacaaattggtgatgtgttcttacacctaagatgatgcatccctgtttcagctccttctccccacaaatgcttatgcattataatgggctgaacgggagccctccgaaaatattttcaggcccctattcatggagactgtgaatatgatcttatttggaaaaagggtcttcatttatataattaagttacagatcttgagatgaggagatgattctggcttatctgggtggtctctacgtccaaaacctactctaaaagttaggcagagagagatttgagagaaaagaaggaggccatgtgaccacggggggaggtattgaagcagccaggagccaaggaacacctggaactcccagaagttggaagaggcaggaaggatccacccgttgagcctggtgtgggtgggccagattccagagtgctggcctccagtggtgagagggaacacttttctcttgttttgagccacctaacttgttatttgttgcagccatcctaggaaaccataaagtatttattggttcatcttgacagatgataagagtagtagttttatcagataacattgtagaatttccttgccacatttgattcgtttttaagtgattcctacacttctctaacccaggtttttgcacgtggttttccttacctggaacatcccttttctttgtctttccaaatcttatccatcttccctcagatcaagttcttggcctgatctgaatttccttgatctcattttgccctactcaataatgattcctgaagcttgcatgacattttccagtttacaaagtacttctgtgacattgtcaccacattcttggatgtaaatattactatttccgttttccaggtaaataagccttggtgaagttcagtgattcatcaaagattgtacagcagcatattaatttcctaggcctgccaaaaccaagtaccgtagactgagtggcttaaaacaacagatttattttttcacagtgctggaggatagaagttcaaagtcaagtgttggcagggttggttacttctggagactctgagggagaggctgttccaagcctctctcccagcttgtggtggtagccagccattggcattcctgccttacagaccccagttcctggcttgcaaacctatcaccccaatctgtgcctccatcacatggccctgtccctctgtgtgttctctcctcttctcacaaagatttaatccagccggaccgcatcttaatttagctgatttcatctacaaagaccctattgccaaataaggtcatattctgttgatctgggtggacgtgaattttagggtacactatacaagccactacaggctagcagtgacaacactgtgtcttattttcccccaagttcactgtgcttttctctcttcaccacatcgtggggtgacattcctaatgtgtttattgtctgtactcatagaattcatgtggcatagtggaaggagggtggaaagggcaggatccctgcctggggcccagctggccagggtttgatttccagctccattactctgtgcctttgaggaggataaggaccctcagttgccacaccatgatatttatcattaaagaaaatataattatgagcctcataaatttgtcctgaagcttaagtacaggacaagcaataaatgcagatacaattatttttactcattttttcaagtatgtgagtcatctatttccccaacaatggctgaaggtcttcagtgcaggaatacaacagtacttcgtaacattttgaactcatcagtcacagatattgaagaccagaaaatattgcaggagttatcgagtcaacttttgccatatattcagaggagaatattggtggccccattgagttgctcaaataaagtaagtggtaaagtgtccttgacttgtttaaaaaaaacagagtcaattcttttatcttataaaagtgctcacattatataaagtaatattttgaaagtcatgttagaatgtgtatttttatatacatgcggttactggtatcactttagtagatgataggaaaggtacaaccactcccattatattacagtattttctggcccttcttatgacacttgacttcagtggaaggtatgtgcagaaaattgagatatttctctaactatagtattaaattaaatatataaacatataatataaaaaatatataaaaatattgtataatataacattaaattctctaaatatagtattaaatacagaaaattgagatatttctcaactacaatattaaaagagaaaacagaaaacaaaatgttttagtttatgttaatgtaacattttgtttttcacagaatatttgggatgctttgtgatgagtagctccctttgaagggaattttgtaaaaaaaatatatattctttaccatttagttttataactaatactttaatcaggcatacagttgtgtgaaatgttactgcacattttaaaagatcctttccatatgatttccccttataaaattaaaacattctctacaatttatatacatattttgagttgtaattttatgatggcataaaaacttacagccaccttatctagtgtgcttgcaaatacatctttctgtggtggattttgattgtatttgtcaggattccttcgttgtagctctaaaccacaaccctacagataaaattgtaatctcagacacgtaggccctgatcattactgttcatgtcactgatttccacagacctttacgggaatcacatcactaaaacgttgctgatgggaatgacgtgaggaaaagaatgaagtcactgatttgtagcccgtctgtaaaatacgtagatttttttcttctgtttaaaaatagcgtatctctatctttgaataaactaagtttgaaatgttcctattgtttagatttatgctgttatgcaggtccccgagtagagatctttgtctcattgatgctgcaatgctgcagtcgattctagatgatctagtgatgaaagccaacctctttgcctttaaacattttttcttttctttttttttttttttttttgagatggagttttgctcttgttgcccaggctggagtgcaaagacacaatctcggctcactgcaacctccgcctcccaggttcaagtgattctcctgcctcagcttcccaagtagctgggattataggcgtccaccatcatgcccagctaattttttgtatttttagtagagacagggtttcaccatggtcttgaactcctgacctcaggtgatccactctcctcggcctcccaccttaaacatttttatataacatgcttgcgggatctctgtctgttgagcttctcagttccacctgtgtcaggaacacctttcataacgtgtcctttacctccctggagatttgtgggggacacattgtacccaagaagactctgagattgaacttttaaattaaaaaacaaaaaacatgaactaatcaacagggcagttttcatttgtttctctccttttctccaggcagaatccccagacataacaatcaaatcagtctggtctaagccaaactgatactcttaaaagctatttgacaaaggtattttgacctgcacagaaagaagttaatttacatctgtatttgttcacctcttgagcaggcgttttgaaaaataaaaagtagctctactaggctcctggtgttccactgctgacacgaatttcccctttggcagtattgtgtgggaggcatgatccaccttttcttacctaggttttgttaagacaaaatgtaatacctcatttagagaatcttctgcttcttcacatatttaatatattcttttatttcatgagctgacagaaagttataaaactttagattgttcagaatattgatagtttatggctagttggtatattttttcataaaggaatcaatgaggcacattcataaatttcagctgtgtcaatttcaagggactatccatatacagatttctagatatctagatgggactcttaacaacattactataggttcctaataaccttctttgttaattagtattcatcaatttaaagtgaatcagaaggaaagcaaaaaaaaaaaactagcggatagaatcacttaatgggaaagtaaaagaatagaagctcttgcttataaatattgatgatatacagacatcagtttaccactacagaagaaattgagactcttttcagcaaacctcagatagaaagctgaaaccaggcagggaaaataattggacacatttatatttgctgcaaatgatcacttatttattttgctaaaatccaatcttcacatatattctgtgatatattgaattcaagggtttatctcaaaactttgcattttaaattatcaccacttccaacaccagaaaagtggtttaattaaaaatttaattccaaccacttatttcctaaggattatcttttgcatcatataaataacatgagaaagggattataaatttgatggatgtatgaatttactttcattttgtgaatattgatgatgtttctcagagcagggagcttatcgactctcaagattcagttgcacatacacgatgattcccagatctccactctatttctgctgtgggctgcatattgactttttaatatctctattagtatagcatcttaaattcaacagaagcaaagtcaactaaactccctacccatctcccactcccactctttctctctcaactcacctcaaaaaagtaaaaaagaaaataaataaagctgattttttgtatttgtcccccctttcaattaatggcaaaaccagacacccaattaattaccaagtacaagctactgtctttcttatttaactctcaatccaaatactccacttcttatctcagtaccctggttcacatcaccctccttgttctctggactacttcagtagttcctcaacactaattgatggaatgagtactaattatcattaaagaataaaggaatgaatgaattttgttttgttttgatttgatttttgagatgaagtctcattgttgcccaggctggagtgcaacggcgcgatctcggctcactgaaacctctgcctcccagattcaagcgattcttcagcctcagcctcctgagtagctggaaccacaggcgcccaccaccacacccggctgatttttgtagttttaatagggatggggtttcaccatattggccaggttggtcttaaactcctgatctcaggtgatccacctgccttggcctcccaaactgctagtgaatgaatatttttacttaaaggaatattaactgcctcaaattcatttagtttttttgtttctctgataactctcttcaaagttaaatgtgattactttgatttgatttgttaataatagacctaaactattggcactgatggatgctctacttaccagttgggcataaatgataccttttaaacatttctgtccccaagcttatttctcatagttgaagaataaattttgctttctctcttcagaaccagaacttccaaattattttcacatttttgtttttcacctacctggtagtagaacagacacaattcagaagatgtaattgagattccttaatattttgggcttatattgctttttaaaatatattcggcaagattagttttttccttgtaaccagataaaaatttgggcagctccagtgatatttctggtctctgtctagtcatacaatgtcatttatttgctttacttggcactcacagacccaattcagtaactaagaactgtaatcgtcaaaacaacagatttaatggaaagtgaagtctcctcatgcctcagatactgcctagacattgtacggtggcctagaaagtgcctttttcttccttttcatgccatgctttgcctctactgatgtgcattgtttcactgtggtttcctgcacactgtgcttcacgtgtgcaaagctaacactcactcaggtgcttttctgggcgtcttagggggaccgactttcccaggtgtgggtgatgctcatctttggctggctgctccccctcgaccctggttttggggttgattccacatagaccctctctactggactccatgatttccaacttcccatgtgtctcttggcaggatttaacacagctctggcttgtgtaccagatgaagccctaccaccatatccttcgctatcaaaacctccatctgtggtgtggtctttgttttcatgtgctggctcagaacagctcaggccgctgcagcagaagccattatccctcccacatcgtcgcacatatccccatcctttgtgcttcttcccagggccaaaggccagtgcacagtatcttcctagccagtgagacaaggcaaaggtgtaagaaggttcccatgaagcctcccttctcttgacttagaggacaaaggaagaaaccgtggaaatgcacttatgtccacatttggatgttattaaagcaataaagcaatcgctattgtgtactcaaattgagcacaagatcaatagattgatagatgtagactttggtgtatgaagtaaatacagtagagagctagatagatgggcaggcacacacataaatcaaataccactactgacagacacacatgcatattagccatgctgtagtcttggatattcctacatgtctaacctgagggtagctttgttagaggaactttaacttttagcactttaactacatggaaatgtagatttcaatatcagaaatatattgaagatatatgtgagatactgtaattagcatttgatttgaccttagcatacctaacaaggtagcctgtgcaagcttcagaaaagtctctaattttaatgcagagaattacatataattctctaatttacatgtaaattatggataatcttagctaggtaagagtaatagggaaggaaaattaaggcgtatttataagagaactaagtagtgaatctctacacaatgcccctaaaggcccacctagggacataacaccatggttttgctattcagaggcattggtgtgtgcacttactgaactacagggagttgaagagtggcaacatccatgttttcaccctttgcccagggctccgtttcctctcgtctctctgttctgtagcctgtgaggcagtgcaccactgacaagcatgctgagacccattaggctctgtgcacaatactcattttgcagctcagacggcttctcctttcacatacagttctcctacagtggacgattctcatccctttgcctcgatctgtcagacttcgtcgtcccacattattctctttgctttcctttataccttcaagagctccattatctttctttaggagtcctaaacagtgctgtgcagcatctatccctgtcttttcctgagctacgtagcaggaaggagtttctcagctgtcagcaacaagacagagtagacaaaacaagaaaatggaaaattattgaggtccatcaggattccatctcaggaataaactgtactaaattttcaaagagcagaaaatgattacagggaatagattccccaggaaaagttaagcagacagacaagggatgctgaagtgatctagaggttatccacagcagaaagtagctgcattacctaaggttaaaggatcatgggaggagaagttacctctggaccccaggagctgagggcaggaggtggaagccacatgtttctacaaggccactactctggaagaattgggctatgaaaagtgggctgcaagacaaaaatggaatcagggaggaaattcagcccttgtaggagaggaagataattaccaaaacttggaccctcctcctgccttgtcattttctgcagtgcttttagggttgtagccctatctggaaggccaggctgagaaccccactgcctcaatgcatcttagggcagaaaagggcacagattcattcgagagcaaatgggcgtaccttgaagaaaaaagacatcacaaagcacaatttgtggcagagtccaggtctcttgaaagtgcatacctagacaaagttagagttgatagatacagacatataagttaaggctggctacccttggaaaaaggaattagagataatttttaattttgttacttttagtacattccaaattttacaaatgtatatgatatgcttaggctttatgtccccacccaaatctcatcttgaattgtaatctccataatccccaaaggagagaccaggtggaggtgattgaatcatgggggtggtttgccctgtgctggtcttgtgacagtgagttctaacaagatctgatggttttataaggagctctttccccttcgctcagcacttctccttcctgcagccttgtgaagaaggcaccttgcttcctgtttgccttccgccatgattgtaagttccctgaggcctccctagccatgctgaactgtgaggcaattaagcctctttcctttataaattactcagtctcagatagttctttacagctgtgtgaaaacagacgaatacaacatgtaacatattttacaaaatatttttaaaaggttagtccctgctgttttccttggcttattaaaaatttagtcttttaaccctgataacctcctcaatccaaggatgatattttaataacctttgatattagccatatcaaaggcaatctgaaaatctaaatagatgcccatttactaaatttacatataagccattcctagccccctaaaataatagttttgttgatggattatgctaatcgataaaatcattaaaattcagtgtgaagtggccagagatcaaaactcaattaaatagataagaaactgtggttcagagaagctgactatcatgttcccacaattaattatcccagcacatggcccatgagtgtttctataggttgagaagcagaaactataatagattgagaatcccttcttcttaacccttggtctattgttccttctactttaccacgctctcatttttatatcattttctccaaaattccaacaccatatatggcatatatagcgtaccacaataaccagggatttttgaaaaatcctgcactttattgccaccctcttagatgaaagtatttgaaagttttttttttccctctacaagaacttttcaaaaaatgctaactcccctaagaaaatagcttagccctgagtatacttatagtccaatctcatcttaaacctatcagcaatttaaaaatacgtcaatatctgctctaatggctgttctcagaaggactgtgtttctttatttaaaatgcactgtaggccgggcatggtggcttattcctgtaatcccaacactttgggaggctgaagcagatgaatcacttgaagtcaggagttcaagttcagcctggccaacatggcaaaaccctgtttctactaaaaatacaaaaattagccgggcgtggtggtgtatgcctgcaatcccagctactcaggaggctgaggcaggagaatcgcctgaacctgggaggcagaggttgcagtgagcagagatcatgctactgcactccagcgcgggtgacaaagtgagactctgcttcaaaaaaattaattaaataaaataaaatgcactgtgtacagttacttcctgcaaaccctgctcccttgctcctttctcacctgccagcaccacatagaaggactgagttaacagagcatcctaagctcctagtagctggagctgtgattctcatacgtaacgtgcatccaacttaactggggagcaagtttaaaatgcagcttcctggatttctctccaataaataatgactaaagaggtctggggtgaagttgaaagcatttgcatttttattaaacaccagaggacattctcctttagggaatctggaaagcacattttgacagacactaaaattattagccacatagtaggtgctcacatttcacagttttgcattattctctcactcggtacaaggcacagcgagaaaggaggctgcagacataaagaactcactattccccagctccagccaacccctggaccttctttaacaaggtgaagtaagccaattgctcttgctttcagttcagggaattaaaatccagtgttggtggatagagctatttctgtggcgttctcttgcctttggatttcagtttccttggtgattagccaagcatgagcctgacacccttcagttaggaagaaaatccatgtggtttggcactttgtaacttttgttctctttgtggagccaggaaactcagtgtcttgatgaattttgagtcacagacatggtgaaagttttataccccttttttcatatatagatgacataatttatcttttaattgtatttattgcagtgctggagtgttacagcaagtacttccaaaaaagccgcatactgtcactgctctcaagtttatattgcacccctcatttggcatccacactggagcatttaaatgaggatcgctaactgccgcagcataagcaaaatgctaagttttcttttgagttattttattgaacagaatcattccaaaggaaattttgaatacatgacaatttccttaaagatccatattgagtcgcatgaatataaatttctctattacatgcatgagagacgctgccatgtactgcatgaatcctgtcttccaatcttgagaaggaaaaataaatacataaagcctgaagatcagttatgtaaagagagtggggaaaaggaaggcataaacccagcctctatctttggctactttcatgcttttctcctttcatcccacaaataataaaccaaaaaagatgagcaaggccctgagccaagcagctgccctgagtgaccctggagagccttcgacctaaaatcttctctctgctgctccagcagcaccaacctgctctccccagtggcacagcagagagcagacctttgtgtgtcagcagacctgacactccagactcaaaaagctctaggtgaattctaatacaggctgagtttctccttagtgctttttctttcctagaaatgcttccatctcactaggctctgaggctcactttcctttgaattgcccgggaggccactggccttgtctgcactgttgtgcagcttttctttgtttcttctctatgcgaagttattgccccttcctggagctggaggcggcggccctcagtgaagtccaggtgctgcgtatagatgctgatgagtttaatgggctctcctttctagggagacttcttttcttaggaagcatttccttcataagttgtcaatcagtgaatttcacctgagacaattatgggtctagaatgagaagctttttattgggaggcagcctatttagcagcctcaagacagattacctaggtaatgccatgagtccttctcaagtaagtcatgtataaaactctggaaaacggcaaagaagaaggtacaggtgagcattagaaacatcaattagggatattcatgagaaaactatagtaaaaactatgcaaaggtaggtaggaacaagcctttttatttatctccaaagccaccgagagacacacagagagagagagagaaagaatgggagagataggaagaaagagctagagagagaggtcagcattactgcctatgtgttgtagatgagaagccttggaaactcagtaacttgccctggttatccaggccctggggcttgttgaagctggactccagaaggtatgtcactgagcaaggccaatgcacttttgacaacagcttgatgcctctcagagacttgggcctagaaaggcagagttggccttggttgctggagaagctggaaaggagtttattgaaaggaaaagcagcagtgatggcaagggaggaatctgtgagtagggtagaggaaagtagggagtacaatggggaaaatgggaaaatgctgtaaagcgaaggatttaattaggcaaaatgtacatatttctgtagacagtgaggatttatcagggatccaacatgatcgatcatcaagttagatattttttttccatttccctcttttcttcagaattaactcccaggttgtgatgattaacttatgtgtcggtttcactgggccatgggatgcccagatggctgcttgaacatcatttctgagggtgtcttcgaggtgttttgggaagagattagcatttgatcagtagactgattaagctgttgccctcgctagcttcaagtgggtgggtgggcaccacctaatcccttgagggcctgaatagtgcaaaagagaggaaggttgaaatctctctgcttgactgcttgagctacaatatcaatctcctgcccttggtactcctggatttcgggccctctgacttagactggaatctacactattggctctctggctgtcaggctttcgaactaccttgtcgactttcctgggtctccagcttgcagatggcagattgtgggacttctcagcccccataattatgtgagccaataactcagactatatatattatactatactactggttctattcatttggagaaccctgatgaatacaaagcttttgtattcatttaagacaaaaagaaaacattcgggctgtcttagtccagattatactttttttttagaatcaaatttgttatattttttaaatcaaaattttaaagaatctttttagttatatttattgaaattacagttttccttttagtgtgcacaatttttcaatgcataggtttatttaggatcttattactgtgctaagattctaaatggatatttttctcctagctccctgccactgtgatgatatcaaaggaggcttggtagggggttaggacttccagcactgtgcagagataataccccactacccaatttatgaaggctatgtaggaagcagtaaagaagtgtttcagcccattccactgctcatcccacagccagggaagaatgactggaggcttagtggagaggtagagcctttatcttcacccagaaataatgaggattcattcttcttgcatatcagaggaggctgggtagggacctagacatctactctgacaaggcagtagtgaggctgtgccttccttctcttgccaagtgctggaaggagccagctagacagaaagtgatgctggaaacttcaacaccctcctctcaacaattggtaaaacaatgacataggcaatcggcaagggtgcaggagaactgaacaacaccatcaccaataggatctagtcaatatttataaacacatccaccagcaaaagcagaactcatattcttttcgagtacccatgggacatgtgtccagatggactatctgctcggccgtaaagcaaaactaagcaaactcaaaagaattgaaattatacagagtaggtttgcctaccacaatggaatcaacccagaaatcaataacgggaagaaaacagccaaatctctgtatacttggaaacttaacagtgcccttccaaataatccatggataaaaggggaaatcgtgacagaattaaaaataatatgctgaacctaatgaaaatgaaagtacaacatgtcaaacttgtgtggcacagctaaaatagtattgaatgagaaatgtatatcactaaatgcgtacgttagaaaatagggaaaatctcaaaccaataatctaagctcccatctcaggaacgtaggagcaaaataaaccacagtaagcaaatggaaaccgatgacaaaaaagcagaaatcaatggaattagaaaaaaaggagaaaatcaatgaaacaaagagctggttctttgaaaacaccaataaaaattataaacctataatatgagtgacaaagagaaaatagaaaatacataaatagccaatatcagtaataaaacaaggaaaatcattataggccctgtagacatcaaaaagatacaaagggaatattacaaacagctctcacacataaattctatgacttcgatgaatggatcaattcctcaaaaaacacaagctacttcaattcacccaatatgaaatagacaatttgaatagcaccataacttttaagaaatgaatttgtaatttaaagtctctcaaaaaagcttcctattccagattgtttcactggagaattctaccaaatgttttaaggaaaattaaagccaactttacacaatcttttctagaaaatagaaaagaatactctctaattcatttgataaagcaagtattatcctaacaccaaaaccacacagacagtagcatacacacacacacacacacacacacagagagagagagagagagagagagagagagaaaattaaaaacaaaaaacatccctcatgaatataggtgaaaaaatatgtttaatatattagcagatagaacttagcaatatataaaaagaacggttttggtttttgttttctttttctggggatgcacagctgattcaatatctcaaaatctatcaaggtaatcaatcacatcaacaggtcaaagaagaaaaaaatacatgattatatcacaggatgaagaaaaagcatttgataaaatttaacatccagtcatgataaaaatcaactcccagacaaataggaatggaaaagataacctgaacttgataaagagtttctacaaaaatcctacagccaatattatatttaagggtgaaatctggatgttttacttctgtgatcagaaacaagacaaggatgtctgctctcaccactcttaacataggctgctggaagttctagcaagtgtaataaagcaagaaaggacataaaaggcaaacagattggaaaggaggaaataaacctgtgcttatttaattgcctttgtgtaaaatcccaagaaatctaccataaaaaaagaaaggaaagactcaaagaactaataagtgagtttagcaaggtcacaagacacaagataaacattcaaaaaatcaattgtatttctgtatactagcaatgggcattgaagtgaaccatacaattacatttacaattgctcataaaaatgcaatacttaggtgtaaatctaacaaaatatgtagggaacttgtgtggcgaaaaccacaaaattctgataaaataaattaaagatctagataaaaagaaagacatttcatgtttatagatttgaagacaatatagtgtcaatttaatagtaatcatcatagtaatcagttctccccagattgacatataggctaatgcattcctatccaaatcacagtaaaatttttatagatataaaggtatagatgataccattctaaaatttacattgaaaggtaaagaagatagaatagctaaaacaatgtttataaagaagaatgaagtgggaggaattcaccttctccatttaacgtccttaaagcatgttacacataggttaatggaacggaataaggacacagaaatagaaccacacaaagggactcaactgattttggggaagtgaaattgtttataaattggcaacatgcgggatccgtgtggtgatgtaaatattctatattttcactgcattaatgtcaatatcctggttgtgatagttttgcaggatgttactattgaaagaaattaagtaaagagtacacaagatttatctgtatcatttcttacaactgtatacaaatctaaacttatttcaaaattaaaactttaaaaatatttaatggtaatagaaacaggatacatgtagacacaataaagggcataaatggacatcatttattttgattttcaaattgcctttttttttttttttccgagactagagtgtcactctgttgcccaggctggagtgcagtggtggcgtgatctcggctcactgcaatctccacctcctgggttcaagcgattctcctgcctcagcctcccgagtagctgggattgcaggcgtataccaccacacctggctagtttttgtatttttagtagagacaggttttgccatgttgaccaggctgatctcgaactcttgacctcaagtgatccacccgcctcggcctccaaaagtgttgagattacaggcatgagccactgggctgggccctcaaattgcctttgacaaggccaatgtgaaacttcactgatcaaggaaagtatcacggttaaaagacctaatttggaatcgagtagtattttatctttaaatggaaaagaaaagtatttgtgcatgcttgtgtgtgcatgtttatgttgtgtatttaaattacttggctgtgtccactagaaatacctagaaacattggttgatccagtactcaatcacacaatgtgctattgtgaatccttacagttcagatggtctccatgtcatttctcttcacaaaaatttgcaagatgtcccggagggaatacttgattccaaatttagcaccaggaaaagacagcaacaacaacaacaacaacaaaacactgtttgcaaccatgtgttaacaatccacgaatgccaattttatgtaacatgttatcaattgtttgcattattatgaaaaaatgtataagctatttgcatagtctctaatacttgtgttcatctgtcaactcaaatcctgtcagtactggtcatctatatcttatgaatagggtcaaaggcttttaaagttggagggcccttaggtaatattatttaacacattaagaaagactcaaagaatgtaaagagcttgtctgatatcacaaaaataattaagctcacctgcttcacaattcgttaacttcatacaaatgtccttttagcaataaaaaaagagttactaaacactatgcttcctacaaaaatcaaactgccatcagcaaatgtttgtcgttgtatgtggatgttaaatgcattttcccaggtaacagtgaattgaagtctccaaatgggagtttttttactttagtttgaatggaagaccttcagcattttctctagatatccacgtaaaccgggtgccatgtatgagaactttccaaagaacattatcttgtgctgatgaaagattagttagcattatattaaataaaaatgacagcacaatgttatgctgtatttagttacagtataaccaaaacttgctatccatttcactaaatgattattgattgcatccaatagacaaggcattgtgctggctgctgcagagacagaactgagaaatgcgtagtcatcgccctgaagacacttggtagcagttttaccagggaagtttggaagcactatcaaaaaacaagcccatagcatgaacaaagataggcaagaaatgtatttaatgaaactctgatggtccagttgtgcgtgtgtgtgcatgtgtgtgcgtgtgtgtttcatttgaaatcatcggatttccatgcagagactaagctagaattgtagattgtggctatatagaggaagactctatatgacagagtcagaggttctgaacaggagaaatgacattctcagtttaatgtatgcatcaaatagcagtgttgcattaaagtgaggatgtaaaaaggccagtacttagcctttttgactatttgtctgtcaaaataataagtgatggtttttactagtgtgaaggtagtaaatataaaaaagcagggattgaagggaaaatgaggggaaagctgcagccattggcagatgacagggagccgtcctgggggaggggatcccagatggcaccctggtttctaatctacataacgtgcagcagtgaacatgaggaaggagagaaggacgaatgaatgattcagagatttcaagtgagagagtattgaatttttaagtaagaaatatggccatcttctgagaatgagccaatctgggctggggctggaagcttgaaaagaggcaaaaagatttctaacagttactgtgaggattgtaatgtggcattatcaagaggtgaattggggaacttcttagcagccagacagggtccatctgagatgtcagaatgaatttgtggcagatgcaaatgataccgaattacagtcagatccaatgattgaccatgtcattcactacaattaggaatgactgactatgatgaaaaaaaaaatggtggcagcttatcagtggcttttgctacttaaatgctaagccctaagtttcaggttttcttgagacctgaaagaagtcaaaataggccgttgctttagaaactatggatgaattgaaggaggggagatgccagtgggaatgaaaagcatgtttagaaagtggaagagaataacgttaataggctattagagatgagagtcaggatttgaatatcttggaggtagggtacttccaaatatttgcaccagaaatactcaaagtcatggagaaggatatgattggaggcatttggatgagatctttagtaaatccatagtcctttttgatgtaactgaaatgacatttgaggaagctaggaataaagtgaaaaatgaatcactgatactcacagaatttgatgatcatacctgttatatagtatgccagaagaaattatctcaacttccattaattttctagaagtgaattggaataactactaaagtcatgtgagcatggttgggtaagagcacaacacagtaggactttgtagagattacccacactatttgtaaccccttatacttcaaataacttgtttttggtctacaaagcaatggcagaatctcagctcactgcagcttccgcctcccaggttcaagcaattctcctgcctcagcctcccaagtacctgggattacaggcgtctgtcaccacacccagctaatttttgtatttttagtagagatggggtttcactgtattggtcaggctggtctcaaactcctgacctcgtgatctgtccaccttggcctcccaaagtgctgggattacaagcgtgagccaccgcactcggccctaagaactttcatgtatattacatcacaatattaacagtgtggtaatgcatttttactctcattttaccaagtaagaaactgcagcactggaacattgaatgacttgcctaattccacatagctttgaagatgtgttgacttctccatggttttgctgggcactgctgctcctaactcaggaaggcatagggaagccaagcctctagatggaggtttcttgacctcagcactatgaacatttatagccagataactccacgctgtgggagcttctctgtgcacacacggatgtgtagcaacatctctgcccaactatcacccccagttgtgacaggaaaaatgtctccagaaacgaccaagtgtcccctggaggctatgattgagaaccattgctctaggttgtataaattgttcacatttaacaacgtatggtgtgtcacatcatatgtagctcacatttcagtatcactaagccatgtggtggcacaagtgcaaactggataattaggtaatggtttacttgtacctgaaagtagtttaagattttggcattgtcccccagctcaactgatcttctgacccaaatttattggaaaacctgggaatgtgtgggatgccttattacttctgttttatttaggaccttgtaacagcaaagaataaaaactcagcctttatgggaaaggtggagataatcaggcacccattgtggcagatgcaaatataaaagcctatagaaaggaagttgcatcagggatcacccaccttttccaggtccttccacagtctgcacagccctttcttcatagtttcttctgctgtctctaatatccattcactgcaaagaatccagtcctctctgggctctctagacaaaattcccaaagaactcaggttagccatccatactacctcatgggtgacactcaaatgtccacaggcataactcttatactcccgcatggccgaggcacactctccctcaggcgaggaggcaaattctccctcacggcggatgctcgccctccctcatggcggatcctcgccctccctcatggcggatcctcgccctccctcatggctgatgctcaccccctttcttggttgttgctcactcttgctcaggagtaaagaggcctcactggttttgtgtctcccattatccactaccggtccacactgggcagagaacagactatgacacactgaccgtggtctgtgccccaaggtatattttcaaaggtaagccttttaaagaatgtatggctgatcagcttcccatgaccactgagatttcacacttagttgacactaagagagacaacaaactatttcagtcttcaaagatcaagtttctcagcctctactagtaggctgataaaattataacatccttctaattgattcataaatcacctatggtgaagaagattgccctttagaaatccagaattaattgtttcctatgtgttcttaattgtaaagacttaagagtactaattctttaagtattcaagcagaactttttaaattaggagactattaaatttctcaaactgaaatcacacttcattccaaaagtttcgcaagtgtgtttacttggtttagtgagttttctgagcaagttagagtccttaagaataaaggaaactacatgaatgtgaaccgtcactatttgctcttaaacttggcaatcaaaggagaccttcacaaaatagaacagaagagggttcccttgtttaatgtacagaatgagaacaggcagattatagcttggaacttgcatgtaacgtgaactgtaagacctgaagacacttcttttatgaatatttgaaaacttcagctgggtcaagttatcctttaaaggaatttattttcacagtcatgttgaatcattagtaattatgctgctttcttttattctaggtaatgtatgatgttgttggggcgattgaaaaaaataaagactccctttcacagaatcttctatttgtaatgaaaagtaagttgattttttttcctgccctacactggttaaaatgccatgcatccgttatttctttatctctgaatattttcctagaaaatatgctaccagctaaagcataattgaaatgccttttgcattctaatgcccagactaatgagaaatgggtcttgctgcactatatgttggctacaatgtaatttggagtccaatggaaaccataatttaactaagcttttagcagatagaaatgtaaaatacccttactactttagtgggttgaatatagaaaagcttttctgtgaagactaatgaagatgagtatggcttccaacgttatttaagccacaacagggagaatttcattacttaagatgactctggagcacaactaagggtggtattttattcttatgtactttcagttataaaatattcatgctcactatgtaggaggagtagaaatagaaggagtatatatatgtatacacaagtaagtttaaatgtataggacccttctacttaatgagcattaatactttatatgcatatatctactataattctacactatatacaagactgtatacaaaatgtatatatgtgataattaaatgtatattcatacatatatacataattctgcctctagtaattattttcttaacagcagttctgcagtgattcacatttttctaataacctttatagtgaattaaaacattgcatcttgtatgctttaagttgctataaatgaaatagtcattcatctttaaaagaagcacaggatagctttttcgtgaaatagttgaatgctctagcattgaaaataagaaatctatatcacttctggtttgagaaacatatttgcctcaaattacagcagcacagctgtaatacactgtttttcactgaagattattctgcttgcttctcagaacttatgtttattgtgagttctcttagctaaaactaacaaaaaaaacaaagaataacattatgaagacggaaaagaattggtcttatttattatcattggaaaatcttccttttagtgtgctattatttgcacttttatttataatgcacttctcttttatggagatctaatatatagcatgtatttaaaagtttacacaatgctttttttacttttgtatttcatgttaataggatatgtgtgtgtgtgtgtgtgtgtgtgtgtgtgtgtgtgtgtgtgtgtgtgtatttagaatgaaaatatgatggctagtctgcttatcttaatagagtccctgtattttaaaatcattcttttatgtaaatttgtacaaaaaaaagttccaggaaaaaacaattcagtctttttttttattctttaggaggaaggtgcttctgagcaaaaggacagaatttacaatgtacccttttgtatttatacaggaggtgtcagatttttttttttgtaaagggctagagaataaatattttagaccttgtgcaccataagatccttgttgcagttactcacctctgctgttataatgtgaaaaacagctgtagacaatacaaatggatgtgactgtattctgataaaattttatttacaaaaacaggcagtgggccatgtttggctcaggagccatgattgctcactcactctatcataaaagcaaaatatttgtggttgccatcatgttttatgaatctgtgaaatactttgatgcttgtacatatttattaaaagcaagtgtaattcataaataataatttttatttgcaggtactttgcttatagtatctaattcaattttcgtagcatcaaaaagctcccagttgaggaagatggtgaggtctgttgtagaatgtacacaagcagagctgagtctctgagaccactaaccaggtacagtcagggagcttggagacagctcatagagacacacagcaaatacactcattagtgcctaagattagaagtaaagtctacttcactcaaaaggaggcagaaaaaaaaaaaaaaaaaagccgaactccagacttttaattctgctcacaggaatagaaaattttaggatttaggaaaatttaggatttactgtcaattatgttaataattattgagtctttttttttttttttttgctgtgtgtctctgtacacttgcttataagttaggttatccctctttacaggtagaaagaccttgtacaatgattgtagatcccagtgagggacacttccgctctcagtatttatatagagtgacatgaagaaaatggtttgtggtcagtgactccttgtaatcccagtgagagaaatatgcctcttcaccaggagttcctttgctcggttttaagaggcaaatggatagtagagttctctttaaagtcctggaggaacttgctgtctcctgccatgtgctcagctgtggtcagggctctcccgttagggcccaaagcgtgatggcatctccctgtgcccataggatgacatggatcttgctatatcttcatgcagcctgaccacatgattcagggaaaatacaaaactgggtcagttacatattttggaccatatttatgtctcatgttttcagttttttaaatcttttatttttctttttaaatttttttttgtactacccaccttctcagtaatgttttcagttttattagaggcattttctcaattataagaataaaatgttgcattgcttatctgtgggttcacttatacatagacctgctataactataaataattatttaagttggctatactattatgtatttatcatttaactttttattttgaagtggttttaaacttaaagtgacgaaatcattataaagtactcccaggtatcctcttcccagattcatttttttcattacctttcttttaccctcttgctatctttctttctatctctttccatcttttgttctcctctttccttcctttgtcctgtgtgtgtgtgtgtgtgtgtgtgtgtgtgtgtgtgtgtgtgtgtgtgtgtttactttctgaatcatttgaaagtaagttgcttgcctcttcttgtctaaatagtttggtgcccaccctgagacgggacattatcttacataacttcagtaaattatcagaatattcaacagggatgtactactcatatctaatccagaattcatataaagttttaccaattgtcccactaatattagtcttttatggtcattttctcctaattcaggatcattgattgcatttagttatcatttttcctttaaatctgagacagttcttcagcttttctctctctttcatgactttttttaatgccagttaattcgtagaaatcgctctgtttgagtttatttgctatttctttattttagaagcaggttatgaatttttggccaggagtcccaagaggtagtggggtatccttctcggcacatcacattcggaggcagtcacggtttgaaacaggttcaccatgagcactgtgataaggcggtgctcttcagctttttctaacataaagcttgctgttttccctttgttattaatgagtaatttgtgagaaagtactttgaaactatgtaaatattctgttcctcatcaaacttttacccattagttttacatgcgttcatgattcttgcctaaatcagttatttcttatgattgcaaaattttgattttcttaccccatctttcaataaacagtggcattctgctataataattcccactgctttattaattatttatttatgagtgtacactcatggattcttatgttattcaatgaataatgattaattactatgattatactgatgctaaaattgtttgagacttgaccagtaagaaccccttcaaagctagctcctatttctttttgacatagtctcttgactttttttttttttaacactgccttacattctggccttccaaaaatgttccagaatcatttaccttgcctcaaatctagaatcagacatttgttcaggaagctttgatttatcttagaaaagaatggtattcagaaactccaagatctggaggctgggtgagctcattgctactggtgtatgattgcttttaggaccttttggaatctgaacatttaagatgtaagtatagataacatataggtgtatagatctgtaactctgtattaagaatcatggatttctcttgctatctctaatttcatcccaacatcacagggccccttttgcattgcataattgtatctccttttcctgacagttcttcctgcttccctgttcgtttattacctaatgtagggatttttttaatggaaagcattacagatatatattatgtcacccgcattttgcacctgggcaggcaaaataatttgagtatggcaaaggcagaaactaaacactttgccacaaaacgttgccaactgtctgattggctaagcgtgatcctagtgatttatgttcattatttcacattttaattttgcagtgattctcaaagtaggtactgtcatcattattttataggaaaggacacttaggcttaaaaaccacctacattcagatataagtaacacaagaaacattccttttgacccttaaccgccacatacattgttttccctgtgatttttaaatttgtaatccaaaatccactcaactgagctctaatttcttcctgaggtgtcaagaaaggaatatggactcatggactcagaattatttgatttttataacttaaacatgaaaatatatcattttgcttttaccttttcagcttaactgtgttttttgttatttgttttgttttgttttgttttttaaataaaaggacacttcttttcccttctttcacctagcaactggtgcaccaagtaaggcaggtcctctcacaggtacttacagacggctctgagacaggtgagttaggtcctggggaaacattttcctgagtagttattttcctggaatggggcgtttctaatagagaccataagtcttcatgatttgacaagtgcacaaaagccccttaggtctgagcaggtaagatttggttctgaaaactaggatagaagtgttactcagttagagagcaaggcccagttgggatcaagactcctggtcaagggtagtgaatgtcagaatttgtcaatgatattaaatagtggaggaaataaaataaggatacaggaaaaggtagactcctcaatctgctgaacgaatgacgtcttgcacccagaatgtatcagtggctagagctcttgtatgaagaataagttcaatgcttaagtaataattttagtgccacttacgatattcatttatttatttcctagctagtgaaaatgtcgtgatcaatcatttgttccagtcgaaattgtcacaaacaggatccctcgtatctgcctatccttcctttaaattccgaggacataagtctgccctgctcagtaagaaaatgacagcttcttcaattattggagaaaacaagaattatctagaacttagtaaggtaggagtttttatgattattgttggattatttttaattttgataagtatatttgcttctttttttttaaaaaaaagcacaattttaaataccaaggaaatagatattctaatagaaagtattaaggaaaagaatgcctatctgatgtataaccatcagaatgaaggaagagtagaggaaggtgcagcagagtgacaattttaatagtaagtatagtccgagtcattttattggttgtctgtgcaacatcccagttctgtttcatctctgactgcctttttgatgaatagaaggtaacttcagatactgtaggcttagagggagtaaacttagctatcttattctgttgatattaatcacttcagataactgaggtctctaaatgataaattgttgtttctcttatagacgtagggtgttgttcaggtgctaggatgtttttactgcatgtttgtagatgtttaattttattgtattatactaatttgtaatgtatatttgtctcgcaaaagtttggttgtatacacaaactcaagattctatgtgccaaaagagaactaaaaactcagtgaagagttgtttcaaactgataggaaacatgtatggaatgttttaggtttcttcagaatccagtgccagatggtattccagagtgttttgcttatgtctaccaaaactataaaagatgaggaatatatttgggaaggtgttcaggacaatcaattttagaaatgcaattgttgcagcttctggaatacattttaacttaccaattaaaataaaagcataattaaattcaattctattttagaagagtggccaaaatgtgtaatatgagtgtgagtgagtgtgagtgtgtgctccagccagtggcttctagaataaaagatcctttgatgtagttgtttagaactaaatgatcatgagaattagtctctgccacatagaaaatggcattttttacattaaaaaaaaagaacccaagcttatccttataagaaagatctctatgactggaggtcttcctgaaccttctggcccctcttttctcaatcatcctaaaaatcaagagcaaaaaccatcacacactgctaacctcaattattaaacattacgaagcctaggtgccattactcttttccctaaaggactgcagaagggaggtaactcacagtagttcctccacccagaaagggaactggagtgttccatttcaagggacagacagctatttattatgattattccttaaatgttctatttctcacttcccttcaaactgccttcatccatgcacagccacccctgtggccaggaaaataggattttccctactctttaactgagcatgacacgttgtattgtgtttgtagaaaacgggttgatcttggcccaatcacttcattttacgttcacttgtcagtaccaatgaatcactttagattgacagtacatcttaacagaagaaaatgagctattgtcataatagcaaaagcactaaatccacaagaatgttatctcagatttccttcttgtatcaagaccttttttaagaaaaacgattttagatcaataagtccattagtctaatatataattttgtgaaatgtaatagtaggttagtggctgaggttccttttaaccctgggtggaatttaattaattaccttccgccctttatttctgccctttatttcgttttggcctcattttcactgattttatgtctctatcatcatgtaatcttttctacatatgatctttttcttttcagggctgcacatatttgcttatttgaaaaaaaatagagtctactaccattttttacagataggtaatttagtaaccttttcttagtagttataaaacgaggaagaggaggaaagggaagaaaaacatggtaagaaagcatcagaccattcattcattcaactcctgagtgtagttaaatttaagggaacaaaccaatgataattgacacataaaatctttgtaacataaaacaccatcattttgccccagagtaaactacatttcatgataaatatgaacagttagtagcataaccaggatatgatcgtgagtttattgtaccaccaagcaaatgaggatctatgtttattttcacactaaaatgagtgcaggatggtgatagatctgatttacacaacagccctgtacttgaaaggttggcagtaacagttgttattttacaaatagttgcccatttcctcaacttatacaccattacaaaaatcacttggcactgatttgtacgaactgtgttttaaatccacatttgcctgtaagtgaatgtacatggatgtgagacttaatattttgctcttctgaactgaaatttagtaaaataaatttgctcactttttctttttctccattctgtcttctttccttcctttcttcctccttcttttcttcttccttccttctttctcttttttcctttctccctcccttcccttccccttcctccctccttttcctccttcttcctttcctttcctttcctttcttttctcctgtccttcttgtctttctttttattacagttattaaaaaagaaaggaacttctacatttcttcaaagattggaacgaggagatccagtcaccatagcatcacaactcagggttagtgacgttttcagatttcaaaaacttaatgtatgtttatagcaactaaagagggtttatgtagacttttttttccatttttgacaacttaaatatcttcacaaaaaaagtaaacatacacacacacacacacacacacacacacagagtaaatgcataatgagatttaaagacgtaaagactttttatttaaaaactgctttatatttttagctagtgtctcctttggagaatcagttgggttctacttctctccttagaaatcactaatggatattattggaaaacttcagaagtgcactccacacttcattcattgcatcaggcccaataactcaaagctgccagatacttttgataatttttacgtgtctgctcagctacaatatattggggtcctggagatggtgaagatcttccgatatggataccctgttcgcctttccttctcggatttcctgtcaaggtaaattcttctgctcttaaaatcgtcgttctcgctgctgttcagtgcagtgtactgacactgacactattgtagcaagggtcttctgttgtcttttttggcactgcttttgttgtttacttttttctatctccaataaacaaaatattctgggaaacaatgaaatacactgacaaagctcacataaaaaataattaaactgtactgaggacagtatcttggaaaccattctcatgttcctttcaaagtgtggctttccttggattaaagttttgtaaaatgattgcatgtgatatttactatttattatttaaaaggagaatgtatgtaagtgattatttccccttttatatatgaacaaaatattatttagatcagtggttggcaaactacactcatgggccagccaaatccagcctaccacctgtttttgtaaataaagttttattggaacatggccacaatcatttctttgcatattgtctgtaaccacttttgcactgcaatagagatagacagtgtgccatggtgtaaaatatttgtaaaatgtttcttatctgcccctttagaacagaagtttgttgacctctgttttcagtaaattcagctgaaaaatacactgtgcacaagacagtgcactcattcctaggataagctcttgtcacgtgtcctcatcttcatgtctgtattagcccttctcccatggtagccttatcccagccatttgcaagaagcacctaaactcaccaaaagcaacatcatcccctcaggctacatatttgttcatttgtattttatttgatcagaaactttagtctgattttaagtaaattataatcctcactgatgaatccattttaagtaaattggttgatgggtagtaacttaatttacagatatatgctactaagcactattccaggcctcatctttaggtacattgttgtgctatacactctagcttgatgaatgtcccagtttagacaggtaaatgcatacgcaaataatggccattcagtgcttgtaatattacaaagggttggaatattacatgggttggaatattacaaagtgttacagaagcatagtaagaaggtaatttgggatcagagatagctttcaaagatatttgaaagatattacaatcctggtgaaaataatgagactatctgtttttaagcattcaaacaataaaacaggggtgggcaaaaaggaaatcagaagacatttggtaattctatataaaataaatgagatcttaaaataatactgatgtaaactaatataagtattgcaagtgtgaaatctcgcatttatgtttaaaaattaactatacaactacagtatgaaaaagtctgtttgataaaccattcatccaaaaaagagagattttgagacttttgttgactagttcaatgtgagccactattttgaggaagctgtgaaacaaaaacaaaataagcaagccaacaaacttaaataactacatttgaaatatttaattcagaacaaagggaataatatttaaacgatgactaaaattctgtgtttaatttttataacatttgttttcccagaggaaataagccgcatttacttattgtgcattttggtaaattttataaagacacatagaagaaaataaacaacatatgagttcagcttgagccttccattttaaaggggtagtagaatatgtttagaagatagaagataagcagaaccacatggggatggatgtatttaaactgtagaatatgtatttcagatagacaagatatttgtgtttaaaatttaaaaggtgcttgtaaatgagataatagacatgttgtctcttaatttataaggaataactacaaagttgggcttacacagaaataaatcaaagctggatataatacttctgggggttgttttggacaggagtcatagtagctatcactgactgttgcagggctttgggaaggacggctcctgactcgtctctttctggtccctcggtggatatcccttcatagtcttcagagatgccgaacctgttaagagctgatatttcttacattttatagtgtgtgtattaaaggtcagccctcccaccttcttaagtgtagatggcctttggttcgagtttaaaaatgctcttgtgtaagtttaaaacaatagattccccaaatttatcccaaactttctgaatcagtatcaacagggagtagggaccgggctccccctggtttgtagctccagagatgattcaatatgaaatagaatggagagtgtcagtcctaaggctgaggtctcaggaagtgatccgcgggggcctcagagggtgatgagccttgagacgttacaatttgtttaactgtagtaactccctctttagtgttacccaaaacagcagttctctgacatgagtgcacatcaaaatcacctggaggcttcttaaaatatggattcctgggctccccaccccaagttcagattcagtaggtctagcggaggcctgtgaatttgcatttttaaaaagtttccagctgatgttaacattgttgccatgtgaacggcactttgagaacccctggcatggaatctctagtcatctggggacaatgtttttgttttgttttgcttccccccagccaaatgttgaaagggtgccggtgccttggtgatcaaagcaaacttgtggggaatgtataatctccagcctcaccccaggttcactcaatcaaaatctgcaaattcatcagaattcctcagtgactggtatgcagttgaagtttcagaagcactatccaggcagaccttggagacgtagtaggttcagtgatggactaccataataaagctaataccataataaagcaaatcacataaagtttttggtttcccgctgcatataaaagttatatttgcactatcctataatctgttctgtgcaatagcattacatctaaaacacaatatgataccttaattttaaaatattttttgctaactaatgctaacaatggtctgagtctttggcaagtcataatctttttgctggtggaggattttgccttgatgttgctggctgctgacccatcaggctgatggttgctgaaggctagggtggctgtagtaatctcttaaaatgaaacaatcaagcttgctacatccattgactccctttcatgaaaaatgtctctgtagcatgcgaagctgcaacagcattttacccagagtagaacgtctttcaaaattcgagtcaatcttctgaactcttaccactgctttatcaactgagtttatggaatttctaaatcctttgttgtcatttcaacaatgttcacagcatcttcaccagtagtagattccatctcaagaaaacactttgttcatccataagcagcaactcctcatccattaatatttgatcatgaggttgccgcagttcagtcacatctccaggctccacttctaattttggttctattgttgtttccaccacatctgcagttgctttctccactggcgtattgaacccctcaaagtcattcatgaagatgggaatcaattgcttccaaatcccattcatgttgatatttttacctaccataaatcacaaatattcttaggagcatttagaatggtgaatactttccagaaggtttccagtttgctttgcccaaattcatcagaaaaatcactacctgtggcacctatatccttagagaatctattcttacataattcctccttgatccatgggctgctgaatggatactgtgttagcaggcatgaaaacaacattcaattccttcagcagtttttgggtgaccaggtgcattgtcaataagcaccagtattttgcaagaatttttttctgagcagtagttctcaacagtgaacttcaaatatttagtaaaccatgctgtaaattgatgtgctttttttcatatgtttgttggccgcataaatgtcttcttttgagaagtatctgttcatatgattcacccactttttgatggggttgcttttttcttgtaaatttgtttaagttccttgtagattctggatgttagacctttgtgagacggatggattgcaaaaattttgccccactctgtaggttgcttgttcactctgatgatggtttcttttgctctgcagaagctctttagtttatttagatcccatctatcaattttggcttctgttgcaattacttttggtgttttagtcatgaagtccttgcccatgcctgtgtcctgagtggtattgcctaggttttcttctagggtttttatgggtttggcttttatgtttaagtctttaatccatcttgagtcaaaaccacaatgagataccatgtcagttagaatggtgatcattaaaaagtcggaaaacaacagatgctggagaggatgtggagaaataggaatgctcttacactgttggtggcagtgtaaattagttcaaccattgtggaagacaatatggcaattcctcaaggatctagaaccagaaataccatttgacccagcaatcacattactgggtatatactcaaaggattataaatcatgctgctataaagacacattcacatgtatgtttatttcagcactatttgcaatagcaaagactggaaccaacccaaatgcccatcaatgatagactggataaagaaattgtgacacatatacaccgtggaatactatgcagccataaaaagaatgagctcatgtcctttgcagggacatggatgaagctggaacccatcattatcagcaaactgacacaggagcagaaaaccaaacactgcatgttctcactcataagtgagagttgaacaatgaaatcacatggacacagggaggggagcatcacacactggggcctgtcgggggctggggggcaaggggacggagaccattagggcaaatacctaatgcatgtggggcttaaaacctagatgacgggttgataggtgcagcaaaccaccatgacacatgtatacctatgtaacaaacctgcatattctgcacatgtatcccagaacttgaagtaaaattgttttttagaaatggatgtgctgtcatccatgctttgttattccatttatatagcaaagggagggtagacttagcataattcttgaaggccctaggatttttggaattgcaaatgataattggcttcaacttaaaattaccagctgtattagcccctcacaagagagtcagcctggccttcgaagctttgaagccaggtattgtcccatctctagctgtgaaattcctaggtggcatcttcttccaatcaaaggctatttcacctacatagaaaatctgttgtttgctgtggccacctttatcaattattttagttagctgttctagataacttgctgcagctttacatcaaatgtgctgtttctcctcaccccttcatgttacggagacagtttgtttcctcaaatctcatgaatcaacctctgttatcttccagcatttttcctgcagtttcctcacctctctcagccttcataaaattgaagagttagggcctttctctggattaggctttggcttaagggaatattgtggctgatcttatcttctgtccagaccactcagaccttctccatatcggcaataaggcagtttcaccttcttacattcgtgtgcccacaagaatagcactttgagtttccttcaataacttttcttttgcattcacagcttggctgtttggtgcaagagatctagctcttggcccgtcttgacttttgacatgctttccctcctaagcttaatcatttccagcttctgattaaaagtgagagatgtgcatctcttccttttatgtaaaaacttcgtgaccattgcaagtttattaattagtctgattttaataattctgtgtttcagtgaatagggaggtccaagaagagggagagagaggtgggggaacacttggtaggttgaacagtgagaacacacatgacacgtattgatgaagtttgttttcttatatcggtgtggtttgtggcacgccaaaacaattataatagtcacagcaatgattgctgaccacaggtcaccataacagatataatattaatgaaaaggttttaaatatgacaggcattacccaatgcaaagcagagaagtgaagtgtgaacgtgttggaaaaactatgcttcaatttgtgaaaaatgcaatgtctgcaacaccacaacaaaatgaggtgcacctgtgcaggatgcgaaatgggatttatctcactcagccaataatagaaaagtgcatttagtgtattttttttctgtttccttaatgttattagagttccttagatctgtgacatcaaagattctcttcattaaagggaccttagtggttgtccagcgtaacctttgttagctacgtgaatatttctaaccattattccaacagttatccaaattgctctatttccccagaagagagtggagggagaaagagagagagagagatatcataaaattagaaaattatttttacctttgcttttgtatatttccaagtcagttttatatacactctgttaggattacgcttttgctaaaatagtaaatgcaattaatacttaaaaattgagtataatttttatatgtatgcaatagactataacttcttctaaatgaggatcgtatcgtattcattcacaatgcttgtgcattgtcggtgtttaacaaatgttttcaaaatgaacttggcattggagattaagtggtcgttcattttaaagtaatatttctgcataacagagaccataggcatactgtaaaaagtacagtgagtaaaaaggaatagtgaggatgagaaatggtacttttaggtaattctttgcatttcttttagcattcctttatttgaagtaagatgtgatttctctttcttatctttatctgtaatggcatatcagtggaaatggaattatgaatttattttagaggaaatctgcccctatctctctggcatttaggatgccagtctgaaataatattacaaaaaatattgattcatagagagattatcagtttctgtagaaactgaagaatttaagtaacatacaatcaaaatactgttacatcaagaaatagcatattttagtatttcttgagtattcaagaagctcatcaagtctttgaaatgcctccaggcaatggaaacatcattataaaaaacaaagccttgaggtgtaatttaatagaaatttttggttgtttgtttggttaccaaattttcaggtaaagaatgtattatccctatgcaaaatatttattttgtatttatatcaccttgtcttaactgtcagagaataaaaatctatcaaaatgacttcattaagtatacaagaaagaatatgattaccacaaaaatcttgaacaacaacaacaaaatgtccagttttgccgttgggaagtaagcaaccactgctttgaatgggatttattgtttctgaagtctgacatgacaataaatgtggataatggacatttgttggactttgtaggtggacatgaggttgtaaatttgcatcatggtatcttggctgtaataactgtccatcattctgagtctttctaattgaaactggaggatcgctttagttgagaggatactattttgattaaatatagaaaagtatgcttgtcaatatttttttctgtttattacttgtgtaatacagcttcagagcgggattataaagacttaaggactctgtcttcaatggcaagagacttcactagtttggagacaggaggaacaataaaagaagcagcaggaaaattatgtgcaaattatggtacataattggattgcctacagctgtggacttactgtgtcctcctgtaaattcatatgtgacttcatttggaggtggaacctctaagaaggtaattaaagttgaatgagggcataggaatgtgactggcacaagaatgtggctggcaccttgatcttggccttctcagcctccagaactgtgagaaatagatttctgttttttaagctgctcaatctacagtatgttgttatagcagcccaccccaactaaaacagccgtgtttgtgtgttcatttggtgtcaataggcagcaaagttatatatattgtgtttggaattttggaattaagtttatgttacttgatacttatgctgatagaaggaaatatggcttacctgaacataccatgtggtttcaaagattttgaggcatcgtatgtgtcaatcccatcatcttttctaccttgtttccttcactgctattcaaggttcactcaggcatcctctcctttggaagacattttataaaataccagataagttggtatctctaaggttcaaactgtgttgtataatacaattatcatatgcctattagatcatgctggaaatatccatgtatgtattcatttcaaccaccagaccagaggttagaaaatgacagccactgagccaaatctggcctgccatctgctttcatgtggcctgagagctaagaatatttttttacatttttaaatggttacatttaaacggttatataagtacctatataatatcctcagttttgcctcttagcatgcaaagcctaaaatatttactctctggccctttacaggaaaagtttgcttatctctgccttagaccataaaaggggtttgcctggcttccagcaagaggctggtcacccttcctgcctctgcatccaaactctgtgcaactgaaggaaaaagtctgatctactcttcagtagatctcaataatgttctctaatgttggtctcattcttcagtttatcagatcttttactgatggcactgtaaaagccaagttccaccaatatgttctgtagaacaaaaaatcctaaatcagtggcttgcaacagcaaatgtttatttctctcttgcattgcatttgagtgtggtttagaagtagcatacctaagctcaaaccagctccaatctttgttgttattattattgtttttgtttttaatgggattcaggtttaaagactagcccagatctaggatatgctcttcctgagtcatagggaggaacaaaaaaaaggctgaatgagtgttacagaggctactgaagtgtggcctgtgtcattcccaagtatcccattggttaaaaccagtcacttggccaagaccaacatagatagggtggagaagtgccctcctcatagggatgtactgcaaaacacataacaaagggttggaaatgcatcaacttctggctgaattatctgttattgtgtattggaccatccccaaactcagtggcataaaacagccatatatttttttctctcactgctgtgagctaactgggattagtgggcaatgcttgcttggggcctcttccccagttgcagccatatggctgaagaagtgggtgttagctaaggcctggctgggctgggggatgcacacgatggtcccttcactcctatgcctggtgcctctgttcctccaggtgactctctctctggcagaatagcccagactttttacccactgggtcaagtttccatggacaaggaaagaagcttgcagccttcttaaaagctaggcctggacttggcacagcatcactctcgctgtattctattcatcaaagcacttgaaaccaacccagatatgttcaatggggagcatccatgtatagccccaatttgagacaagctactatcctttaaaagacaggacttgcaagtgatgggaaagaataaaaacccttccacagccatgtctatacatattaattattattttcatctctccccgatatgtatatgttagtttaatgtgttgaataatataaaaccatttatttttttcaaaattgtagaattgaaagaaagggtaataggaggccatgctgaaaaaaaaaaaaagaaaaagaaaatttaaaaaactgctttgaaaagtccctacaggagatgttttatatggtctcagccacctttcccaaagctgcctttatcaccctgtatgcttgtggaattctcatccatacatctttgtttccaatggtcatgaagggctgtggcagaattgtggtcctatggctctctctcaaggtgtcactcctctccatcttcatcccggcttatgaggaacaaacatcggagtcttaactccagatccggggtagcaaacttgcataggtcacatccatcagtcatttaaaggattatttatggttggcagagaagagtagggtaactaaatggagaagtttactatttaatgaggagaacttatttggaaaagacagaaggacttgtcaatgaaagcaccagagggttggctattatgcttggcatggtgagggaccgtgagctgtgtttttagattgttactggatgaaatccctctcagaaatagcccgaaccatttagcttgcctaaatgacacagttgttgctgaaaagcctcactatgaaaggacacagccatgatgttaaattgggtgttcggagagggatgaaagaagacacacttccatctattggattaaagctaacggacagtggctacccaatgaggcagaccctcgctagagaaacagcctgtgctggagtcttttaaaagtctgccttgttacatgttggagatgccaactactgtcaatgcatcctttagagaagtgtgaattaataaggtcaggagatgttaaatattcttaacagcttgaattagcagacgataaactttctccaaggtaattttgccaaatctaaccattttctttctgctgaaactgttcttgagtgttggctgcttgtttaaggtttaacgaagtttgagaggaaagaggacctgtaacttttcaatgaaatgtaaaagatgacagaggagcttaaacaacgcttccagaagtcactttagcttaaatgtaataaagtatatctttactgagaatttgttatgctgctcagtacattatggatcataagatttcccatattattcttcaaggatctgcacactttttgtataaaggaccaaatagtacgtattgtagactttatggccatgtggtctctgatccagctgctcaactgggcctctccagcagaaagcagcggttgacagtatttaaactaatgggtcaagtggtgttccagtaaaccgacaaaaacaggaggtggctggttttggctcaagggcaactaaaccttgatctactcgcactcagcttctttctaatatagttggggaagattttttagaaaaacggacgatttgaaaggcaacttggctgtttcgtttcataatctggctcggatcctaatttctactctaccaagtggtatgatcccccataacagcatccactcattcgttcatcattcatttcttcattccttatttgctcactcttatttcatacaagcagtttactaaatcagaacgtcagtgtaacttaggagtctgcatgaatgcagcatcacagtcatcatcatgggtcaccgctgtgtacctgctgggagtcggactccacactcttcactgtatactcactatccttctccttataataaccatttagagtaactactctcattatgtagacatttgttattatgtaattaatatttgccatagctttgatttaatgtttttccaaataacatttatcagtatttactaggcaatgggcactgcgctaagcccttcacaagcatcatctcatttaatcctcatagcactcgtgtaaagttgattattgccatcattcctattttacagctgagaaaacagttcccaggaggtaggttcaaagtctcacatctcatccctaagggtgtctctaaccactacaggacatgagatttgtactgatattggccctgttccaaagtagttgttggttccaattcttccacaatggcgtgctgtttctgaggcttgactgtcattagcatccaccctcaattgcacaggcacatcaggacggcactgtgacatcaggtgaaaagaaggccttggagagttctaaaattcagctgtgggccttacactctggattgcctttggtcggcttcctgaaaaacaacccagttaattttgtagagtttcctggactgcagccagtcccatacctctcaccagccatcccacagactcgttcgtggcgtaaggcagctgggtatgaaatgaggctgaatcagtcacaacctttggaaaatcagctcaaagaacaataagaaaagcgatgtctacaaatgaaggattgtacattttcgcttaaaacaatgtgaaaatgaaaataaaaagtctttaataacttcctaacaacctaacgacctctgaaacaaatacgcaaagctgaccagcccaaatgatttaaaacgaatatataattccactgagccaacattcaataccacacaaatgaaacgaaggtgattattccaggaaaataaacagagatctatttgcaaccctaattcaatattttgagagttgcaatatacttttaatacaattgtgaggtccataaaaaaattcagtcccagaattctgaatatttttattaaaaaatgcaatatcagattttgaatcttggagcttgaagaagcagagggaaacaactgtttctttgcaagcagtttgttcacaagttttcttccctagattaacgattaaattagtctaccacttcaccttcctttaggaagtgggaaaggttagagagtggcccagcaggtcactctgcctccatctccaaggaagcatcagactagaagtttctctgtgtagcgttctgccatgttttactttctggaactgctggtctcatccagtaaacttataataatgggcatggctatacgcctggggtgatatttagtctttaagaatattctttctctcatcttcatgagcacaccacttcttcattgtgtatccttctgggaccactgataagccatgaattttttttttttttttttgaggtggagtttcgctctttcttgcccaagctggagtgcaatggcacagtcttggctcactgcaacctccacctcccgagttcaagctattctcctgcctcagcctccggaatagccgggattacaggcatgtgccaccatgctcagctaattttgtatttttagtagagaaggggtttcaccatgttggtcaggctggtctcaaactcctgacctcaggtgatccgcccaccttggcctcccaaagtgctggaattacaggtgagagccaccgtgcccagcccagcaatgtaaattttgtacccaaagaaactgaaatgggtcaatagtcaacaatgtgttactttatcgatctccaggccactctacattcaaggctgtgaattcattctatttcccatcccaaaccttgccctgacacattgtccaatgtagttcatcagggatcctgtaaccagaataaatgaaagtgttaaaataaaacaaaagagcagttctaataataaaatcccaatagcctcgatatccctccatatttgactggaagtctgcttccattattaagttcccagtgagaaaggaaagttcaaagatcaatatgctttgtaaattaaagtccagagatattcagttccaatggaattgaaatcccaaatctgattatcttgcctttctgagttaaatgtccaaaattttgtatgcataagttaaattattgtccccaaatcatcctttgcattttcttattttactcagtcttagctaaagaggttccagacatcttggtagagctgagacacttcagcattgtagtctgagctgtcaatcattgtattagcctgcttgggctgccatatcaaaataacagactagatggcttaaaaaacattcattttttcacagtctggaggctaaaagtccaagattaaggcaccagaaagcaagctggcatctagtgtgtgcttgcccctcagttgtagaggggctctacactgtgtgctcatatgacctcatggcttttctttggtacatacatgccatgggaagtcaagaaggaggtcgggggagtgctagctttctcatgtctcttcttataaggacactaatcctattgaatcagggccccacccttatgacctaatttagccttaattacttctcaagggatctatctccaaatccagttacattggggatttggagacttcaacatatgaattttaagaggtcacaagcattcagtccataacacttatctcaatagatgtggctaatccagggcctcacttgtcttaattcagtgccaagtctctcatgatctttacattgagagtccagtgaataaatagcaggcacaactattagggcactaatctcacacacaattaatttagaaatctgtctctagtcttcagagcagtgtattgccagcagaattattctagaatctaatactgtatgtggctaaagacaatggtgattttatagtgtatggaccaaaccaagacatatttcatagtaaaacaaggaacaattaataattttaccaggaatataggtattaaactgggactgtcctgacaaagcaggacatacagtcatcctatctttatactgctccatcttcccataagtctcattggatttcatcaccaggattctgtattctgtaattcccaatagactctaagctccattaaggaaggccttccactgtatgcccatcgcctggcactagtgggtgaccaacaggtatttgttgaatggactaacacacaaatgattaatgttttagttttctgtatagttttatagttgagctctaaattttgtgtcttaggtgtaatgtttattgatatcccatacaagacatatcaatagacctaaacagttgttattatcttaccagcttaaagagtttggtttaactatgagtaaatgtttccattttagggtagccatttactctttagagtgagataatgatcccaggttttgacattgggtgggttaataatagtctttctccccaaaaaagcaccctgagtcattttctgaaatatctacccatgtagtaactatgaaatgaggaatagattagtacttctgttttatcttttaaaggttacctttcattgttctttcttaggtctttgaaatgctttgttaactgacagcattctttgtaatattcctaaggtgaagcatcaatttatacacggaaatatgtttagggataaaaacatcaaatcacagtagacactgtattggtgatctcatgtttaggtgagaagctatttttaactgagaaaaattcagttagagctgacccactttacagtatttccacagaatactcatggcatgctctactaccaactacatcattgtgagaccctagcacttgaacttgaaaacttagttttgtggcaacttaagtactaaatacttatattatatgacataaagatgtccatttttatcagaatctattctggaataaaaataatttgttttattgtctagaaatccatatttttttaaaaaacacgtcatttgctaaagaatgaaaaggatgatgacaatattttttcaactttaaaatagtattcttataaatattttcgcatttatgacaaaacatctattttttataagttcccaactactgtctctacagttgtcaaaacttggataactttatattagaaagaaactttttatatattcaaaacaatgaaatttgcagaagaatgaatgctattacaaagtgtcctgaaaattagcagtgcgtatagtgagggaatgaggaaaatactttaataggaaatatgtgagccacctcaatcactgatgaatgatgagagacaggggcaatgtgacctttttccagctctgatcattatgacactaaaaatcagagtcccattcacaaatcagaatacaacatgtggcattcatcaaaattatgttctctgttttgaaagaacttcttctattaagtctctacaaggctaagaaatataagttaaccatttatacattagatttggtaaatcagtgattatttaacaatagagtaaaacatgaaaattatacctatacttttttttaattaacgatgacctacacattatttaaagattgtctttcctagaattaccaagaagagactttaaagaggaatcatcacaggaactagtaaaatatctattggtcttgtcctagtgaaagatacatttgaggcaagtatacactcaggtaatccattttctatgcccaacacactgcctggctaagaccaatgttaatgccataatcaccttcccacacttgaatgaaaaacttcagcactgaatttcatattttatagttggctttagttctttattgtactatggttatgctgccaataaagcatacacattctgataacaagaaatgttatcaccagtgtgctgggtgttgagaaaatacagaccttgattgaaggttcatctcaaaacagcttctgtgctctagctgtgtttcttgtttcagacgctcatcagcttcacaatccaggttaggtcctcttggtaaatctctcaaggcgcatgttcactttcaatttttacgatcgatgttataaagtaacttggagatgcaatggtagcaatgtcttttcccattctggatctttgtcattggaatagaaaatatttggaataaagatttgctcttcccactatcccataatatcttctcacaatcttatctagatgcaagctgagtgatatttacaagcatcccattttacattgtgtcccctcacctttccctgggcctggtacaaggttacttcctcattaattatcattttgctcttgaaataattaatacagatttcaacttataattggaaattttccagggaatcctctttttcttttgctactcctaatggttataaaatctgtggcattaaacacacacacacacacacacacacacactcacacactctcacacaacccaagcattcttcagaccaaattatttaaatcagtgcctctcaaccacggctgctcactagacataccagggcattttgcaacatggatggcggagttgggcctgtgcagtaggtaaggttgtgataagacatagaatatttcagataaacaacaaatgtcaaagactaaaaaaacaagattatgtcttaaggatgccgtgacatttcctggttgagaatttgaagcattcctcactcctttgtcttttgtttccttccatcctttactctcatcttctttcctttcttccttcaacaaatatttatggattgtctgctacgtacaaggaattcttaactacaacagctaattgagtgcccttgcagttcttatagactacattaggatattcaaatccattattttataagatacatttcaattttctatttgatttatgttaattattgttaaatattgagtatagagtgaaattatggaatatctttttttttttgagatggagtctcgtcctgtcacccaggctgcagtgtagtggcgcaatctcagctcactggaacctcctcctcctgggttcaagcgattctcctgcctcagcatcccgagtagctaggattacaggcacatgagaccactcctggctaattttttttttttttgtatctttttagtagagacagagtttcaccatgttggccaggttggtctcgaactcctgacctcatgatccacccaccttggcctcccgaagttgtgtgattacaggcatgagccactgcacacggcctgtggaatatctttatattccacaggtgatctgcattcaaattattaaaaagcatgaagaaaaaatgaattccttcatttagtgtacattttcatctttgtcccattatttagaaataaggggtatctaagcctaaaacacatacagaaatacatgcttttaaccaatagacaagtacctgctgatgtagaaatagggtgatttggtgtgtgaatttattaggccactgactgcctatgctatgtattatcaattttttctgaaaatgttatatacattgaccaaataacagatgttcttctgctcttcagcatatcctagtgagactaatcctcaccggttaaatatattcataactgtaacatccagaatgtagcacttatccaatacaagtgactaatatgagtagttttgctgttggccagacactgtgaaagcgtgcattatgtaatctcatctgcctagcagtttggtgagctacgctgtgattcctgtcaagatctcaagctcggttcacctgagtccattttctttgctttttgcaccacgggaaggtactccttcagtgtttacttttgtgcaaactatacatcagaaggagaaaccattttggttttgatggtagtcatccaggacagattttttaagtttctctgaattattttcatgaatggacatttatttatttttaacaattttaacagttttattgaaatgtaattgacctaccttcaccttgtttttggtaaagaaaaaaattgtgtttttacataaacatacacccatgagcccaagatggtaacatctatcaccccccaaaaatgcttccagcccttttatagtgtcactttcttacctgtcaccaagttctcatccccagacaagcattgatatgcttttgcctcctgtattagtccgttttcacactgctataaagaactacctgagaatggacaatttgtaaagaaagtaagtttaattgactctcagttctgcatggcttgggaggcctcaggaaacttacagtcacggtagaaggcaaaggagaagcaggcatgtcttatgtggtggcaggagacagagagcaaggggggaagtgccacacttaagccctcagatcttgtgagaactctctatcacgagaacagcatgggggaacatccacacttacacccttagatctcgtgagaactcaacatcaggggaacagcatggggaacatccacacttacaccatcagatctcatgaaaactcaccatcaggagaacagcgtgggggaaccagcacacttacaccatcagatctcatgagaactcactatcacaaaaacagcatgggggaactgctacacttacgctatcagatctcatgagaactcaccatcaggagaacagcacgggggaaccaccccatgatccaaacactttcaaccaggtcccttccccaacatgtagggattacaattcaacatgagatttgggtgggagcacagagccaaaccatgtcacctcctataaattaatttcattttctattttttaaataaatggcaccataaattgtttactcttgcgtctggtttccttcactcagcatcataattttgacattcatctatattgttatagtccgttcttttttattgctgagttgtcttaattttgtatatttacacacccattgatagatatttgggttttctcagttttgggttattacaagtagagcttctatgaaccactgatgtacaagtgtttatatagacatgttctcactttttgagggagtgggaaaattataggagtagaatggctaaggcatagcgttagtgtatggttatggtttttaaaaactgccaaactgttttccaaattggttgttcccttttgtcttcccgtctcctgtccaacacgtggtttgatcagtcttttacatttctggcattaaaatgaatttataccagcatttcctttttttttctttttctttttcttttgagatggagtctcactctgtcacccaggctggagtacaatggcatggtcttggctcactgcaacctccacctcctgggttcaagcgattctcccgcctcagcctcccaagtagctggtactacaggtgtggctaatttttgtatttttagtagagacggggtttcactatgttggccaggctggtctcgaactcctgacctcgtgatctgcctgcccaaccctcccaaagtgctaggattacaggcatgagccaccgcacctggcctgaaaatctttttatgggcttatttgccatccttacatcttctttagtgaattttctgttcaggtatgttgcataaatagtatcatgttgattgctttttcgagttctttatatattctgaagacacatgtgtattggatattcaattggcaaacgttttctccaagtcagtgtcctgtcttctccttgtgaagaagactgtgcagaattggtattaattttttcttaactgtttgatagaatttatcagagaagccacttgggtatgaagatgtcttatctggaaggttgtgaacatgaactcagtatctttaattatctatttgtagtttgtagtttctgaggaattggtctatttcatcttaagttgtgaatttctgtgagtgggtaccagtactcccttattatcctttcagtgtctgcagggtctccagtgacagcctcttctctgttctctgtctttttttctttgccagtcttggtagagttgtattatgttatttatttattgaaagaaaaagcttttgatgtattttctctgttgttttctgttcaaacaattagtaaatcgatttcattaatttcagctcttatcttatttccttccttcttcttcttcttaggtttatttagttcttttctttcctagtctaaaagtagaagcttagattagtgataggaaatctttcttctaatataaacatttaatgtaaacttccctctgtttgttgaaacaacacagagttgatggtgtgttcaccatggcctggagtccaggcagctttgcacccagaagtgggcattaatgcaaacagaaacagctccaggagaagcctctacttcaggctcaaggggaaggacatgaaactcctgacgctcccagtgtatgggaataccatttcttattttctacattcttccatgctccatctcaagaaatcccatagcagagggcccagagacacctaacactccgcaagagtagaaccttcctcttccatcagcagggaaatggtcctaagagagtggggtggacctctggggctgttttcctcttccagtgagcctgcagcatgacgccagatgtacatgcagtctggatgagtgcacagcagagatggaaaatgaagcccagatttcaggctggaaggcagaaaagaggagaatctaaaagtaagactgggaaaaagaagacgctgtggaaactgattctctctatatattttaacaaactcataggcttgcctccaagctgcagtggctggatcttatattattttacctacattcttttcagctcaatttatttatttgtttacacttttttttttttttggagatggagtctcgctctgtcgcccaggctgaagtagtcttgctttgtcacccaggctgaaatatggtggcacaatctcggctcactgcagcctccatctcctgggtgcaaatgattctcctgcctcagcctcccaactagctgagactacagacatgcacaaccatgcccagctaatttttgtatttttagtagagacgggattttgcgatgttggccaggatggtcttgaactcttgaactcaagtgattttcctgccttggcttcccaaaatgctgtgattacaggtgtgagccactgtgcccagcctgtatagacatttttagagcaattgcaggtacataacaggactgagctgaaggtacagagatttctcctagaccttccctttccctcaaactcacagcctccactgctctcaaaaatcccctaccagagggttaggtttactataattgacgaatttgcattgacacattattatcacacagaatctgtggtttgcatgagcatttactcctggtgctgtacactctcacgtcatttgtggaaggcatttttatgagaaaggcattttaggtcaacatatttttcttttagtatttttaaggttttactcttctgtcttgcactttttccaagaagaaagctgctgtccatcttaactttgttcttccgtacacagtatgtctttatttccatatgcttttaagattttctgtatgttactatgtttgagtaagcactttggtgtagttccttcatgcttcttgtgcttaagcttcatcaggcttcttggatctttgagtttacagcttttgtaaaatttggaaaatttttcaaatattttttctattcttttttctattgtttctcctttagaaattataatttcctgtgtattaggtatttgaagtcctctcacatatcacaatgctctgttgatatttcttagtcttttttctctatgttcatttgggagtagtttctattactatctcttcaggtccactaatcttttcttctgcagtgtttaatcttctgttcatccaattcaatgcattttttggtttaagttattgtagtttttgtttctagaagtttaatttggatcccttaaaattctgcatgtctttaggctaggtgcagtggctcacgcctgtaatcctagcattttggaaggtcagggcaggcaaattgcctgagctgagtttgagaccagcctgggcagcatggcaaaaccccatctctactaaaaatacaaaaaaaaaaaaaaaaaattactaggcatggtggcgcacacctgtagtaccagctattcaggaggctgaggcaggagtatggcttgaacccaggaggtagaggttgcagtgagctgagatctcatgccactgtgctccggtctgggcaacagagcaaaactctttaaaaaaaattctgcatgtctttaacatatttagtttttcttctagtatctattagtatactaattccattatctgtgtaatttctgggtcagtgttaattgattaatttttgtctttattatagattgtatatttccacttctttgcatgcctggtaatttttgaatagtaccagagttttaatttgtccagtgatgtacatttttatacttctattaatattctagagtttgatttgggatacaagtaagtcccttggaaacagtttattgtttgggggttttgcttttcagctttgtcacttggagccagagaagaatttaaccaagggccaattatatcttagtactgatgcaaaacaatcgagttttgtacgcagtgcccatgaattacacagttttttactctggcagatgggaacagcccttcttccttttgtccctgccctggggatggttccctctaatccactctggtcgtccttttctgggacttaggtagtctattcatatgcacgtactgatctgtgttctgcttatgacttgagagggagcctctgaaaatctccagaaattcctatctgtgcagctgtctcctttttgattctctgccccgaaactcttaactggttggtatccctcatctctcatctcttccactcagagagatctccagatttcactttggttcccctctctgtgtcaaagcccagaaacttccatgaagtcagctggggcagagttagggattaattcatttgttttctgtctctcagaggtcactgacttcattgtctggtgtcagataacctgagagccattgcctcctattgattgtccattttcagttgtctcaggagggagggcaaatcggagactattgctccatcatggctgcaagcagaaatctgggatttatttattttctatatgagttacctactgtatgggttttttttttttaactattaaattgctcctggaacactatgcagccataaaattgaatgaaataatgtcctttgtggcaacgtggatgcagctggaggtcattatcctaagcgaattcatgcaggaacagaaaaccaaataccatgtgttaccgcttataagcggaagctaaacattgagcacacatggacataaatatgggaacaacaagcaccgcaggctagggacacggggcatgagtggaaaaactacctatcatgtagtatgctcactatctgagggacaggatccataccccaaacctcagcatcacacagtatacccatgtcacaaacctgcacatgtacccttgtatctaaaatgaaagttaaaataaagtaaaattgaataaaataaattgcccctggggtgtcttgtgagcacctacagttcttattatggagaactttctgcaatgatggttttgtttgaacacttttatttctttatttcttttttttttttttgagttggagtctcactctgtcacccagactggagtgcagtggtgtgatctcagctcactgcaacctccacctcccgggttcaagcgattctcctgccttagcctcctgagtagctaggattacaggtgcctgccaccacagccagcaaatttttgtgtttttagtagagatggggtttcaccatgttggtcaggctggtctcaaaactcctgacctcgtgatccacccacctcagcctcccaaagtgctgggattacaggcatgagccaccatgtccagcctgaacacttgtatttcttaagataatttttgataatgtggataatatttttctatatggatagctgttttcctgctttgattatttagattatgtataccaccttttcctaaacagacatatctctgtacaaaaattaacatagagcagctggtatttcataaaatgatgatgctagacgtgagttttggataggaagtggaggcgagtcctatatttgtttgaatgtgcatggattttaattaagttaaaattaagcatactagaaattgtccaggaagctgatgacttttattctttttcttaggaatatcttgggttaggagctttaatgaccacatggtcaaaaatgcatttgtttctgtagagttctgaacagaattctgaacattctgtgcccctcttcaaaaaaaaaaaaaaatgctttggctcaggacaaactgccaccttctttgtccacaatagaatgtaggagttagcaggaaatcctccattcttttattgatgatctaccagtgctttaacccggagaactctgagacatgaaaaaaaattcttaagatatttaagaatttataaataatgagcatagagggatacgctttttaaaaattacctttcacttacatttctcatatattatctcaagagtttttgcagcaaccattacttgtaagtactgtgtgaccatttatcaggtcaggaatgaggcttaaaaaattaggattttagcaaatgcctctggcctttattatgtgctcttaccattcaatttcagtgatcagagaaattatacataatatcatactaacaatatttatctatttcaagcaaacaaaaacgtattgacagacttgaaagttataagtcatatgtaaacacatattttatttatatattatagataaacacacatacatagacatatatatgtgagtcttatacattctgtcctcagaattctcatacgttatttattcacttggttaaaactataaattcttcatatgaagctacagatatactttctcaacataattcattgaaatatttaaaattaagaagtcatctcaaataaaatctaacaaagtaaaatactgcatggtgcctttattctagatatttatttattgccaaaatgttctctgaagacctaaaagcttgaaaactcaaagacacctccatgaaagttatgcattagggtgaatattgagtcccacaaactacctgatgttattctacatgttgaggatacaaagatgagtaggtcatgcttaaacccactatctcaagggaaagttggggtgacagacaccccgcactgtggtgggggtcagcagagcctaggagaatagcatgatacctccagagaaaagagtacttaagtgctcccgcaggggccttgagcaacgatgagagatggacacatccaaaaatgcaaaagaggagctcccagacttagaactggacctgagcgtaagggtagttgagtttaatatgaaaaaagggatgggcatgagcagcatcttaaggtgtacaggaaaagatgccaccattgcagtggcataagaacaggtggaaaagacgagaaaatgagagaaaggtagaacctttgtattttagggtataaaacttggactttatgctgtaactaataggcattgaacatttcctgcaatgctaataacgtgattgtatttttctttaagctagatcaggggttggcaaacttcagctgacgggccaaatccactcagcagcctgttttttaaataaagtttcattgttacacgtccatacccatttgttttcatatcattttcaaagcagagttgagtgttgcaatacagactgtaggcccacaaagcctgaagcagttgctatctggctctttagagaaaatgctgacttctgagctggattgctgtgcacagagcttctcaacttggcatttgatatttgtggcctgataattcaccatcgtcgtagactgaccagtgatttatagaatattatcagcatacctagtctctattcactgaatgcaggaggagcaccccgttccccatcatgagaacaaaaacctctccagacactgccagatgcccttgaggaaggtaacatcactcctctttaagaaacacttttagcagctaagtagagtttagtttacgatggtagctgaagttaaaacagtggtaattttaatgaactgaagggctagttgtgaaaaaatatattttgaatctaaaaatataacaattataaatatggggcttaacaaaggtgaaaattgaagataacttctgaaggtctagcttaggttacaggaagagtaatgatgcccttcactgagataaataataatggaaaaaagcaggctaggtgcagtggctcatgcctttaatcccagcactttgggagactaaggcgagtggatcacttgagaccaggagttcgagaccagcctggccaacatggcaaaaccccgtctctactaaaaatatgaaaattagctgggcctggtggccctcgcctgtaatcccagctacttggaaggctgaggcaggagaatcacttgaacctgggaggcggaggttgcagtaactccatctcaaaaaagaaaaagaaaaagaaaaaaaagcaggtaccaagcagaagataatgggtttagctttagatgaagcgggttcaaggtacctgtgagatgctaaggcagaggggctctaagattatatgcgtatgaatataagaatatatattcacatatctataagacaattctggcagaagatatatatttgaatatcaccagaatatggctagtatttaaaaccagggtaataaatgaaaaccagattgcagtgttaaaaaggctaagcaagggaatataaagcttatgcaaatgagaatcaagaggttctgcagatcgggcgaggtagctcacacctgtaatcccagccctttgggaggctgaggcaggtggatcactggaagtcaggagtttgagaccagcctggccaacatggcgaaaccctgtctctactaaaaatacaaaaattagctggacgtggtggtgggcgcctgtaatcccagctactcgggaggctgaggctggataatcacttgaacctgggaggcagagtttgcagtagcctgagattgcaccactgtactccagcctgggcaaaaagagggaaactccgtctcaaaaaaaaaaaaaaaaaaaaaaaaaaaaaaaaaaaagcttctgcagtagagacgatcaaaaagcaagggttattatgaattgtccattgggtctgtgagttagggaaaggtgtactgagggtgctgggtagaagaaagatgatatagattgaggcatgaatgatagtcaagaacttacgaaacataatgagaaaaagacaaaaagaaggtaaaataccaagaatcaaaagctccatgacctctaacatttactctaagtgggagtcatacttaatgctggctggatacgtttccaataatcctataggtgagcaagacacagtgtttcaatgtttataagggcaggttccttgtaaatctctcaagtgtgcagataattgcacttggtgggtggcaatcaggacagcatgagagagttttcaagggcaccagcatcataccaaatatttgcaacagtctgtcaaagagatggagtgtctaggaatgaagcttttgtgaagtcatagcttgcatctatttctattctgtaatatagatctgtggtcgtatgcagtatgtatctttctattgcaacacatatataatgcattatgtataaagacaggcttaaagttgatccattttgtcatttttactgaagttaatccactcagcagttcctgtttctaaatgtattttagatgtttaaaattgatgttaagcaaattgtcatagtcttcttttaataccatccaatctaaaagtgtagaagaagacacatctaaagaaaacctgggtacttataaatttttaaaataatccagatgaataagaggaaaagagaacgattagataacaatcatgtagggtgcagtagcctagagaagcaatgatagcattgccaattcatcctaatgactgcatctgttccctatacatggaattgatggcaccaacacaactgccgcctcctccgtgtgaaagagcaggttgatgacttgatgatgactttgacctcagagatggtgaccaggtgccaattaaagttacattgtcgataccctttaatataattagaaatgaaaataagaaatgaatggctatgaaattgcacttttaccttgacagctaatgaaacaggctgtatgccatacatcactcgtgtatatgtatttgtttaaggggatggtcactagcatcatcacatccgtgaatcattattagaatcatattaaataatacttaagtttactcactttattaagtatacatataagtaaacattgtatattaattatgttaagaaataatatttaagtaattattaaaattttttctcccacctcttctcatttctccttccttcccttccttcctttttttttattcatgcagcaatagtttgtgaatgtctggacactaaagtgtcccaaagtgtgggacactttggggataaaaatatggaatgcacaaaaaagcccctatcttcaaagccagagaaaacagaaaaatgaccatttggagtgataaagtagaaggagcccagaaaggaagcatctagaccagtcagtgtgggtttatgggtagagctttataggacatcttgcagtagctgacatggagttgagtctttaagaccacttaaaatgagcccgaaaggggtgtacacacaagcaggtgcagaagtgcagcactgagggagcatgtgagttcagcaggttcagcctgggggagagcagatcccgatggccagggagacgttgaactagggaaagacacagcaaggactgccacatgaagggtcctggtgccaaactaaaagctaggactggatgcaggaggtgaggagtcactgcaggatagtaagcaagaccacgcaacaaattaactagatagggcatgagagttgtattttggagactattgatgagagtaattgaggaagatttagttgaagttgtagagagaaaacttcattgagctgaagaaaacgacataaactttcgagatgtttaggatgtggaaggaccacaagttgatgaaccagtcttgacagagcccaggtctgcaggtagggaggcggagagagggcggacccagtggaatgggagcgaatgactggggatgtgagaggatggatggagacagcaacttgtcttgaggtctccttgggagatcgaagctgtgctatccagaaggaaattcaatacataggtgtgaaggtcaagaaagggaggattgcatttgagtacataacatttttaagtcattcattcctaaatgatagttttaaccttgaatgtgtttgtgatcgctaaagaaagacatgctgggagagccaagaagcagatgctgaggagcacatacgcttagtgggagtgtggacagaccagggtctataagggacactgacgatgtgtaaggcaggtaacagggaacaaccaagtgtggatgatagtcagtgataaggcgatttcaatgagggagaagtcaacagatccatacactatggaaacagaaatgtgtgacggagagaaactttgaaatatcgttattaaatttgacctataacatgttagctgtcttgatatgggatgctttgataaagtggggtgcccaaaactccagtctctgtttgcagcagagactagagaaaatatgttaaaacaagttcaaatgaaaaatagatttatagagatttgtattctctactgacaaaatttatctgtgctgcccaagatagacatcatttgtgctgctttggaaaggaattatttgcattgctagaagttttctatatccacagagctataaaataaccttctcacaagcaatcgaaggtcacacttctgtagaattaggtaattaccagagggcccactggacaatgcccagcattctgttcaaagcatactcccagacagtattctctgcttcactgtggtttccccagtaccaagcacgatgttgtatttgtgtttgtctcaatgggtagttatcaaaagaggtaacttccaggtagaaagcttagataggatccagcctttgagatatgtgttgtgtcaaaggcatgtgatatattagtggatattaagagatgaaccatcttatacaatattaatttctttagggttctagctaatgccaattttaatcatgactgtttttgaattttgatcttcattaccattattagtgcctatcagtgaatgataatataccttaatttccatgacatttcaaatgtcatgcatcttttcttatcatttggacctatccatccaatatttacaaatagtgaaagtaagtcatcaagatacaatatgacaatttggtgcacaaattattttccctcagaatatgtgtctgggactctgattcttaatgttgctaattacccctcactattatccagtcatctttgttatattactcaaaggcaacagatctatatttaaagcgtctcactgaaaagaaataggaagtccattatttgtattaaattgatcattctgatatgttctgaaaatgtacatatctgttgcatttcatggctcaatgtggcataatagagttaaatgacattaaaattcactgctactaatgtttaatatctcacgggccaaatgtttattttgtctttataataaatattgattggctgtatttttaaagtaatatttttccaaattagcaaacataattcagttcagatgccaaactctagctcttaattcaacccttgccacactttccgaaggaggtgtgcagaggaaagtgccttgctgtaaaaccagccatgtggtctcagcaccaggctgctcctttggagatcattgttatttcattcttaacttctcagtgatgtgctaatcaattgcactggcaatgatattctgaacagtagattcatatggtagtgagtaactcaatatctgaaataggcataaacttgtttaaatactaaaattattggcattagccacaaaactcacaacaccagccaggtgcagtggctcacgcctgtaatcccagcactttggaaggccgaggtgggctgatcagctgaggtcaggagtttgagaccagcctggccaacatgatgaaaccctgtctctactaaaaatacaaaaattagctgggcgtagtggcgggtgcctgtaatcccagctacttgggaagctgaggcaggagaatcacctgaacccaggaggtggaggttgcagtgagccgagattgtgccactgcactccagcctgggtgacaaaagtgtggtctgtctcaaacaaacgaactaaaaactccacaacgctctttagccattttcaagaacagccttctctcttcagtaagaggagaaaaacactggaataacaaatatctccaacaactaaatctacctgtttaattttctgtccctcctgaaagataggaggtcagactgaccttggtgaatatttgattaaggagcaaattgctttaggaatgggataattttacttaaacctcagagcttaaacaggtcttttatttaggcttaaacaacaaatgaacatctgttcttttcagtttaacgaaacaagctgttcttgtacctgataaatacaagccatggctcagccagtgaattataaaatgcatgaaggataaagatatcgatttgaatgtacaaaacaggctgggctcagtgtcctcctgagcatgcgtgatcaaatcagagaacagtgtggttggttcctctgcctgcgaccattatttcagctccatcgcagtctgggttctccaagagggcacagttttaaattcaatgtcccctttggtagatggttctgagtattaggtatgcacgggtgcggagtctgtgttgaaaaatatcctagggctgtatgggaagcaagtacaaacctggctaaaataaacattacgtgtgggaaaggctgctcaggagatggagcttggtgtatgtttcatgctgagacacttctaatttagtgtttcactttcatccatttcttgaataaatacaatgttgttatatggcacaactaaaatgaaacggtgggaccagctttgagtaagagaactcgagagtattgtcatgtaaattcttagcagatgctctgaattcattttttatctgcttcctggtattgcctaatcccaggagctgaagcataattcagcattcttttttttttattattcagctcccatattgtctgggaggagagaccccctggcttaatgacataaagtacatgaatgaatccctgggattaagacggtgctgcggatgcggtgcctgagaggcggcggttgcggtgaagtgagctcagcgggccgcagtccttcatgctcggcaccgccacaggctgcccttccgcatcgcgcgagaagaagacacagcgcctttagacagaagcacacagaggaggagaggccacagcagcctggccatggccagacgatggtgaacagccccgccgagggcctcaggtggtcccgcaaccgctcaggagggcgggcagcccctcactcctccaggcccgctcctttcccttcctctgggtttctgccaacggcgttgtgagagtcagaaactgagtcccgtttcagatgctgtcttagaatcttaagagattaattcctaataaatttggccataaggacattaaaatactagtaacaaaaacaaccaccgccacaatgagagagggtgggggagagggggaatatgaccctgatttagaagacttggaatttaaggcaaaagcaatcatagaatttaagagaatagcatagagtcttgccttttttgttttctgcattattattattattattattattattgtcattattattatttgagatggagtctcgccctgtcccccaggctggagtgcagtggcatgatcttgactcactgcagcctccacctcctgggttccagcgattctcctgactcagcctcctgagtagctggaattacaggtgcccgccaccatgcccagctaatttttgtatttttagtagagacggggtttcgccattttgggccaagctggtctcgaattcctgacctaaggtgatccacccgcctcagcctcccaaagtgctgggattacagacatgagccaccgcacctggctgttttctgtattactaatatgcttcatttgtacattattctgtatgttggttgtctttatcttttcaaacactaaaacaatagggaggaacatctatcatcccatctcccatattgatttagaaactacatttgactcaagatcctacagtccagattaagatgctagctttgcaataaactgactgtcttatgacataatgccttaaaatgtcattctggagttgttgtgagaagtcagtgatgatgtggaatcgtctcatatcacacctggaatttatgggcactctataaatcttcctttgttttcctgtttccctgtccctccctcccttctgtttttccctcacgctccattttcaactgcagaaagctgcatgtagaatttagggaagtcccttaccataccagtgccccagactgcaagagagacctcctggggctgcgaggcagcccttccctatggttccaaggaggctcttgagccaagaattgcatgggaaagacgtttgcagcaatgtgaagtgtcacaatgtcttcgtttgagtggtgcatttgtgttcctaaaagacgatagcagcctgttctccttagtttggaagtagaagggaaatccgtgttggccagccctagaagcagtagccctggaattgtcatagtgataatgcgaagacttcttcctcccttagcagagccatgtgcagaccatggtgagaactgagaagcctcatacgggtccctgtagatgtgaaaataaactcaagaccaaattcgaagcctcagcactcaggaggtgcaaaagccatcgcaagatatagctgaagtcccctttccatctttcttgtaaatacgcagggcggggtcatgggaactgagggagaagactggtgagctctatggctgtgcgtccacatgtctgctgacaggctccagttcaagggcacggcaagtgccagggattgtggggagatgggaggtgacgtgactggtcctgatgcagaggaccctcaggaaggggcagaatgcaagaaggggtgggcaggagtgcatggtgaaagggggccctgccctgcagtgtgggcgtgcggaggctgcaggacagcagaggagacccacagcaggacagacagaactaaactgcaatgatgggtggatatttcctgtcagaatcatgggaaggagggaaaaaatgtgcacgtgtagagaacaaaatagatttctgtgtgaactagaacgtttttgacaactttgtctctgctttcatatccttttccttaaaagaaaaaataactagtactccctccttaggggaaaagcacttctgcaatccccgcccctccccgtcccatttctctttcttatccttcccggctctccacattgaagcaggttttatatctctctcaagcccacttgtgctcctttttcttcatacttctctctgttttcttgatgtatgtcagtcttgttgctaggcagctgttatgttcaacccaccatgcagccttctgaatgctggaaattagccccaaatagcttgaaaatcacccttccgcacctgctttgtgtttactgtgagagctggaatatgaatataagttcatagaatgggggaaatgcatccatatgtagccatgggcagacagccacgtttttggtgtgcatggcaggtacagacaccatgcagtgcctcagggaaaatgcccaggagtggttctagaagaaaggggacatcctcattctatcagagctaaaattgctaaataagatgatctggtggaaaatggaaatatacaaaaataaatatgaatagaatgtagacattgtgtgtatttctacaaatgttgctgcctgcaagcttaatcggttttcccttgcctctgaaaaacaaaaagcactcattgattctatttcaccctccagctattggtcttttctttgattgatgttaagaaccaccagctgctagcatcttgatgccatcgtaatctagtgtctcccgtgtctgacgttgccattgacgccacagtcaccaaatcccacagccacctcagtgggcatctgcttctcttcctctgcagtgctcagcactggcgaccgcatttccaactttgccttcccttggctgctccaaaattggacggctcccatccagtcctttctttcctggtcctcctttcctctccccttcaccactctctttctctgccaatcctccaataggtaactcctacgatattccatttttctcctttagtttttctctttttattgattattcagtctttctggaagagcacgaggttaatggttctccccaaatattattttgttgttcacaatgaagtaattggaatataaccgtaataagataaatagtataatatcttgaaataagaaaaccgcatcttttctgaggtataattttggtccaaaaaagtcttgctttatatttgaccatgtgcggtaaaattagaatattgctttacacatcttagtgatcttggcatttcttggcagattatgtttctcttagtaagtgttcaataaatacttctcaagtagaattaaatttctaaggggtttcaggacactgaaacaacataagttttactttcataacaaaattttccttgagaatgaagcggtaaagccaatatttaacaaacaaagacattttcagagaaagtgcatctgaggttaataaacattagcttgaaaaacatacagtatattttctaagaaaatgattctcctacttcctgatagtctttttttaagtagtcaattaaaattcactatgttttaaaatcaacctaaatgcccatcagtgacagattggataaagaaaatgtggtacatatatgccatggaatactatgcagccataaaaaagaatgaggtcatgtcgtttgtggaacatggatggagctggaagccgttatccttagcaaaccaacagaggaacagaaaaccaaatactgcgtgttctcacttataagtgggagttaaatgataagaactcatgaacacagagaagggaaccacagacacttgagggagaaaggtgggaagagggagaggaacagaaaagataactattgggtactgggcttaatagctgggtgatgaaataataggtacaacaaaccccctgacacatgtttacctatgtaacaaaccttcacatgtacccccaaatctaaaataaaagttaaaaaaagtcaccattttaatctgaatcctgtggtgactgcataagctgtttttatctctaggtccatgatacataggatgtcaaagttctgctttatactggaaggaacaatcacttttgaagagagaacactatttcatcactttccttgggttctttacaccttttactagttagatattctctgcctcttcaatttcagcctgttcttttaaaaatacagactccaaaatgaagactatctatgatgtggctctttcacttataattttgtaagatactatgatttctgttttttttagtgttatagtcacaatacgtgaatgtatggaagcgtgtttttatgcttgagtccttgatgttgagaatgtacttgacgaatgggactcatgttagataaattttcatttaactatgatagaacttttttgaaaccccacacttagtatacactgccaacttaggatgcagactgacaagaagaaggggaagttgaaagtggtcagaaacccatcacaagaaaagtgaggcaaatggagcgtctaacataacacagcttgaggttggaaccccatgagggcatgagcattccgcaccatcacagaagctgcatccatttcccaaatgctcagtactgccctgtccagtcagacagaggtgtatggcagtaaagagaccagccacagataagtaattggcaaccagcaaggtaataaatctagtgtgggggactggctgacgtttggtcaatgtctccttccgaagctccacccaaatttctcctttttgcttctcagtcacagtatttccctcctgttaaatagcattagtctggggaataaatgctcttccctgtctactacactgtgggaaacgtcagccacagcctccagtttgttaggtcaaaaaccttgaagtcatcctctcttcctgtcgtagccacgttgatccattcaccagaaaatccggctgggcctacccaaatatgtagagagcccagcacgtttttacctcttccgtcgccattgccttggaccaatgcctctcacctggactataggaaggtcctccagatggcagccctgactctttcctgcccctctccagccgcactcagcctcacagtatcgatgatgattttcttcacagtcaaggaacagagctcctgggctggaacctcacacccaggaatcagggtctgagctgaggtcctgacagtcacctacaggattctgagccttaccccattgcactaacctttcgaaactcatctcctacaactttcctctcccttcctcttctccagccacactcgactccttgatattcccagagcagccatgcaccacccccactccaccgggactacagttcccccagagaagccacagcttcctccctcattgtcaggtgtctgctcacagtgaaagctttcctgctttatctttctccacatttctcattttatttgacacacttccttatttactttatttttttaagagttggggtttctgtcatccaggctggagtacaatggtgtgatcatagctcactgcaacctcaacttcctgggctcaatccatcctcctgcctcagcctcctgagtggctggcaatataggtttgtgccaccatgtctgcttaatttttaaaatttttgtagagatggggtcttgctgtgttcctcagattggtctcatactcttggcctcaagccatcctcctgccttaacctcccaagttgctaggacaacaggcgtgagccactgttcccagcccttatttacttttctttaaattattattattatactttaagctctgggatacatgtacaaaacgtacaggtttgttacgtaggtatacacatgccatggttgtttgttgcacctatcaacctgtcatctacattaggtatttcttctaatgctatccctcccctagcccccaaccccttgacaggccccagtgtgttctcattgttcaactcctacttatgagtgagaacatgtggtgtttggttttctgttcctttgttagtttgctgagaatgatggtttccagcttcatccatgtccctgcaaaggacatgaattcatgcttttgttacggctgcatagtattccatggtgtatatgtgccacattttctttattcagactatcactgatgggcatttgggttggttccaagattgctttttaattctagctctctctaccataaagggctttggctgctattccctgctacattcccagcacctaggagcatccccagcacagactttgtgctcagtcaatactggtgaattgattgattgatcctgagtaagtgaaccacaaaccctgattctagatatgaaagtagataacagttgttcccctcatcccaaaccaggataagacaggaagagcaggctgtctggaaaggctcatgtttactttttacagtccattggtttgcctcagacacagagcaagtgaagcctaaatataggtgtcttcagtggattgaggcgacctgtgtgtcttggatgacagacgctgggacagtgtggggagtgagagtggataagtccctctccagttgctcctgtgctccggactcacgtcctgctccaggcttgcaaaccgtgtggcctcagatcaaagttactgggggaacgtgttttagctcaggaatggaatgtgaccctgtttttctatcctgtgacaccacctatagaaaacactcatattccaaaagacaagatgttttacataacactaacatagagtatgtcatcctgtctgaggtgatctttttctttagttgaaatgtcagaattataccattttaagtgtcaaaaaaatatttaaaatgagaaaaaagcatcaggtgcatgatttttcattctgacttgttaatactatattcagatgctcgaattatatcaattaaattcttggttataattaacaaatttccagaatgagacaattatgagagagaattaaaaaaataacttgagtgatttcatttcagtgtattactctggctaaatgttagaaacacatggctttcctgagggcatgaatgagttcactgttaaagagcctgcaggcaccgaaggccaacaaaccaagacttcttattcctacatgtccaatatcatagtggttactgttgagttttactttttcagtttttaagggtaaatcttatccttttccactctagaaccatctaggattaggacttgttagttgtcatcaaaactgtagcaacggcgatgaagagcttggccctggagttagattgtcctgggttcaattccagctcagccactttcctcatctgtgtcagcttcccagagctgctgtaaccaagtactacaaactccatggcttaaagcagtaggcatttcctctcccagctctggaagtgagaagttcaacactgagtctcagcagggcttcctctgaaactctgggtggcatccgctcttgcctcttcctggtctctggtggcagccatagatcctcagtgttccttggcttgcagctgtgtcactgacacctctgcctgcatcacgtggccctctgctctgtgtctcccgtggcgtttcccttttcttttcaggacatgagtcatattggattaggccctaccctaatgatctcgccttaacttgagtactctccaaagaccctaaacatcacattcacttatctttggcggggggacacagttcagcccataacagcatccctgtgaacttgtgtaagtgaatgaatgtctacaaccattatctgtctcactatcaaaagacgattgtcatccaggcctgtgtctgtgaggaggatgtgaggtgatatgaaaagccctttgcattcattcagggctcaagaaatgcgacttaccatctcctgctccacagccccatttcttggctatcagttatttaaacttgctacattcgaaggcaagctaggagacaccataaaatgtacaaagatgtccccttactctgggcgagctcacacactttgaggagaggtcagagtttgtaacacagaatagaatttatgtcttgtccggagaaacgcaaacaggcagctctgagggagggtagagcgttgcttgttaggtgacttgccaagggcatcatagcaaactggttacaaagtgggacctaaatctcagttttcagattcccaattcagtttctttcccatttgaacacattgtacagttatatcacttgtcaccttttaaccactcagacattatcaaacctaacccatgtttgttcataagaggtactgatgtcagctgggcacagtggctcacacctgtaatcccagcactttgggaggccaaggcgggtggatcacctgaggtcagcagttcgagactagcctggccaacatgtgaaaccctgtctctactaaaaatacagaaattagttgggcgtggtggcgggcaccattaatcccatctactcaggaggctgaggcaggaaaattgtttgaacccaggaggcagaggttgcggtcagccgagatcacaccattgcactccagcctgggcaacaagagtgaaactctgttcactgaggtactgatatcatgtgagagaatcattaggggatgcccataaccttctgggtggtccacatgcactgccctttgcacagcttactcccggttcccaaccctctacatatcccccatcatacccatttgccctgctctgttgtacaggggaaattccctttcttcttctgcagaaaccccaataaaaattaataaagtaaaataaaataaaacacacagctaccaacttcagtacacggcgtgtaagaaatcacattcttgtcacctatcaaaagcaaaacaattcctgaatacttcacccatcaacaaatcactgaagtccatttagtgtgagtaaaataatgagccacctttttcatatccttgcctctggcactgcaaattcagtctcagttacttcagcctcagtctctgttacttaccattttttgtatttttatgctttcctatacactaagtttgaaacatgagcaaaaatccatctatgagaagaaagggtggttgctgatactgataaattcattctggtttttggctagcaagatgatgaggattctcaatccaggaaaagtcatacactgacttttcagtgagaatgctgaggatttaagaaaggaaataagaaatgtcttcagctgagaaggtaactgggtactgtcttggtcagttcaatctgctttcccaaattaccatagactgtgtggctcatgagcaacagaaagttctcatagtcctggagggtggaaagtccgagatcaaattgtcagcaaattcagtattcagtggaagctcgcctcctggtttggagagagaaccttcttgttctctctatgaactgtgttctcacatggtgttaggttagtgcaaaagtaattgcggttcaggcgtgaatattaaatcattataactagaatcaaacacatctttattaatcaaaataggaaccattacaatgaacacatttttgccaatgagaagtaagttttgtttatccctgtagtgtaaaattctgtgctttgagaatcgacaaactcttggatagcattttctgcatcccgccacttgcagaagcattttccctgcaaaaagttgtcgaggtgcttaaagaggtggtagatggttggcaaggggtcaggtgaatatggtggatgaggcaaaacttcatagcccaagtctttccactttggttgtgtgacgtgttgttgggcgttgtcatggagaagaattgggcccttcctgttgaccaataccggctgcaggcgttgtagttttccgtgcatctcatcgatttgctgagcatacttctcagatgtaatggtttcgctgggattcagaaagctgtagtggatcagaccagcagcagatcatcaaacagtgacatgacctcttttttggtgcaaatttggctttaggaagtgctttggagctgcttcttggtccaaccactgagctggtcatcactggttgtcatataaaatccacttttgtcatacatcataatctgatccagaaacggttcattgttgttgcatagaataagagaaaataatactttgaaactacatttttttaattctcacttagttcatgagtcacccacttatcaagctttttcaccattccaattttcttcaaatgtcaaacgaccctagaatgttcgaccttgagttctttggcaacttctcatgtagttgtaagacgatcagcttcgatgactgctctcagttggtcattgtcaacttccaatggtcagccactgcactcctcatcttcaaggctctcgtctctttagcaaaacgtcttgaaccaccactgcactgtatgttcattagcagctcctgagccaaatgcattgttggtgttgtgagttgcctctgctcttttgtgacccatttggaacccaaataagaaaatcgctcaaatttgctttttatctaacattattctcataggctaaaataaatataaaataaacagcaagtaataagtcattcgcaaaaaacataaagcaagaaatgcacactaacatgatgtatagcataaccacatttatttaagaatgtattccaatatcaaacggcaaatttcaacaatgcgaaaaccacaattacatttacactgacctaataggaaggaataagtctgttctcttcagcctcctctaagcgcactaatcccattcatgaaagctccaccctcatgacttaatcacctgtcaaaggccccacctcttaatatcatcatattgggggttaggatttgaacgtagggaccttgagatacattctatccatggcaggtgtgtttcccagcctatgttacacaccagactgtactgccgcacatgtgagccctcgtttacccacagtacctgccaaaataagacacacgtgtgattcccatgtggctgtccatgagacatgtcccatactcccactacttgctctgaggaaagcaagtaaataaagatgtgtaggcaaaacactccctcccttaattgcactaaggaaactgaataaactcattttagaagataccaaatttactgcagtgaactttagatgaaacactaaggtattaaacagaaaataacagaaaactgatgacttcagctttggcattgcgtttccttcggcttgcggaacagccgaacatgagaatcataaacacagaaggcaacaggatgcaactgcatagatctttgctcatttcctttctggttttctcctcttcctcctcctccattgcaaccttgcctgtatctcaggttaaccactgtaagtgcaaagggaattttacatagattttttttaaatggatgatgtaattttaaaagtcatttttgaaaaacctgtaggaaactattatattgccatgaatttcagctagggaatgaaagtcaattgctcactgatactttacaaaataaaaatgtcccagaatatttgaaatattcgatatataatatatggggaagaagcgattctacctctcaaataagtattctgaatggacgttttggtattccattattatggactctagttacatctgaattcacgcttaagtggccataaagaatgctcaaatttcttaagaggtatgtttttaaagagcatgccaaatgtttaaaaatggctactggattaattttcattcctttcaaatttcctttggttaaatggtttgaagtgcttcatgacagtgctaaacatatattagaggactgaaaaatatatttgacgcgttgtaaaaaccatttcccttataaaagataaggattctttccagttccctagtaaatgcacaatggacaggtatttggctgttcctgggataaagaaagacggggaaacttttgggaaacgatgtaacaaagacagccctgttgaatgtgatcatgtgcttggcaaatgcagtcattgctttctgtctctgctgcttttcacaggtataagccactggctgatacattcctgcgtgagaagaaggaacagtcagctgccgagcgatgtcgacttgttctccagcagtgtaaattacaaggctggcaggttggtgacctacaagctatgaaaataacattttaggattttaaataaatgagctgagtcattgcagggagccaccagaatcttcctggcaaaaacaaattcctttgatgtgtttggcaaggcgtgacattaagtgtattccctggaaatttgtcattctttatgacttaccgattttaacatcttgcagccaacatgagaggaaatctaacaggctccctttacaacatgacagaagcttatgagccccattctgtttgcccgtgtgtcagattcataccttgtcagtaaagcattttgtcatatttacccatagcaggagtcagaggagccaaaattgaagaactaaggttgatttctttgtgcagagttggtctctcataagtgcatgttcaacctggacttccccagctcgttcacgtctcagtcagctcccctttttttctgtttctctttgccctgcttctcacctgccatacagtgaaaatgtcaccatcctttgaagcccatttgttggcaaaagcttcataattggaaacactttattatagtctgtgatccatttgaatggtagaccctaggggccaatgaaagctacagctagacttgcagaaaaagaaaataacctgagacaaaattacaggcaaatgtttaccagaaacaggagaagatggttccagattttgtaaataccttcaacaacatcagagtccatccttgactcattttaggaagtagaggtttgaagtgagaagggcagattagagcaacaatgggaaaccacgcagtccatgacaccagaaattatttggaagtttcttgctgtaaaaccaccaaaagtgcataggtggcaaaaacaaatggtagctaaaagctttgataaaaatatgacgattactggaaagtagacataaattgcatctttaaaaagtgatagggagaatatctatgagtaaaaatatatgataattgatgagtcaaaggatggggacttggctttagaaatgacatgagctgatgattcagaattgctgaataggtccaaaagtggcccagtctaagtaaaacagggagggaagactggattgacactcgcacactcatctgtctatgacaaagaacaaagaacctagaattttggcattgatgagtaatgatttaattgtctgtgccacccaatctttttctttgttatcttttttccttttcttttttttttaactaataatgaaatttgaactttaaataacaatctgaaggaggaagcttactcagtctgaagttgtcagtgatgcacatcagtgccaaaagattggataaaaagggaaggaggaagaaggaggaattactaaccaaaagtgatgtctgccaacccctccagagtcagtgacataggggtgggattcacatatatcagcatttattctgtctataggtaactgaagtcagttcaatggaatcattactgagattttgaataagtaattatatagtagtagtccacggatgatgtaacactaagatattcttattgtattattttgcttttaaagactacttacagataatgatatacatatatgtatatgtatgtgtatatatgtatatgtgtgtgtgtgtgtatatatatatatatatctgtgagatagatgtatgtgtatgagggagagagagagggagaatttttatttgtagaagaaagcaagggaatctgtaataattatttcactaagagagtgattggcagtaaccacaatatctgagcagtggtccctctgatagaccactgtaaagtacaggtcaaatatgagaggagaccagaagacaaattggtaagccctgccagccatcatttcttctatattggtgcttttgctaggattgcagctgaggatagcattaaattgaaacatacattgggactttcaacaagagcattaaaatttattttaaatgggaaagggatcccatttcatggcactaatctattttctccacacttttcacctgcctaaaagaagctgaaaacacaagacaaaaaaattaaaaggaaagagaaataaatgtgctcattcactgagtatatttgcttatgagttccctgttgtctagtcagaaaagacagtatttcttcagcttcttcacgatgtaacctatgatatactttatactaccagacaaataatcaacttcacagaaatgaagcatattcatacttcacttttatattggtctgacaaaggaaaaaaagattttgttaaaaaataaataaataaaacaaaaaacactcattcctaacctggaaagttagactcctcagtttcaaaagcaaagcattttttagatatgtgttgctaattacagaaagaattcctcctagtcaattctgtttttaattaatacagggattcaatcagaagctgttaggctgcagggacaacaaggttgtatcggatggttattctatctgtagcattatttccaaattgctaagagttataatgtgtgttttcattaaccagtcagttcatcctttagtcctgagtggttagcatgaaatgaatggttactcttttccatatttttaaaagcagtgctggaggacagaagtgattagaattatattttgctgtgttaagtggtatacagtgttagctagaaattcatttcttttaactgaaaatagtaatttcgttgtcattctaatgcgtcttggagatctggcaggttttctcttctctctttaactttaatcagaccctgtagaaggaaagccttgaatcatcaatatgagatggtaactctgtaattcttatactctccaacattgtagcaattcagtaagccttggtgcacatttgatttccttctgtttcagatgaggatagagatgtggtatcttcagtactattacttttgtatgccgatctatgcacctgtgtctgcttttcatgctttaggtagtcacaggtttgtagtcgcacatgaggtactggaatttttagtatttaataaaaaataattcctctcatctacagagtatattacaactattcatagtttttattttattttatttgagcctaataactctatgcagaaaaggaaagtagacagcacgtacaggagtgaccttattttagatttgaggtaatggaacgtcacagagagcccttgtcttaattagagatcagtgtactgatcaaaatactaggtgcagttaatattcagtttcagtgggagtgccactttgctgagaccaacgtctagcttttcctatgtcatgttctttccactgcatttaactcaatctgtatcttctaatataactatctgaagtcattttgctcatattacaggacttggaaggggtagattatgcatcacagtacaagctttgatcaaaggcacttataccgtttattcatctgagcagcctgccccttgtacagtgtcttttttatgtttataattcacccagcaaatgaaggaaaaacaagcagactacttcccattacagggtgactctgatcagaatccttttcaacccaaactgtcaatcaaactgaccctgaaatagcacaatgcctttgcaccctcattcccaactacatcttggaaacaagaggagaaggaaaaggaggagtaaggaaaggagacgatagagaaggagaagaactggaatcaagtgaagagtctcaggaagcatttgatgtcaattctaattctgagggttaagacctagatgtgactcaggccatccagaggaaaggacaggggtgggggcaactcataggcggtgctggtggaaatgcatgtcaaaggagcatcgctgcaccttcgcagctagagcaaaggcagtttgaaaacagtttattaggctattccgcagatccacacagtttacagtataccgagttttgctcacgtgccaattctcagcgagacattccctggctactagattttaaattctcactatcctcgaccttcgtactgcatcttctcatcctcttctctgctttgttctcctccatggtgcctgggaccttctgttacgcttcagattgcagtccttaacatgctgttcaccacctttcctccatagcgtgggaactccatcacgagggctttgtgtctgcagcttactgctgcatccccagcatagaagccagagaaagacacaggacagacactctgtgcctggatgctgggccaagaaatgagtttctgtaaataagaaactaccaaacaatacagtacacttgatgtggatgcaaagacatgtaagaatttttacaggctgggcgcagtggctcatgcctataataccagcactttgagaggctgaggcgagtgtatcacctgggatcaggagttcaagaccagtctggccaacatggtgaaaccctgtctctactaaaaatacaaaaaaatagccagggatggtcgtgggcgcctgtaattccagctacttggtaggctgaggcaggagaattacttgaacctgggaggtggacgttgtagtgagcagagattgtgccattgcactccagcctggacaacaagagtgaaactccatctcaaaacaaacaaacaaaaaactttttaaaatttattgttttgaaatgaaataagaatccaatggatttttagctttatatctacgtgtataagatacatgtattaatgcattaattctataattaaaaataattttaaaattttgaaactactacataaatgtaattttagcatagaatactatatagggtcaaattaattattttaaacatttgtgagaaagctgtaagtcacactgcattttgcaccaaaacatttttgtgttccaatatataatttctgttgtgtcttttataccactagactgtacttctcaaaggaatcttgtgccctttttcatagaatttgaactggtcaccataagttttggcaaagtcatacatgttgctgtttccttaacatactcaaaattgctacttttacataatgtggtttgattttgaagaaaggaaaatcaggatgtagtggtggctagaagggaatctttcacgttggtggcttcttatgtttacagtgaaatgacatattttaaaaacatggtggactagtcagagccacgtccttatttgcaaagtgggatttatgtaacttgtttgcaaaaaggaatggaagtattttgaaatgatttgagtaagacctgcatgactaacttctagtgctgttttctgtcgcagcagatatagttttctttatgaaacgaagagttcatggattacctcactatggaaaaatatccaaatagtttgaattaattcctggtttgaaaacaagttaaattaagccagtagttattaaccatctgctatttgtttcattattgttattattcaggtattttccttatctgaacatatgcattttaaattcagtgctatcttaaggtaacttggaaaggatccctctggaactgtgtatagttaatcaaagactatttgcccgaatttctccaagccacagaagagtgactggacagcagttaggcccctgtggaacatgcttgtttttcatgttatatcatttatgtaaaatgaaaacctctgaagctaattctaagtggaaaaataagtggtataatctgattttcacacattttatatgcatcaactggttataggatgatttcttctgtgtagttatttgaatgctatattcattttaaagccatctggagggatgacgaatgaagaaacaaatctgtcagagtcggtccatgtgataccaggggtgctgcttcggaacacaggcactcacacagcactgggagagtcgagaggggcactgcaccgatgtggctctgtgcagaaaggctttcccagtggtacttttcactgatagttcaagaagatgtcgagaacttcggggtgaaagaagttttgtgggtaggcaaagaagagtggcctgtgtgtcccgtttgaggcaggaacttgtgatacctgtttctggaaattgtggaaggagaagttgagatcttaaccttagagataacatatcgtctatgattttaaggatgaggagtcagacacacagatccttctggtggcttactcaagattataatacagacaggaagaaagaaacaaaattagaacaccaacttcatcccaagtaccggcatgatacgatacttactctagtgtgtgtgcatgcgtgtatgtaaaagagacagagagagaggctctgaaagaaataacaaagggtactcaacaaaaaacatactccaaattgtaatgagatatacttttcctatttgtgtttacttgtgaacaaagaaattcacaatctttgtttttatcacaatcttctaatgtaatgtttacggaatagtctagattttattacccaaatagtttgaaataagtcatagtttgaaaatgagttaaattaagttatgatctttgaaggatttgctcttatattgccaagaactgcaacattaacattttaccataacattacataaaatcagttggatgaaggttttattatttcattaatctgcagtagtacagtagagaaaataaaatagaagagcaaggaactgttaaagttttaactacctctcactttttttacattctctatgatgagacaattgtattagggcccttacttcttattagtacgataaattaatggtttataacctttgttttactactcagggaacacttcataaatcaactataattacaagctagaaaatagcctataaaatgattctttcttctgtatcctttctccttctctggaattataaatgttgaaaataataagcattaggaacctaagagtacaccttgaaactatgtacattctgtttggaatcaccatatatattcatattatattatattatattatattatattatatgtgtgtgtgtctgtgtgtgtgtatttcctttcttcttttgtgccaaacacatgcatacacacacgccatatacatatatgacacatttttgttataaaagtagtatgtatccttgataggaaatttgaaaaagaaaaaaactgaggaagaaaatacaatctaccagaattgaactacctaaagataactactgaaaatatttggtgcgtattcattcactttgtttttaaaaatgatattacatgtatttgatccttactcagtgtgtctttctctctttccacacttaacttcctgaggacaggtgtcatgtcgccgtgttcttttgtatttttacatgtgtgcacatgtgtgtgtttcactatgacatctcttacagggtctggcacatagtgtgtatgaaacttgtgtttgttgaatgaatgaatgaataaatgaacctcctactgatgaccacatcttccctttgcaaatgaaggtatctgcagtgcgtttgggtgatatgtgtgatagtttctgcctttagagtaattttacattttttcactcagcttcattatgcatgaagagtaatatcttagagtactatctggcacctactaattgctgattaaaactgactaggcctatgcctaatccaactttgattgcttagaaatccatctgttttcctctacttcaagtttattgattgactgattcaacaagcatttactgatcaccatatgagttcccccaaattaggcaaggcaattgcgatggctcacagtctgctgggggagaaacagtcagctttaaactaataaataatcacaggttaggatccaggtgcaaagagagcaaatgggacactgcagtagtgaactggagggttcctgacctagacagggcagttgtcatgcagggcatttctgggagggtcacatgcaggcccagatctgaagggtgagaaggagctggggacgtgctgaggcaggaccaaggggcccagggtgaggggcccgagtgtgctgagcccccgaggtgaggacatcctgggagaactgacaggagagtaggagggctggggacagaaccagatgagaacgggagacagggatgctacaaagccatgtttctcaacctttatgttttcattattgccccactaaggagaaaaactgagagaattaataaagaattgagttctggggaggcaaaaataactttgctattacaacagtttctgaccttcaaagctcagtcctgctggataatatgaggcccctaacaactactgaaagaggggtgtttgtgtctgttcctactgagagatccaactccatatcttctatgtcaatataaatttccccaacttcaagattatttagtcattcgataagcatttactgagcacgtattatatgccagaagccttgtaattactaacacgtttttcttctcaagaaccagttgtacccactggacaggatcaccacaaggagaaggtgtgtttagagctaaatggttcggaaccagtgggactttatgtgtcaaagtgcagcattctattttaggttcaatgcatgctactgataagttttagagagggtagaacatgacctgatttatgctttaaatgtaaaaaagtggtattagagagcaagaacagagctgggaaacgagttcccaagccaatgtggcagctcaagcaagagagagccatggtggatgggacaagggaggaagccgagaacacgaagggaggggagaggacctcaccgtggcaacaatgaaggtgcttgttaagttacattgacctgaaggtggaatctcttttaaaaccaaaatattaatgtagatcaggaatatactcaagctcttttaaaaaacgaacttgctccataaaatatgtttggagctctagatgatggaaaagactcggccctttagggctgaaaacagaagacagttcacaaaattagatgggattctcaaagcaaacgtgagcacaccacaggacagacatatgcagaattaggaaagcaatgccagaacttctgaatagctacaaatagtcctaaagatgcactacataagatcagatgtgcaggataaaaaaccatggtatcatgtttttagaagaaaagcacacatcaaaatatgtaaatgccatcaacttggcagatgacaataggacaagggctcccacaccccagggagtgccaaaggccatgaccatgtttgtgttactgtttggccatttatgacatacagtcccatggggcaaaccattattgacatgatgtaggccattttgttaaaaagaaagatcaaatgtgtgctctgactgaatatattaacttatcaaatacattttcctctgtgcttttgaagctaattacctttgtttgggtgtggctttggtaagctttttcacaatgtgtctctttgggagaagtgattttctttaagcactcttgaccatatcaatatgatttccataatgaaataacgtatagaattacatagtgagtcattcactagtaagctcaaaatagtaacttttattcatcactgcctgctatgcaggtcatactgttctaggtaagaataattaatttttcttaaactataattatatgtaattcaagccaaaccaccttcttcaaataccagaagatacagtgctctattagatgtgtgtggctgtaattatcttttctgtgttgaagttaaacttcaggaatagtctatttataacaaagagaacatgtattttcatataaatgtatcctttgagaacgtttaaaagtacattcagacattcagagccaggctgaacattagaatttttctatttagtagcttttcaaagcaaccatgaaaatgtagagtgtggaggtattaatagtaaaatattcacacacaaaaaagtaatggtcattcttagaaatttaacgaatgaaatgggggaaatgtgaattcagcctggagaggatgcctttagttcaatggtttctttactgagcttgttgaaaggatagacaatattctactcatccttgtggtcccagcatctgtgccctgctggtatgaagaaggtgcttggcaaacatttgatttacgaatggatacatgaatgaatgaatgaaggtgaatgaatgaatgaactaatgagtgaatggatgttcagagcagacagatggtaggatgacggatgaacaaatgtgagaaaaggaacatcaggaaaaatataaatataatgcaactgagtgttatgagaaaatgatattgatccaggaatgaattataggtaaaggccttttcatggcacacatgtagaaatgttgggattttgagatttgtttcccttggaagagatgacctggtaggcacagaaactgtttcacatagcaaaaatagaacagggttgtgaaggagcacaatgacattctgagatcagcaggaaggaaagcaaatctgaggggagaactctgcagacatcagaacacatgaaaagattgtgttgttcatatcaccatcaataaagctattcttaacaaactgggaacagatttacattgctgggcactttaaaaaatactagggcatttttccagaatactgatatgtgaaagatgtgactacttttgatgcaactacgatagtacatatcctttgaaaaagctggaagtatttactagactagggctgtttttagagcaagaggggttaacatttttaaagattaattttgtatgaaaatgaagcattttaattgcagaaaagaagctagcattcacagtaagacctttctcattaaaatataatctatgttaataaaatattccaatgattgtagacttttttttttttttgagacggagtcttgctctgttgcccaggctggagtgcagtggcacaatctcagctcactgcaacctccgcctcccaggttcaagcaattctcctgcctcagcctcccaagtagctgggactacaggcacgtgccaccacgcccggctaattttttgtatttttagtagagacagggtttcaccatgttagccaggatggtctcaatctcctgacctcatgatccacccacctcggcctcccaaagtgctgggattacaggcatgagcctccatgcccggccgattgtagacttaaaaataaagggatagcatctaacccaatcctgacaacagtaatgatattattcagtgaaaactccattcataagaatgctatgggccctgtacaatatataaagaaggttcacattggttttctgcttcaggagagtatacgggaagctaaaataatagtaaatagcatctcttttagagaaataaaaaagggttagctcatattatggagggctttataggcaacataaaatcattgaagtttctagaagaccaataaattgaagtcagtgtgcaaggtgagttaaaaagcagataaaggagagatgatgagttaaattctagattttagtcggtaataatcctatatcagaggtgatggcactggaaatatgaaactcagcatctttgtttctttaatcctattagatgtattttaataaaataaatcaaatagtttaaataagttgaaaatatttaagatttaatttttgatggccgggcatggtggctcatgcctataatcctagcactttgggaggccgaggcaggtggttcacctggggtcaggagttcgagaccagcctgaccaacatggagaaaccctgtttccactaaaaatacaaaattagccaggcacggtggcgcatgcctgtaatcccagctactcaggaggctgaagcaggagaattgcttgaacctgggagaaggaggttgtggtgagccgagatcatgccattgcactccagcctgggcgaaactctgccaaaaaaaaaataatttttgtagacaaatgaaattttaaatatctgaggtcatgttatagcaagtgcttattcaaagcattttttaaaattctgccttctccattgtacacatccatttactttcatttccttcaccttaatacatgtgaattatgagctttatacttttccaacattatctgagcttataaatatctcacagttaagttgaatagtcagacagatacacaaataagaagaaaaccaggacttcagtgctactgtagagatgtatacaaggtacactagtgacatggatgtactactgtaattgatttattattataagatacacactaaacaggagaaaaatgaattcccactttggatcagaaagcaatatgatatagttggagagtaagtaagcttgaatgtattgaataagttctagaagcctactatacaacatttcactgctatttaacaacactgcattatatgcttaaaattttattaagaggctagatatcaggctaagtgttcttaccgcaaattttagagggaaggtgagggagggagggatggagagaggaagaaggaagggaggaaggaaggaaaagaaggaaggaagagagggaggaagggagggaggagactaaaagggccatacaataaaaaagtctaataaacctttcaaaggcatttgaacatcatcctgaaaatcattacaggccactaaataattttagacaagaaaggaacataatgagattgatatttagaaagatcacgctgaatatagtttaaaaaatggacgcatgtagacccatgataatttatggagctactgaaattattcatagaagtaaacaggaagtgggttctagaaacctcaatagaacttatgactaaatggggactgggagaaaagctgtaaacatacttaggtgatgcttggggttctggcttgggtgatgaggtgatgacgactccattagcctagaaaggcaagagtgggtagggatggatgagatgggaaagtgtgggagaaatgacctgtggaaatctttagggcttgaggtgctcagggaacacccaggtagatggtccttttggtcactgagctagagaatccaggataagatggaaacatatgagtgaggctagggtgcctatgaaacatcgacataaatgtgtgcacaaggagatgggctccataggtatggactcggggataagatgagctctcacgagcagtctgtattgaaagcttttggaataatgaacttaccaggaagatgatgaaaagtaagaggagaattcagtgaagaactctgaggatagctaacttttcactggggagcagcaacatagcagctttggacaaacattggaacagagatgacagacacacagagcaggggaccaggtgagcttgtcaaagaagttaagcttcaagaaaagagagtgacccagggtcttactcctgaaaatgtggtccacagaccaccgtcaccgacatcatttaggaatgtgttagaaatgcagaatgaatcactggccccatcccaacccactggaacagaatctacattttgacaagatcccaagcgattaatatgcatttttcagtttgagactttataggatcaagggtgtgtgcttcttttagtctggagcctagagagctccgattcatcttatctctggcactaactttctgtgtggactgtgtgaatgtcatacgtcctctctaaaacatacctttttctcttgaaaactgaagaggttgatcaagatgatttctgagatctaactagaacagtgtgggttatgggcactctgtttctttgcacctcctttgtagattattaatcctactagtgtagtctattgtggatatcacaagtgcacatttccttagaggaaattgtactattattccgaaataaattctatccaattttctatgtctccataagtaactgaagtgttttatgttgttttaattgacgtgtccttcttctgtcaaagcagaaccatgtgacctgagctttctcctttactttacctgcatgggaaacaattactgattgtattttttagtagcagtaaatgagtaaactaaattaagtgacacatacaatacaaataatatatgcctcttcaactcccaaagaatgcatagatataacaaaatgagaggcgtcactatttttctaaactaccaatatgtaagaagagttctacattagatgtttttctcaatttcattaatatagagagaaatgtgcatcatagaaaaatatcaaaggataatagctatatttttcctttgtaaatgctatttcaaaagtactgccagaaacactcagcactcctaaaaattgtcttttaaaaaaaaagaagtgctctacaggttcccttgaagtctctactaacacagcttccgtgccacctacactctagcacaaccaccgttccagcatttgtctgtacctccacagcctacacctctcaaaaaaaaaaaaaaaaaaaaaaaaaaaacacctaaaaattgtaacagtaattggagctttggaagtcatcaatgacaattttgtttaatcttttaaaatctgtcacctaacaagaaaaaaaacctaatggttttctaataaaaatagcgatgactgtaattcacagatggtttacttttacaggagtcagaatgacattaacattttaatctcagctaggaacactctgcatctagcagtgcacagggagagggctcagttggagaacattttaacctctccttttctctgctagtgagaaacattctttgatgtgagaatgccaccaaaatgaaaaacgtaggtgatctgaacctttggtctaattttaatgaatcttaatttattggatttgatataacactgtaagactgattatacagtaacattcattccacaggaaaaaaaaatcaaaaatggtcaataattttctttcggtcaatgtcattaatagacaatgtaaatccatgaaaattcagaatatatgtgatcttatctttgtttcctgctaaagaaggattcttaaatttgtatcttcattaatccctagcatcagtgaaagtagagaactgtaaagactgcattcagaatggtttctgaggaagaactgcaaaatattacttaactgctaatttcattgctttcagaaagaccaaacatttactacaagtatagcatctcaaaaaaacaaacaaacaaacaaacaaaaaacagcaaagtcaaacaaatgctaaaacatccaatgagtatctccaaatattgccaacccacaaataaattatatagtacaaaactatatgaaataaaatggtccattggatacccataaaatatgcccaagtagttgattgaagaattttttacaaaataatctgaatgtaatagcagcaagcacaatacccaggcattgcaacaaagtgtttagccatgtcttgataggatgcttgtattgtgacttcagatctccaacctccaccgagtgaatccgaagcccagaagcccctcataccttacaaagcccttggttgtacctcagcagtgcagatttgcataggctacatgaaaaacccaccaggggattggaggacagatccacccttccaactcctaccattgcgcatgtctgccttcctctcatttgtgcttcgattgcaacgctgctccttcccagccattatcccaatccgtggctcccagaaagaagtccttttctccacctccaaacctggcctgacatgcagatctgccctgtgaaaccatcaatccacttctcaactaccgaccatcaagaacttcctgaagtatctagtacattccaagaaaagttcacttcaacctctgtgtctactcttcctataatttaccctccatatctgaaccaaaagtatttcctgaatatactctatcctgagcttccccttttccctacttcctttgtctgagaggaggagatgacagggtcagctagttcctggttccccagcctatggctgcacctagccatgggttgagataatggggataatggctgggaaggagcagggttggcaactgaagcacaaatgagaggaaggcagacacttgcaatggtaggagttggaagggtggacctgttctccagtcccctggtgggtttttgatgtagtgatgcctaagcaaatctgcactgctgaggtacaaccaagggctttataagttacaatgggcttctgggcttcagattcacttgatggaggttggagatctgaagtcacaatacaaactggtaggccagtttcaccccatgtttctttttccttttatttcctccatgacttattctatcacctgccaccttctgtgacttattctggattgctgaatgactctagggtctgacttaagttttcatttgtcatcttatctcattttcaccctagaagctatcatctgtctctgtgactcactttatgcaagggcttcacaattctttatcttctgttctttttttctaatctgaattcatcctgcccacatccctgccacttgtgcatttcaagaatatatgtccatattcttcaggagatgcaaatatatataatatgcaaatatatataatatatgcgtgtgtatatatgtatatatatatgtgtatatatgtatatgtgtatatatatgtatatatatgtatatatatgtatgtgtatatatgtatgtatatgtatatatatgtaatatatatgtatatatgtatgtatatatatatacacacacatatatatataatggtaaatatgtacaaagcactataataggataaataatcatttatagggtgctctgggaacacaaatagaaggtgtcaaagccctaaaggaagtggaaaggtggatatcaaaactctagtaatggagatgaggtttgatttcagttgtaaaggataaagaggagttggtcaacagagaagcagcagttgcagaatcttccaaacctaaatgattaattggagtattttgccctgccttgccaatgaccagctcaataatccattcttagacagttttcagaattcaagacaaatttcaagaaatattttttttaaatttagatctggtcctctttatatttcccagcatatccaaattgctcccaggagaatttccatgtttttcctatagtactcttcatgatgtagccaccaattacagatgtagcctcttccctcatctgtgtccacataactgtaccctcagatggtttgctgtcttctggttcttgcctttcacatgctagtttctctgtctcacacccatcatctcaagatgccctgggaaattcctgcttatccctcaagaccaaatggcttagaaaacatgcttcttactgaaccctgcctgatcacaccttgatcactcttttttctctaaagctgtttcttggacataactctatgtcctgagcatggacaattgccagaatctgctcactgctgaccttccccagtacactatgtgctccatgaggacagaggcctccttcatatccccagatctagcacaatgctcaagataaacctcctttgggtttttgaatggctgttagaaatgccactgtaagagatcatactcattttgtccacctcctctcctgctgagggtctccactgaattaagagaggggaactagaatcctgttctcctgtttcccttccacaggtcttttaggcatgttgctctccttccatgttaattcccctaatgatcattattgatcccatccattgtggagcatcaccagccatcattcctttggagttttgttttggaacccaggtttggatgaattttgtctttgggagttagtctcccacaatgagttacatcccacaatcaatgatgaacagagaggtgacatgttccctcctttccaatgcctgtctcacagatttgttctgcagagctcacagacaggaccaactgttcttcctgtcgactgccaaaataagtcagcagttgggaaggagaaaaaaaagactatgaattatggaaaataactgggaagataaaatggcaatacaatgaaaaaaaaaagtaacaatctcagtagccacccactcatgttactgtctcaaatttcaaccaactaaaagaaactaaactaaatgaagaagaacatctagtcaaccagaaggctttgaagtagaccagtagttaagagctttccccattgatctaactaattagcctgactgtcataatgcatgattcagtcaaaatctttggcaaaactgtgttttattaagacaacagatcatgtaagggaagagttaggtggaaaggggcaaagtgacaaagtgtgtttggaataaactccattttcatatgaaatggctcataaaacatctctggccaaccattctgaagacaagtctgacctataaacctttcccgtacctgatgatgtgtacacacgtgccagcgtctggtggtactgtgatgtatggcataggctagggggtgttatcattttaatgtccccagttcatgcttgagagcacacatgttagacttctcactttaatggtgtttgtctcaagtgctaagaatctgattataaacttattgcaagtaatactttccctttatctaacagaatatcatctcagagcttccttggcacaccacattaggatccaccaggctctcctgcaattacttatgtctgcttctcctaagagactatgagtgccttctatgtgaggggtattcctcacacctacctcggttctgtgaattcttcaaataagcacaacacacaagagaattacttaaaaagtgtatgaatgtggcttacagctatgtgttaagaattttctttggcagctgtctttatcaatatcagtacgtttggataagttctcatgccactagagcttgtcatataaactgatttcatgtcatgctaaaatttctttttaaaaattctggaaaagtatgttcatccctactactgtttgtgcaaacatccagaagattgttgctcaaagatgactttctcatctttcttgagacttttaaactttagttctgaagttctataattgcagttgtacaaacatttgatttataataatatgtggcatagtgggaaaaattatagaagcaaaacaattttatgcatcagctttatgtttcgtttggtcttttgagtatttgtttttctttttgtaaactcaaactccctgctatgagaagaggaaggaaagattctctctctagaatgggagaatccattcatggggatgctcttatcttctgactgatagtcaaggccagtgtttctcttttgcaccacatggtacaacccacatcagtagtgtgtaaccatttgaaaacaatgttgacacatgcagtaaacatacttattacaacaaagcctttgggattttgattaaatgtaatagtgtttaagaatcagagacatgtactctaattttctgagtttgtttcttctaatcctctgctggaaaaatattttgtctgattatttttccatcatcattttggtatcttcatgctgttaaatgtttccctgctgtttgcattttagatgggagtccgaaaagtgtttctaaaatactggcatgctgaccaactcaatgatttgtgcctacagttgcagagaaaaattataacctgccaaaaaggtaacatttatatgccaacatttctgaatttatttgagttgtgaaatgcaaaatcttttagtgcatccccaagtttaaatgtcgatggggtctgcaccctagtggaccactctctcgattcctggatgctatcttcaggcaaatagtttttgggtgtttaggaagcattgtggcttagtttgctatgcaaccatctcaaaatcaacatttgcagacattgttcatgttttaattagacatcctttttctgtggggctcatttggatatgcccctatgtgaatctctaatgggtcttttcattttctgataataaaaagtccacctgtaatcccagttactcaggaggctgaggcaggaggatcccttgaggccaggagttcaagaccagcctgggcaacatagtgagatccccatctctcaaaaaatgtcttaattagtcaagcatggtgggacgcaacaatagtcccagctactcaggagactgaagtgaagaattccttgaggtcaggagttccagcctgcagtgagccgtgtttctaccactgcacagcaacctgggtgccagagcgagatcccacctctaaaagaaaaaaaatcaaaatttagaaaaataaataaaataagaagccctgttacatgctagtcccttgaacagtctctgttcagattttaacacatccagctcaaataatgatcaaaattctgaacttcattctaagttaaaacatccttcttggctgttccaggcctgtcccatccttactgggcatgggactgatccctacctactcaggttgcctctgggtcttccagggttaatgaggaggggaagaggtaaggaggtgtcttctgatgaaggtaaaaagtcttctaacgataaaaagacctgcttatggcaggtgttctgatgacacaggtgtactatggcgctggtctcctccagctggggcagacttcaacagctctccacatattcaggagcacttcagggacttccttctctaactggcaacatcctcctttggccggtcatttgtaactcacccctcagcccctgggcaccttgcagaccctctgttggagtctcattgttctctcagtacacattctttgtgaaaaccacatctggtgcccaagaaacaaactcttagatggcttcctaggtgcagcttttctctaacagagcctgtgtttccatgcaggggcctggcaggagccattgccacagccctggcctcagagatatcacagtgcacagtggccccaaacccccaggagccacataccaagatctctgggtggcctcctgaaaccactttcaccaggctgaggcaaggggaagccttggacaagagagggccaactgctacctcttggtaaaggaggcatcatctttctagtgtgtgatgacctggctgctaactcttggtaaaggaggcatcgtctttctagtgtgtgatgacctggccttcttaacttcaaccttcatcagtgcaggggagagggcgggctacagggctgttttggatcatccccttgcaagtcctatttgcatgtttggccctgccccaacccatgtgtccctggaacaccagcgacaccaacatcgccagggatctggctagcacagcaatgcctcaggccccacccaggacctgtggcatccagagctttatctgcagccttagctgaaactgggacagggagagtctcatttaatctaacgctaaagacagaacagggtatcacaaattctcctgaaaacttcccttaaatataatgataagaaattttgccccattagaaatttctgttctatttaacaaagattaaatttctataccctattgacctggaacagaaaaaatgaacagaactgtaattacttgttcacttttctaaagataaaaattaagaatggtcttaaaaggtcgggcgcagtggctcacgcctgtattctcagcactttgggaggccgaggcaggcggatcacctgtggttaggagtttgagaccagcctggccaacatagtgaaaccccgtctctactaaaaatacaaaattagccgggcatggtagcgcatgcctgtaatcccagctactcgggaggctaaggcaggagaaccacttgaacccaggaggcagaggttgcggtgagccaagatcgtggagatcatgccattgcactccagcctggcaacaagagtgaaactctgtctcaaaaaaaaaaaaaaaaatggtcttaaaaaattacatcaagatagaaaccataatctcatattgcataaatgaaataatggatatgagtattttttaattacaggcttgtaaatgcaaagcattaattattgatttttattttcatagctcttaaaacagttccctcaatgctttttgctaatattaaatttactcaaaatttatataatctggaaccatttccagttgttgttttaagaattctatatttttctttaaaaatgtccaggggaaagaaagctgtaacttttagttttaaatttaatcattttaatttaaaattattcctaccagaagttttttctctgactctatatgctcattttatcctggatgaaaaatatctgtaaattaagaccttacatgggcggtatcttagaagcagtcttctgaatttgtctgaaagacaacaaacatcaacatccattagtggcaattttatttttaccagttgccccttattgaagatatcaatatttagcaactggtgtaacatttttaaagaattttaaaaggctattgggatgaagtgtgagaaaatgaggtcttccggaggcgggacaatagactccgggtgaaagtgaatccagtgaatagctgtgctgtagtgggaggtcaggagaagtctggcacatccacattaatcttctctttattccaagagattaaacatcttgaaaatactctctctttcacccttccgaaagccaatgtctccctttttttttagtgtaacaagaaagaacgagtgaacaggccaatttcaagtcttctgcctttttcgcgctcaaggtgcccatcacatggttcatacgtctccactttactccacattttatattcctggaagtctgactgtgcctcatactgtttaacatttttcctttaggttacttcagaatgactgttttacagttaacttaatgcaactgcattccaacataactaaacctttagtagtgccatctgaaaaaaacgctttcagcatttcagatatccacatattattttcctgttcagccatcatagtagaacgttctgttcagctttctaccagctactcaagtaaacacatcaaagttaatatcataggtacccctcatatttattattttataaccatgaactattttaaagcacttaatattttataggcttcctcctttcccaagggcaaaaataaagtgtctttgctgcagacattggctttcctgaaattataactcttctataatcttaatcaactccttgtaatcctagaaacttttaaaattgggagagacagaatcacaaagtttgaaaagactctaatcagaattcctctacctgcacttgtccacttcacccatgagaaggcgtcactgtgctggccttgtacacactcagggcccaggaagcaactctttcatgaggcagcctgatccacttccaccctgtgctaattgttagaaagttctttctaacactgattgcaaatatgcttccctgtgactttcttggttgctgatctgccccctggagagtgagagattatgtctgtgtaactgcaggctaaggaaatgtagtttgacctcctaagcttggggacatatgagcccgggctctactattccttggttgtgttgacctggaggaactttcttagttttactaagagaagtgccattgtgtctgaaattgagatagcggtatattttgtcattgagtttcagaattgaatgacgcaatagagtgtcttacagaggtccctttaaatggtggtcttttatttttaattcttgtatttgttactgacatattgatttcaaagcattttcactcatttcccccaacttttacacatttttctagccgtcctttcccagagagcaggatggatgtcctatatttatacacaatctttttccagagtcttaaatatagtgttaatttctctaagaattaaatcataatcttagaaacaatatatgcatgatatttccaaagacaaaccccataagccttaggtgtttatgtaataatgtgatgtaatgaaagatgatccgcacatcccaaaatgctgcagttggaggcacaccccaaaattctgtgggatttagacctagttctttcccactgatttaactccagtccatcaaagtccagcttgtgttaccaaaaacaatgtggaggcctttatcatcaatatattgcctgcaagatctcattcaagtcaaagagctttgcctttagtgttatcactgctgatttagataaagtcttattctgggttaaatgtaccttattctacaactgctcagagataagtatattatgatttttgtttgtgcatgtctgagtttttcacttttcctccatttactaacccatgatccttctataaaagttatcagaggatttttagcacgccagcacctgcttcagagaataagcatcagacaacaagaggtgacttctatcaatagctttctgcagaacacagaggacatggggctgaaaacctacgatgccctggtcattcagaatgcttcagacattgcccgggaaaatgaccggctccgtagtgaaatgaacgctccctaccataaagagaagttagaggtcaggaacatgcaagaggaaggaagcaaaaggtaaaggcagagagcatgcaattttaattacctttgtgattggttcagtggagtcatgaaaattcaaatagcccttaatgcagagttcaatcaaatatgacaggagttgcaggaacaggcatgcgtggtttgttattcgaaatggcagcagtctaaaaagatgctttcctgtgctgtcttctcacgagttcaaggctttctgtgttccttcattcatatgtgatgatgactgcctctcctgccatgcttgtgtcacttaactacctcaagcacactctagttctaaagcatttactgtttctgtattagcaaaaatatatagcttggctgttgacatttttacacaagcgttacggatataaggctggcttatagaaacttctggaaatctgacccaaaaaatggagataccactctgaaaacatggaagaagtgaactcaatagatagattgtaagtgtattatatatccctgtgtaaactgtcacgtctctctttaccaataaagcaagctttggggaaagctttgtatttaaaagttcactttagaggcttagcttaaaacagaaatgtgacgatcacctggtccctctccatttgatcactctcctctctctgtgaatgatgaagacacccgtgaatcacaacacccctaagagggagggcaaggagctgcttcctttggaccttaattcatcgtcagggagatgtttgttttgctatagaaacttggtaatatcttgttgtttctcactgaaaatgactctcctttcccatttctgccgatgtcaatttttttttattaaagtggaaatggcaatgtgtatcttgttaattagcttcaaatatctcagtgattaaatactgaaaaaaatcccctttgtacagaaaaaaagactgtaattaaacattacaggaaaaacaaattatccactgagtgccatgctttcatcttcagctatttcattttctacatgggcggctggctctgccttgtggtagattctagccctgttggtgttctgccacagaaagatataattataaaaacaaacgcttggaaactccttgtagaatgaatgcattggcatcttgctagcacatgattacgttgacatgcgaagccagaagaagtttttttaagcaagataactattaattttatatgacttccaaaataatatttattattttctctgctggaactaaacggccaccccaatttctcaatttgattatgtatgtattttcctgatacaaaattaagtgaagaagtatttgtctgtttatttactgaataccagcagtttacttggcactggacaaccatatggagtcaaggaggagaaataatagctctgcacataattaaataatttctggtagaatttaagaggcaagaaagagagtaatggggagaaggagaacactgaaatgtaaatttctgagagttttaagtagagtctatcctcttgcgaggggaaatggtgatgaactcccagcatttgatgcatcagtaactctctattaagatggatttgccagaaattatcattcagattgaaattctggttttttgatttgcttaataatcagagtgtgaagaattcattcagtgagtgcctgatggaaaatgcgaaggcccttaagtagtgttgcgtttgtgtgagaatgtttaaaaagtaatcatgatggatatcccgcgggctcatgtgcttttcatcacaaagccggagccagaggacgggtggccttctctggaccaactggtcaccagagggctgcacacgtcctccagccacagcaggaagggctgcttgccaaaaagccgtcattatgtctgcttgagcaggttccttgttaccggaataatgcatctgggcctctctggcgtggtgctgtttgtgttttgtttccccctaagaaccgatgacaagagtggacccaggcatttccaccccagctccatgtcagtctgcgcggccgtggatggcctgggccagtgcctcgttggcccgtccatctggtctccttcgctgcactcggtgttcagcatggatgacagcagcagcctcccgtctccacggaaacagcccccgcccaagccaaagagggaccccaacacccggctgagtgcttcctatgaggctgtgagcgcctgcctctccgcggccagggaagcggccaacgaaggtcagccctggggagggacccagcctcgtgttccgggctcgcgcatgctctgacttcgccttggggcgcccatggcagtactgtcgccctaatgtattcttaatagaaataaatccaattgttggcttgccagcagctcttaatcattaaatataaataatatttattcaaatctctaagcctcttagggaaaagctacttacatggcatttccttaactcccatccccaccctgcctccaaagagcagtatcaaatcaattcagaaagtcggcagctattccatgtaaaggttcaccaatgagaaagtaaaaaaaaaaaaaaaaaaactgcttcaggcattccagttatcacaatctaataaaaaattaagactgcttcatcatatgataagtgaaattatttacccataggagagtcatcgtgcaggaaacttctgttaggaaaacttttgagactagattataaaagtttctgcatccattgtctagaaacagggatgctcaaaagggaacatagcagtttcttctcagccagatctcatagatcagtaatgagacaattactgtttaaatattaattttaagaatggtgaaaaataaaggaagtgcttcttagcggaacacttagaatttaacagattctattgatcacccgctatgcatcaggctctattctaggcatgtctgtctctttcttcatggagtttacattctagtgcggcaaaacagatggtaaacataatacaacagtaaatactttagaactggattgttgctgctgagagaaatacatagacccagggtagtagtacaggatggaagagaggttgagattctaaatgaaacggctgggtagaactcgctagaaaataatatctgagaacataagatgaaacacagttccttcagtaaataaatgaccccaaatacaaaaacacagcaaatccataagctcaaacgttgggatgactgacaccaagaagataataggaagacatggggcagaggactgaagcagtaagtccatcctagccaacttctttttttttttcaaatttatttttaattgacataaaattgtatgtttttgtcatgaacaacatgttgttttgaagtatatgtacattgtggaatggttaaatctagcaaattaacaaatccatgcctcacacagctatcatttctgtgctgagagcacttagtgtccacttttttagttttttttttttttttttttgagacggactttcactcttgttgcttaggctggagtgcaatggcacaatctcagctcactgcaacctccgcctctggggttcaagtgattctcctgcctcagcctccggagtacctgggactacaggtgcctgccaccacgcccagctaatttttgtatttttagtagagacagggtctcaccatgttggccaggctggtcttgaactcctgacctcaagtgatctgcctgccttggcctcccaaagtgctgagattacaggcatgagccactgcgccaggcctttttttttttttttttagcattttttaagaatacaatatattgtcattaactattgtcaccatgctgtacactcttcaaagtgctttttattagtggcattaagaaagaatagacctttaggatatttttcacttacaaaaagttactgtcttagtatatcagccatgtttcaacaatgcttagatcaaagcagaggagaaattcctaagactatggggaggagagtccaaatgtttgtctttagagtcctggtgataaggacaacaagaaaatctgtaaaacgacattagatgagatcgtccataggaaagtcttcaaagtggacattgacgtgggcttagatataaattagaacaggacctccaaagatatgaggcattctcccccggtgccacatataccaggagaagcccaggatctgagggagccaccagcaccctccctgagaaagcggggagtgtcccgttgccactgttcctactttcaggcctccatgttagatttgcggcccatatctcaaaaaggtgtgattagaataacaagaaagatttttggcagcttgcgtgaggaagatggtatctaaaatgctaagaccgataagatggagagggtacgaaattaagactccagatagtaccagacattgaaaaaacagtaatgaaatgtgattgaaaattgcagcaagtacagaatggagccccatccgagcttgaaccctgcaaacaggctctagaaagttgcataaataggcttcagaataccttgtaacatctagaaaaagctaaaggtttgtgtgcaccttaaaacaccactgccctggagtaatgaggggaccactttgtcacatgttatgaagggggatcaaataggaagaagctgacctcagagagctctctcctatgggcagcaaaaaaaaaaaaaaagtcaattaaaataaaagttaggaaccataggagatatatatacacacacacacacacatatgtatatatctatacacacacataatatgaaagcaaagtgaccccaaaaaagattaataaagaagacagctatcataactcttaaattccttattacatgctatcaaaatacatcatgtgatagcattaggcatgcaagatatttatgtaaaatttagtttcttggatcctaattttgtctcatatgtgactataaggtacttagagatgcgtttggtccactgtgtcgcaccctggtgagcagacctttcagaagcttgtcaaagggcaagtgtatgcattgtttcctttttaccatctacattatctgttctttcttacagtacataattcttcatgctggttactttacaaccaccaccacaaaaagaaagtctttgatctcctgcaactagagatgtatttctgcattctggcatgtgctctcaatactgtatatttttaagaataagacaattaaccagcttaagctgcttgagcatgcttgctgattagtttttacagcattagggagtcagagagggcaagcgcaggagcttagccactcagtctgtcagtggtctgggtttgtaatccatgatcgcaaaggtagctccacccacacgtgataagccagctgtcagacagggttctggtcccttctgtgccattatgtcaggagctgaaggtggttgagttaggacagtgatgaaattgatcctagcatgttagacatctccctcagtccaacacaatccgagtataatctaagtctttgttgttcaatgcagtagccactaggcacacgtagccaattaagtttagagtaaataaaattaaatacaattttaaatttcattcctccatcatcagtcactttccaagtactcagtagccacaggggtagaatttttccatcatcaccgaagcttctcttagacaaccctgattctaaatgctttgtgtgtctaccaagcggtgatactgaattttttgcatctagtaacgtgtcacaaaattattctcctttctgtcaaaagataggaagaccatttgatcactattctaaaatgtttggtgaaccttggtttcgcaggatcaaggactacggctgaagttggttttgtacctgagccatcctttttggcatgttaaaaaatcaagttcaagttcttttcctttacaaataaagctgcgaatcaattcagatggttacagagtgaaaggagatctgatcggagaccaagggccaaggattgtagggtgaccagcaccacggtcacttcaaagttgtctttgtatttattcttgttcttactagcatatgtctttcctggtaggtcttcacccaataaaaatggttgtggtgaaggaaaacagtacagagagcaattttttctcatttcctttgtgcctcaaaagcgtgaaacaattttgcaggccaataaatgttaacacttctttgcaaactaccagcaagctagagacaacttttttttttattatactttaagttttagggtacatgtgcacaacgtgcaggtttgttacatatgtatgcatgtgccatgttgctgagacaactttttaaaagtactatgtttttgttaggtcagtgcaaaaggaattgtggtttttgccattgaataaaagcctgcagttgctctttgcaaatagtggctaggaaaggaaagatagggcctcgttttcacttcctcttggctggggcctcccagctggagtgctgttctgcagagttcattcctcacacaccgggtgcagcctttctcccaaagacggttaacattctctcgaattgtctcctgactgaagttaaatataagcctgcatttcatgcgtgtgactttgaagaagtgactcagtctttccaagcccatgtatgtcaagtagcagcaacagccgagacatggcaagggctatttctggggagttaagaagcaaaggactgtaaagcctcattgcccaggacgtagcaagcgcacagcaaagttacatgcatataactttgttgttaatgaagcctctgacagtcagtttcctcatctgtgaaatggatactaaatcctaagatgtgggacttgcaattaagtcatgatgtcagtggtgctgtgcctggcttggagtgacggttgctcaaggtgaaattgcagaagcaagcttttctcaggcagctctagtcctcactgttcaccgttctatgttgatgcttccacactcaccctcccttcagactccagctgtcccctccttggggatcataccttaatgaaaccataattgttttttccaaaattgctgtacaactgcattctccacaaaacacagtttacatgtgtagacacaatcatggctcagctctgtggcttaatttggaaataatatgtcttttctttactctcttgtttctgtcttcattctagaacaacatgtgtcacatagtaagcactcatcaaatacttaccaagtgaatacatgttacagaaatctatttctctacactctcttcattaaaagagaatttgcttcctatcggtatatgagagggagcacaatttggcaaggttcgagaagtacccttgaaatgtgtcaaggctagatttgtctgcatatttttaacagaagccctttaaaaaaattttaaatggacagaaattaggtcttctgtgttgctcttctgagaaatgtgttactgggaataacagaacacaattgcacagttcaccacctatgacgcagttgtacatccaacaaatagtaattaagtgtcttccatgagcctggattctccccgaggatctgacagaccagtaggagagataagtggtcaaacaaattataggggaagcacaaccacagcagtgaggacgtgatgggtgcacactgggccacagagtgccttgccctccgtggaaactgcgaaaggctcaggaagggcatgccaacagcatcgagtgcagtagtgcagtcaagagggtaaaagatgggggcatggaaggcaatggtattgcctgaaccgctcctcccaccaggaaagaaaagttataacaaagttgcgacatatgacagctcagtagaagtcctttctgtccattttgcagctggttgtaaatctatcctacatccactcatgtacgcagcctcagcagtcagctagcaggcacttaattaagcatcttttttgtcctaggtcctgtgctctgtgctatgtttgctttcgctctgaaactagcacaaccacactagaagtgttggaaaatggaggagagttacacacgcagacactgtttattttggatgaacaagcatctcattcctcctttttctcatagattaactatgcaggtattttgttcttgtgagaatgggaccaaataacttatgcacagaagatgacttaaaagtcaccgacatgccttagcaaaaataccaaatggaaaatactttgtaggagaaaatgttgatctcctaacgtgacacacatgtccgtatcattctgcagcagttcagataagaggcaactttatgatgtaatgagatggcttcagaatgtagtctaactcctaagctactgttaggatcccagaacctgccctaaaagtattctgtgatcatggactgtcttccctacttcatctcattgactttatcaagtagttgcaaacattttatgcatcaatattagaacaaaaaaataagaaaactcttgatgtaaattcatttttaataaccctctaaccagtatttgcaaatgaacttttagcacgtgtacacatgcacacacacccggaagtagccacaaaccaaattagactttaatttgttaactgtggttttctaatttcagtttataaagaatgaatatttccagttctgacccccagaggttccattttaattgttatggagtagaacaggataatgcactctagtcatctgatgttactgaaccccagaccacactttaaggaacagttctatctctcacagtaagtttctggttgtgtagcggtgataatgtcgatcatgatggatacttagtgatgtttatcatgtgcaggcattaagctaagtatctttcatctgtagaatagccctacctagtaggactgtcatcatgaccctatgtagagaagggcattaagtcactgatcaatggtgtaacttgtcctgtgtcacataggcaagtttggacccttgagtcaggttctcaacagcctcccaacaaacatgctacttttatttataattgtttaatgcaaaaaggctcttcaccgcatctgaatcaaactttgagggaatactgtaccagttatgtgtttttgcataacaacccacccagaacttacaggtttacataaagtagtgattgttttactatccctctcaggctctgggtgtcaacagagatcactggagcagttgtcactctcggtccttcatgcagcaaggtggctggaatcatctgaaagctggtcacgggcatgtctggtgcctcagccatctgaggactgtgactccttgggtgtctctctctgtctgtgtggtctctctgcattgcctgggcagcatgacagcttcagggtatccaacttcttacagggagagtcagtgcttcaggggcatgtgctttgggagagagaaagcagtagatgcagcatcgctttcagggagccagttttgggaggtgagcaaactcccttctgccacgttccttccatcacctcagtcccaaacaccaaaccaggtttaggaaaggagaaacagattctacctctggaaaggatatactgtggtggccaaggtgttggaaagtaccatctgtatcagtccaccctctggacaaaacaatttgtatccctctgtcatacaaactatactcacccctaccccagactccccaaagcctccttcatcatctcatctggctcaggttcaagggccagatcgcatcgtctaaaccagatccacatgtgccggtgcctccggtacgattcctgagagagacagcgcctcaagtgtgtcctcttctaactgaagacttgtggcctaaaaagacaagttgcctgatccccccacacaagcaaaatgcatcagagggacaggtagagaataactgatgcatgcttctgctcagacacaggagggagatcaggcgacacacagtggtcattggtgggtagcagttgtgaacaagagctggatgcatgttgcttatgccttcatgaggatgaacaagagctggatgcatgttgcttatgccttcatgaggatttagtccagttcccaggctggaaataattttccgtagctcttaggtctatgttctggaatcttggttccccactttttgactaataattcccaatccacaagaggtgacttatgtttggggctagtagttttttcagcctgcttcttccttatcagggttgtgttgttgctgttgtttagaggtgaggtcttgctatgttgtccaagctggagtgcagtggctattcacaggtatgagcataacgcactgcagccttgagctcctagcctgaagtgattctcttgttcagcttctggagcaattgggactgcaggctcacattgcacctcgccaaaattttgagagaccaaagtttcttcatttttgtgttcaggctgctcctttcagtgtaaactgataacattcatttaaaagctttgtgactttcttgtgaatcaattcataatccacctgattagtcaaaagccacacccacaaatctttctgagataatctcttctctatctggaagctcactgagtacttccgtgggtcagtgcccttgatattcttagaagacctgtggttttgcttccttgaaaagacctatgaagcccctccttgattttttctgtgtacttcatgaagggtctcataagtgtgtgcttgacttcatctttagatcatgtttttctgaaaattccctgaattttatttctgcttggaagtcatttcttttctttctttctccttccttccttccttccttctttccttccttccttccttcctttttttgtttttgagatggagtctcactctgttgcccaggctggaatgcagtggcgcaatcttggttctccgcaacctccacctcccaggatcaagtgattctcctgcctcagcctcccaagtagctgagaccacaagcacgtgccaccatacctggctaatttgtgtatttttagtagagacagttttcaacatattgttgaaaggctggtcttgaactcctgaccttgtgatctgcccgcctcggcctcccaaagtgatgggattgcaggcatgagtcactgtgcctgcctggaagtcatttcttaacattcaaattatttgccatctgaagagcctggcagtgaggaccattttatttttaaactcagaaggttcttgttcctttatagtgaatagttctttctttactttatctctgtatcctcatgatttactctaggcagctagaagaatccaggaggcaactttaacactgcctggaaatctccttagctatgtcaccctgttcattttctgttttctattttccacatgactgtaggtgagatactattgctaaactttgtactgtggctgaagtgttgtgttcccttcagcttccagcatcttcctcactgttctttaggcctcatcaagagctttcttgaggccaccacgcttccctgatggtcccttcaaagctcctcccatgtcccaaagcaacttcaaagagtttaaggtttttttgtttttgtttttgtttgtacagcagcagtccacttccaggtaccaatgtttttatgacttgtctattgttatgtaacaaacctctccaacttagtagcttaagacaccaaagaaaaggttattatatctctcatggttctagtatttcgctgggctctgctgagcagttctcaaggagcctctctcatcactgcagtcagatagtgatcactggaagtcatagtcaattacatctctggtgtctgggatgggaaaccagacagctgagggctggagcagataggagtcctctggctctccctcacctccacgtagcctctctacagtgcccacagcatggctgcttcagggtgtacaggcctgtacatggaagtcagggctacctagacatgtgtcccaagggaaggagggggccaggcagaggctgtattgtcattgtcccagccctagaaagcaggcaacatcatcttctaatcattgtattcactggggcagagacagagaccctccccgattccagattctggaagagcatgtggcgctgaaaatattattgaagccagctttggaaaatacaatctcttacaaatcctttaaattattcatatcttcagagcaactctgtaatcttaatgttaaaaattgggttgcttcattcactttctagaagctcaggggctgctatgttttagcccattgaaagtaactggaataatgcttattaattagagaactgcacactttgggtactttctattcttaaaagttggctgctttggggaaccctgtatagtactgacttagaaagatgtccattgagttcaaaaattacctttgttcttttccattcccatttgaatgattcccattgttttctggttacagtgtgttgagaactgagcgaagcactttccctacaatatctattttattccttcgagatacatactcatatcaccattttgtgcatgaaaaccctaaggctcagagagctttgcccaggagctcttctcaaattacaaccctgccctaccaagcccagcacaaacacacacagttctgtgaccctcaccctggcctgttggttctcatcttcaaggcctgcatcacattctaacatactgtagaactcactcatttggtgtatttccttttttgttgttgtatgactgttcccactagggtagaggagggcagggaacttctctttattcatgaatttatctcagtaaatactggttgaatgcatatgactgaatgaatgaataaaaggtcatgctgagatttgagcccagatccctctgattccaaagctttaattttaaccattagacttcattgtctcccagaaactgggtacagagactgatgtcaaaatgtgcagtcatagagagggaagaatacagctgcctcagttaaataactcaagaactcaacaaaggcagatgtgcccctatcaagaattcctgcagatacagaaaataccaacttagtaaaataattgaagatttgggagtttgggtatttctaagactggaggtaatttttctaaaattaacatctctgttatcagtgaaattatatttatttaataaaacattattataatttacagtaaaagcattagaaaaagaagtcttgtggaatttcttttttgacttaattttcaattgttttaaacttatatttaagtagttttgttccatctcttttgaaattcactcttgtaataatattatgctcatttgtttttctgagtatggcttcttttttcaacgtcagaagtttccccttgaaaagttcttagggaaatgttattctcttggtttccctgttgagtatgtgtttttgttaaggattgaaatgtactgattgtaaaacctgtcctccctgacatttgaacaaagtccttttttaaagtctctccatccacacaagtgtttttgttttgtccattttacatcatttatttaatttaatttaatttatttatttatttatttaatttgagaccaagtctcactctgtcgccaggctggagtgcagtggtgcaatctcagttcactgcatcctctgcctcctgggttcaagcaattctcctaacctcagcctcccgagtagctgggactacaggcgcgtgccacctcgcccagctaattttttgtatttttagtagaaattgggtttcaccatgttagccaggctggtctcaaactcctgacctcaagtgatctgcccacctcagcctcccaaagtgctgggactacaagtgcccgccaccactcccggctaatttttgtatttttggtggagacagggtttcaccatgttggccaggatggtctctatcttttgacctcatgatccgactacctcggcttcccaaagagctgggattacaggtgtgagccactgcacccagcccatttcacatcatttaaataatcacgcttacccatttccgacagtaagctttcatatgccactaactattaatagttaattggccaggtctcctgggtttcaaatcataaggaccagttcaacccataccttatgtcacacctgttaggtcctaagaatccacacctaagtgtgttccaccacctgatccctgagtgtcacttccccactgcatctccagggaccgcacctccgcagcctccatgggtggctgacatcctggtgtagcaggaccagccacagacaaaactcctcagacaccaggttaaagaaggaagtggctttattcggccgggagcttctgcagacttgcgtcttaagagctgagctctccgaaaaagaaattcttggcccttttaagggcttacaagtttaaggggtctacgtgaaagggtcgtaatagatagagcaagggtggggaacgtgactggggttacatgcatcagctaacagaacagaaaattttacaatgcttcttcatacaaagtctggaatttacagataacacaagtagtttaggtcgggggttgatattattattattattattttaaccaccagagccgggtggtggcaccaaggtcgtctggctatttattttacttttgtttctttttaactttttgctttctcctttttctcctgtcttataaactaggcaaggggggtgggtgggtagcagcagaagtggtggtctccttcctcactggaaccccttgacgttccactggacaacctcctcagagggtgggagtcttcttccatctccaagatcaaaactctcttttcttgggggtggtctcaggagttcgggttcagccagggagcctagtgggtggaggaacatgcaggcccggtcccttgggattctcggggcacggggccgtggctccctccgagtcgagccccgggcttggtgggcacccgtgggcctggcctggcacccactgaccgcgtcctttcctgccgcagctctggcccggcccagaccgcacagcgacgactacagcaccatgaagaagattcctcctcgaaagcccaagcgcagccccaacaccaagctcagcggctcctacgaggagatatcggggtcccggcccggggacgcgaggcccgcgggcgccccgggggcagcagcgcgcgttctgacccccgggactccgcagtgcgcgctgcccccggcggcgcctccgggtgacgaggacgacagcgagcctgtgtacatcgagatgctggggcacgcggccaggcccgatagcccggaccccggggagtccgtgtacgaggagatgaagtgttgcctgcccgacgacggcggcccgggcgcgggctccttcctgctccacggcgcatcgccgcccctgctccaccgcgcgccggaggacgaggcggcggggcccccaggggacgcgtgcgacatcccgccgcccttccccaacctgctgccgcaccggccgcccctgctggtgttccccccgacccccgtcacctgctcccccgcctccgacgagtcgcccctgacacccctggaggtgaagaagctgccagtcctggagaccaacctcaagtaccccgtgcagccggaggggtcgagcccgctgtccccgcagtactccaagagccagaagggcgacggcgacaggcccgcgtcccccggcctggcgctgttcaacgggtccggccgagcctccccgccgtccacgccgcccccgcccccgcccccgcccgggccgccccccgcgccctacaggccctgcgcgcacttggccttcccgccggagcccgccccggtgaacgcggggaaagcggggccgagcgcagaggcgcccaaggttcacccaaagccaaactctgcccccgtggccgggccctgcagctccttccccaagatcccatattcccccgtgaaggccaccagggcggacgccaggaaggccggctccagtgcctcgccccccgcgccctacagccctcccagctccaggcctctcagcagccccctggacgagctcgccagcctcttcaactcggggaggagtgtgcttcggaaatccgcggcgggaagaaaaatcagggaagcagaaggtaagcggagcagacatccccccactccttttgcatggacgctgtgcttgcgtgcacctgtgtacatccgtgtctgcgcagatgtgaaatagtaaagtttcaggtgatggccgtggtcgttcagagcagatatcagctttaaaaaaaaatcgtatacacccactgtgaccaaataggtaggaattaatatttccatattgcagaatatgataggaaaggctcgtgatatagaaagacgcagaccgcaactggatttaataaattataacttgataaatgttcgacagagcaaggttaaatgttagctactaatttctttttttaaaaaaatattttttccttataacgtgaaagtggtattttgtgtatgtttctatcgccgatttccgtttgatgtacagttcacagctaatccccgagcgtgcggtttgccatccatctagctttgcctggcggtgtctgggatgttgacctagccagttactaccctgcgcttaatgccactcggctgtgggctgtttgggatgaactgcttttcttctggtcgtatgccatccaaggagcactctaacgcagccccgttatctgtgttttctcatccagcgactcagcccacagtggggtttgcaggtggaaatcagtccactcaagtgagctccatgacaggctgttgcctgcattcaaaaacatttattttgtgtccctgtagaagaatgtacctggcaaaataagattttcatgacgacgttttttgccagtcttttgtaactggctaaccacatggctcttccttcagatgacacgacctcagtgccaaaggcactgcttttgcacagattcctttaatcacaaagaatgtcttcctcttccaaaagacatgttaaggtttgtatacaaaaccaaaatgttttctcaatggtgtgtattttggggaagaagttcattgatgaaaaggatcttctccttaaggaaaattataaccagtctcttccatcatgatggcactggatcccccactcgcctccaggtgaggcaggaggatagggtctggaggcagggaacctaaggccctttcatgtcgactccctagaactaaattgaaaggaaaatcataattttccatgcctaagtaacaaaaggacccaaggctactccctctgcaaacccccaccttttctgcaccacagatgggaaattggctgtccgcaaccagtcagacttactgcaggcagagtcttcctttgtgtacaaatgcaactctataacttcaccttagcctctgttccattgctttttgcaaccaatcagatgtttgcacaggagtgtgatcttttaacttcacttcagcctctgattggaggccaccactttatttacatgaggtgagcatgaagtggccaatgggaaacctctagggggtatttggacccgagaagattctgtatctgcgcccctgagctgctgcccagcccaatcccacactgtggagtgtacttttgttgtcgttaaatccctgctttcattctttcgttgcttcattctttctttactttgctgggtgttttttccgattctttgttcaaaacgccaagaacctggacaacttgtagtcaagaccctctactggtaacacagggtagatggcaactgtgggcattctcatttcatacttggaaaacttcacggtggagaggttaaatatcttccttagggttaagtggtaggattggaagtaaactttgacctacagtgtagtaacactttatgcatgcattaacctgctccttcaccaaaagaaaatacataaatgtgtaagcattcatcatttgattagcgaaattactttaggtacaaaaactagaacatctagaaagcaatctgaacaagtgaaaagtaggtcaaggctaagaaactttaaaaatgaatgaataaccttctccctatttattcttcagacaaataagctaattgtttgtttagctaacagattcttcttaattataggccattaataaatgaaattgtacttctaaatagcagaatgtttgaatttcacacaccgtgtttcattccaaggaacaaaatggataagagaaaatcattaaatgaacaaattaatatttgcttttagaactaaaagtttattaaaacctcatgaacctcattttactagagaaaggaacaaggtgagttcttcttgactctattcaaggaagtgaagttaatgaatttctagacagacctcatcatttggaaatcccaaagtctactccttagaggatagtgagaattatagtgagccctccaggcatagtgtgtaaatttgctaattttatttccctgtggtggtattaaccagtatttgggaacacacatcaaaatctcaagtacaacatagttcaactataattataagactctattttcttattgtgggcttttctgaaatccaatcatttgaaaagattggattgagccacttatgactttctcaaaaatacatgaattgacaactttggcctttggcatagttgctgtagtaatagaaaacttagcaataccagaccaggtcatccctgtacataatctaactccctgtagttagattatgggagtcctaactatacagttgagaagtgtataataattcttttttttttttttttgacggagttttgctcttgttggagggcaatggcacaatcttggctgactgcagcctctgccttccaagttcaagcaattgttctgcctcagcctctcgagtacctggaattacaagcgcccactaccatgcctggctaatttttgtatttttagtagggatggggtttcaccatgttagccaggctggtcttgaactcctgacctcaggtgatctgcccgcctcagcctcccaaagtgctgggattacagacgtgaaccaccatgcccggccaaatgtataattctttatgggctgtgatgagggaaataagtttacaagttcggatatcatgttctcatggatagttcaggccattcttttagaatgtaggagaggttaaacataagctatggaaggaaaagcattcagtgctggtgctcagcactggggctggttatatgactattaaagtttacacagtttgatcctgaggttagtaatccattttcttctgaatgaattcaatgacttttatggaatttctttcaagttttaaatcttttactttaccttctttatgcttaaagacatttttattttcaccgtgaaatagctttcttaccaaataatacagtgtgtggctaatttacccttcagggtccttaaattaactaaagttcattttttgttcaattttcataggagaaaattattgcacaaattttgcagaaaggttcaaaatgttctccttggctgtttggaacaatgacatcgaggagattaaactgctcagtaattcactgctttagttatttctggttgaaatataatgtgctataatgtacagtgagttgtgtataggaagcaaggttgtttcttgcgtaattctactccattactattccatagccttatatgtaggatttcacaaattctatgttgcccaaaccagttcattttctatagattcttggatatgcaatttgaagtatacaaaaccatgcagattctaagagtggtggacacacatataagaaagatatgattgtgcagatgatggatgtgactgcagtctgagaagaaatatttgcagcaaggaattgtagtgcttactgtgccaggcattgtctgagtcatctaattctcacaacactataaggcatcttctccacttatctccattttacaggtggaaaaactggggcacagggagattaatctacttgctcaaagctgctgtgctcgtgcgggacagagaatgacttgagtgcagtaactctgtctctagagtctcttcccctagctacctatgcaatgctgctcagacagcaagagaaaaagagacagaaaaaaaaaaagtcttttaaaattaatatttgttcactgaggggcaacgagtaatagtcataagagtttagttgaagagaattttcccataaactcaagaatgccaaatgaactttatactgatgatgggtatgtataattctgggatacagtgtctaggctacttggcccttaaaattaatattgactaaatgtttaattgtctgttccattctagacataaagatcccattaattcacaacatttttttccatctcatgtgatgatgtggctaatattattatgctaattatttctagttgcttggtttcaaaaactatgagacccgattcaaatggtgaatgagagtccttggctcctttaggccactagggtgctccattgctctgaatggcatctcagcgtctggttgagtttatccagaataaagtgaaatcacatgagcatgttattctctactcactgaaaaagatcaggaagacagggtcttgacaaaaaatgcagtacatctcagaaatctggagaagaaagtggaagacagccaggccgaattaacgaaaatcagactcaaaatattttttaaaaattcagttttattacattctgatacagtgcatccttagcttataagttataaacaggtactaaaaatgatgtcaacaaaaaagctgtaatgtacagtatttctttgcatatagtaggtggctattaaatagttgtttgaggtaaaatttacctataaaagagcagtttgacatacaaatctatttgatagaactagctcttgtggcatttttacttaataaggatcacataagctaaatggaagtcactattaatttcaaatattttatttgattacataaatattctgaataagaacattatgagtttggagtgagagtattttataaacaatttttttacaatatacttttattccatagggccatttgtttacaaaataattgtttttcaagttttccttatggaaaatttcaaacatagacaaaagtataaagaatagattaatgaaccttctctgtggcccatcctatttcatctctactcctgcccatttccctcctctggcactggatcatttttaagtgcatcccaatgtcaaatcagccaggcatggtggttcatgcctataatccaagccctttgggaggttgaggtggaaggatcgcttgagcccaggtgttcaggactagccctggcaaagtagctaaccaggccttgtctctacaaaaaaaacaataatgataataaaatagccaggcatggtggcatgtgcctgcggtcccagctacttgagaggctgaggtgggcagatcgcttgagcctgggaagtggaggctacagtggccgtggttgctccactacactccaggttagaccacagagcaatacactgcccagaaagaaagaaagaagagagaaagaaagaaagagagaaagagaaaaagagaaagaaaaaaagaaagagaaaaaagaaaaccaatgtcaaaccatttaaataatatatatttaaatatttataaatattttatcatagatgttctttaagaagaaaaaaacatttattcttaaggcattttaataagtactcaaaccaatcaatccatttcagtcttcacgagcatgaagctgctattcatgacaaaagcctgattctcgaagccagggcgtcatttttcacgacacaaacaaaataattcttgggctagcattccaccaagcaatgtgactctgcaaatttctccaagggaacacttgcagacagccccttctactacagaaaaaaaaaaaagattctaaatattatatcaggtagaactaactatgaaagatcaaaattcaaagacacgcaattgcatcctaagtcaatatcatatgggtttcagatgtttctatgccaaatcaagtgcagttacccattcattgtttagcgacaagatgcaggatgctttacaatgactcaaatgcccctgaattactcatggaaacctgggatgtgctccaggacggtgtgtgcaaattgctattctctgctcctgatgtttgaaacagaagttccaacattatcgtcatttattctctgacacatcgaaacgagactgaagtatgagacattagtctgccttatgcaaatcttgacatcccataatgggatgcagagcttagcatcccccaggcttcttgcctatgtgcgggtcttgtagtgttttatcctgtctgaagcagttaaatctttttcactccccttgatgatttctccccacagtgatttatttgtgtgtggggagttgggggtgggagtgctcatgaaaattagaaaaagtgtggaagataatttactgaggtgctcttctgctgatgatctgtgactgtctgaattcttgtctcatacaaagtggggcgctcctctgcattccagaaccattttaaatcaatgcataattttcctcattttccaaacgagtaagtcctttggggaaactagattaacacccccagagaaggggggtctccatttatcactaagtggacattaagcaagcaggagctgtgtgaagtttcttcctttgccatgttaatagacctgggcttgacaagaagagaatatgtctctttggaagaaaaggattttttttctaatttctttgcctctctgtagtagccaagagtgcttgtgcctgagacttgcagctatatatttcattgtttttaatcccctaaatgtctagtagaaataatactgtgttcatctacacttcgaaatgaactttcaatgttaataaatgtatcagtaaccaaatttatctatgttaagagcacaaagctctttgttccctatattaattagaaatatatatttttaatgcctaaggatttgttgtgaatgtttgtgacatttttctcacaacttgtagcgctttctctatataaatgcccaataattcatacagggaaattgtgcaagcaggaggcctataaaccagacttgcactaacttgtggagctaattcccttacagtcatccaataagcatgtacttaatgtaagcacagggattgctactggaaatccaaaacactgataaacaaatctggcattgcctctgccctctcacagaccatataagagacagaaggtgcatccactttcagtgaaagaaattccaaagaggagagaatttctaacctgagggccataaaccactcgtggattcgtagttgagctccaagtggcccatgagcccccatggtatacatgccacttgtttgggcagaggcttcataagctttatcggatcctcccaaaatgtcagtgacgtgggaaaagtgaggagccgctgcaggagatgtgcacacacggcattttctgcagccagaagaagaaagaggtaaatgcctgagagaatctgagggccttgcaaccagagctggcagaagggcaagaggaatgttagaggcggatgatgggtggatggagctctctaggtgcagaagtcagggtaatagacactgcaggccaatggatgaatataggttgagacatgaaacttcagggtgtgtggttcctttagaatatagccatgcatttttgaggaagaaggaggagaaaatgactttccttgcatggaatcagagcctgataggctttgtacctggaagctccttgttagcttgatgacaaggctctgaattatctccattgtttctcttctgtcacataggaattcagcattaactcttaggatctttcctacaaagtgcaaagagccagaggaagaaaatgaacaaaaaccatagcagcgcttctaggtgcatacgtataatgggaaatactcagatatacactgtgacgtgttaatggcatcctggtcataatataaacagctatttgtaagtggctctctcctgttgaccaagcacattgacgtctcctttctccccctggacccttgcgtctcagtgaggcgggtaaagcaggtgttaccatccctatttattaatgagcaatctgagactttgagggattaagtgattttcccataatcacaaaaactaatcagtctcaaagtcaggaatcaaacacatctcctttctccaaaccctggattctttctattatgcccttcatagtctctgaaaacaataaaattaaaataatgatacaaggtctctgtttgagaaaggaattcccctctgaagttaaacacaaactcattgccaggaaaacatgtgggaggcggacagataaaactgttttgcccattgtcaatgtcccaccagacatcacttttgaaacagagcatgttcttcgtgtgccccctgccttctcctcctctttttctcccctttcctggaaaatcctttctacccacctgccataaaataccttctgcagtaccagggatgcacagcacacgtgatagactaggattattcctcacatccaaaactcgtgtctcctcactttccgtttctctttttcttggcctctttaaagttttacttgggactgagttcctaattactgaaaagaaattcacactgaaattgtactcacttgcagagtagcccagcatattttttgtaggacacatatgacttgctggggatgtggacttcaacctcataagtggggtgtcagatgcctgccccagacccaccagaaattaaatgggtggtgggccctcacctagcaccaggaaccatgctaagaactgtacagacagatgatcagcagtgattctcaatagcgaccatgattggaacaggggaaagacagacaatcaaaaagtcttcatcgtttgtctctacagcaactttctttaaacaggcaaaaatccattcctttctcaattatgtgtacgtagaaaccgacatcggtaacagcaaagtgagaaacatgactaaataaagccagggctatactcacagcccctcaataaatatttgttgggaaaatataaagctcattgctctcgtgactatgctgttcccgctaggtcatgccacttcattattctttgaaaccgaggagcaaaaccaagcagaaggttatgactattaaatatttagatcaatctgatcaaaaaggtaccctatgaattgcatgaactgtcctgagaaattaccttaacatattagctgtaaatctgcggcagctagcatgtcagtcagaccagagatacgtatctagcgtaaagaggttatcattttttagattaaccaaatgcaacaaagaagcctttacaaccgggatgctctataatgcaccgtcagtggggaaaggatctattgcacctgaaattctgaaaataaggcagacttctcagaagtggattctctttcataaccagtaaatatttttcatactatcaacccactaaagcaagcagctattgtatattgtgtctctacactggattgcaaattaaactcccactgggggctctaaagagaaatccagccctttatcctctaagccactcagcagctctccttaagcaagttaataaagaccttcctgactatctgcatctcattattgccacataatacaatatcctggggttttcttccttttgtgaagaaatgcttagaagcaacatggtgcatggaatattgtcctaaagagagactgggcaggtgccatgctctttctctcctgaagagtattggaagagaaaaacctatttcccaattacctaccagtgtttaggctccttatgcctgacttcagtcatttttatgattaatccccagattagcctacaaaatttcacgccatcgagagtgagctatattcaatatcacttcacccagtgcttcattccatgaatcaacacagccgtccaccatgtactctgtgcagagcttctcaggcctttactgactccatcctggtttctccttgaaatcttcagttttcatacttagaccctgtacatgggcaattagtggccatttgcaaatttaataacacatgttaattatgacaataaacaatatgattcatttctctcctccacgcaaatgactaagttctaaactatgcagagcccaaacaaggtcagacatgaactagatccgagacttgcactgatttacagcagaacactgactgcgagagacacctgagaatttgtgcattacctgaagtcctaaaagcccaaaaagagcttcttcatactgaaaactctggctcaaaatcaaacataacccttcaaaagaaatctccatttttaagcaggaagaagtgatatatgcacaattggtacatgagggtgtgtccctgaaaaatatgtatgttttggattttggctttattattttccttttatgtgaaaagctggataaactgggaagaagtaagtgaaaatgagaagacttaggcaaagcaatgagtgaaaactttcaccatacaggcctttccatgtcactaaaaagcaaaccaaagctcacagctatgaagttacttgctgaggccacatccgtttggtgacgttacattcccttaacttcagctctcaggcgagatgacgtgctggagggggtcagactggctttaacagcaggatggaggggacatacaggagtgcaaacaaccaacttaaagtaggtggcctccatcgtacttctgccagttcacagatcctttcttaagtaaataaccagtgcccagcagcagatcctataaggcaaaatagcatacatttttaaaattttttatgagaatttgattgactctgtctcttggtatttaactacctttgtatatattaccagtaataaagcccccttagtaacaaagtccccttagatttttaattgctaaattgcctttcgagtaactatttcagtctttaaggaaagagaagctacgggaccttgatttcggagataggagcacactcttggtgttgttctagttccttctaatcacaccctatttgcaccacataaacattagcacaactagagatctggttgaatcacttacatgtcattccagacagtaaaactctaatcgtgaacattaatttcactgatgtagttgcagcttagtagggggtcgccaccattcacttacccaggcttgaagttatctctaatttagaggttagggacagtgacacaggaaagaggctctgtgctttatatctggagatgtgggatcataaaaacgtctttttaatctgatgatcattaaaacacccggtgatgtggcacagctgctaatcggaatacatttccatttctgcggggattgagcatgtcttcggaaccctctgcaatagctttagaaacaaacgttccttttatcaggtgagaaaactaccctatggcatgcctccggatatgtagttcttcctaggctacaaaatatcagaggttaacttcaggcaaaatgataaaactagcagtagtatttcctattactatctgcagtttgcttcaaaatttcaaaaaggtttcggaaaaatcactaaatacgaagggcacacttcattcatttattccaaggaatctatttggtgccagacattgcatggaattgtatggatttttaaaatgaaatgtgggctctctcttaagcagaccatggcaaggaaacttgaaaactccgacgcatccaggggacgagactcacattttacatagagatactactcgggattcacaaaacacgacgtatccatgacgctcgttcaacactgcatttttactcatggtattctgttctctttcattttaaagtgcgtgtcatgacccactaaattgatttctcagctcacaaatatgtcctctgaaacactggtctacaggggaggatttatacgggcaaataggaaacaaaatctccaaagagaaagcatcagaacaagaggaggttgtcctcttgtgtgctagaagccactgtgtgccttatcctgcacagtaaaaggatttttcaaagggcgtgatcaaattatgttttggagtaactgtatcagaatagctatagatatatagatatagaaaggatagatttttttcttgctatttctatgttcatttacatgtgaacctacgtactttagaaatgattaatctggctgggcgaggtggctcatctcaacactttgggaagccaagaccgtccgatcacctgaggtcaggagtttgtgatcagcctggccgacatggtcaaaccccatctctactaaaagcacaaaaagtagccgggcatggtggtgtgggcctgtagtcccagctacttgggaggctaaggcaggagaatcacttgaaccctggaggtggaggttgcagtgagccgagactgcagcactgcactccagcctgggcgacagggcgagactctgtctcaaaaaaaaagtgattaatctgggctgattaattacttaagaaattaacagctaggctaggagaagggaaaccccaccaccgacctgcctggccacctcatggtgtcttcctgtggtccctggtgaagtgtgaatccactggaagcttaggctcagcctttctctactgcgtcccagtcatttgtccttcctgagtgactggcacctgccctgtggcccatcaggggaaattgggtcacgtgagcacgtaaagaattagtcactccagccaatctaccaccagaaagagatgcaaccgctacggctatcaaagacacggtccatgtagctcttccagaatttcgagaagaatttgaatctccatagatattttaaatttatttttcaaggcctccgagctcctggctgggagccagtgagtgtgggcaggtgggctatgcttcagctggtgtccacaggtgctgccacactcttattaaaatatggaaatgtcttgatgccagctggtgcagggctgctgccctgagctctcaaggtccccacgtccatcccaccgccttgggtggcctggcccgggcctgccacgtttctccttggtgaaatgttgacacagcaaaatgctcaaggtcgatgactcatgctcgttccgatgggccctggtctgtgtctttttttgttattaagtactttagatgggtaaattggtaatgagttctgagcaagggatttgaaaagacctcacatccaccactgctgtaatttttctttttctttctttctgttttctttaatttttgctgtttcttttttagcagaggacaggcaccactagcttaccatccaggctgtaggtgtcaccaacacgaaacactcccaacagaagagcagggacgttatcttctcacctttgccttctggggaaagtgaggaggaaccatttccctccaggaaaacatatgttgctgacaccgaccgcgtacttggccacacatcgtggctcaggactcctggatttacgttaccacctggcattgaggaaatgtaaaaataacagcaatataaataacctcatgacctataaaagtatgcatgaggaatggggctctgggccaagcaggcatgttgtttaggtattgcatactcggctaattatgaaaaaaaaaaaaaaaaaaaaaaaaaagctacccaagtacaagaaaaggaaagggattgaagtgattttttcccctttatggcagggacagaataaatgggcaaaaaaggattcagttagttaaatttaaaaggaaattggcacaacttaattttctgtgcatttttgggtactgaaaaccttatttatactgacagtcattttttagctttactatcaatgcattcttcccttgctcagcacatatgttgttgaagacatcgctctgtttcctacttcagttggtgttttctagcacaaaccatctccttcgacttggcgggggggtgggtgacaagagttaggagtgaaggaggagcagacatttccattcctccccgcttaacctggaggataagtatctgcggcactcgctaccagagaagaatgcttaaaacataagttcaagaggaatttcgatctactccagggtggtgatttcataaggggttattaacaagtaggaaggaatgtcgggagcccagcccgagacatttaaagtcagtagagggccgggcaaatccagtttctcagcacacgcaacctttccaaggtctgcagtgatgtatttttctgtttcttaagtaatcaatgcttatagaaatatgacctgtccacatagtgtgggtaacagctgtgtcacaagagtaactgcctgggaacccagttctcttcccagatctccatcaccactagactcagacgccctctcttgatatatttctgcaagcattcacaaagggatgataaaatctgttgcacgttttcaaaaggcaattagaattgtgctgttcaaaacatgcataattgcagtgtgtcacctccatgagtttaacacatttcccctgtagcagtctccactctcctcacatccacccatctccactgaactctctcttcttgagtttcagattagcctctgtggttctttacatctgaaattcgtctttctgagaggcaataacacaaatatttggattatgctatcatggaaaggaaagaaaattctatcatgtaaaagaaaaaacatattatgtaaaagaaaacaaatcacttcctagaagcttataaagtaggatgcaggtcgacttgagaggggtgtcaaagccctgtttgcatttcttcctcatgtgcagtaatacagggtttcagagaaatctatattttagagatttaaaaggagttgccctgtgtaacacaaactagatttggtttaacacaagctagacgccaatttcaggtcgaagtgcttgtatccaaatttaattacgcaccatctatgtgtatctgcaagcgctgtcgagctgcgacttctaaattttacaaacgagaacttgagaagtggtgggagcctgccaggcacctctctctgcatttgtacttttccttaatgccaagtaggaaaaaacaagcacattcccttcatgcaatagcctttctgaagaggaattttcctatagagtttcagaatgagttatagccagtatgagtaatgagtttaaaatgtattttcacattttttatgccttacatagcactctcagtattaagtcagccaaacagctatagtttgtttttctcctgcgttactgaaacccggatcccatctcataggattctaaaatacactctaatctgatctctagcgcaggtacctaagagaaaagtggtgttttcagcatcttgttggggaaacattccatggctcctttctctcccctgcttcctggcctttccccagcactgacgctgtcagccgccctgcgtgccacacagtcctgccctctgccaaggctcctggcctgcagcccctcctgcaagcccacatctgccctcctgcacgcccacatctgccctcctgcacggcagtcacctgggcgtcccctcctgctacctcctcacactcgagagtgtctcttccttgaaaatttctccttcctgagagatttttaagtctctcctagctgtttcctttccagtcctaataaattctcttcttcaaaaaattgccactcaatttaatcctcaggcctgcggctgtcacttcaaagtcaacaagtacaaccccagatgcaccctgctcttcaggtgggagctgctgctctgaaccacgccccagctgtggtccccatcaggtcccagttctcccgctcagtgggattgaactcagcttcctcctgcctttccactcctccttctgcttccccagcctctcccctgactctctttctacttctaatctctcctcaaggtccattcagctgtatactttctttgctagattagtatttacaaaaaaaaaaaaaaaaaaaaaaaaaaaccttattcttcacagcatgcccttgctcaaaatacttgctggaacccagtcctgtgatgctcatagactccaaagctctctgctcccacttcccggtgcggaggtgtgggcagagccagcctcccctccctcacgagtgcagtcagctctgcctctgcggcattcccttccttttccctccccctctccacattccgtcctcaactcaaaatccactgcttcttcctcctgcctacacaacaaaggctcacctggctgctccagcccactctgacctctcctaagaattcctagagcattttgcagagctcccatcccagccccctggccctttgcaaccttaacacatgccttgaaggcaccttgaagacagtcccccttagagctgagtcaccacagagaagcctggggaaaagcaccccttagaatgcaccctggatgtccctgtcacatgggttggcattataagtgtcaaaggctttaacaagtgaataaaaccgtcaaaattagctcagctgagcaggatgcgagtcccacagtgatgcgtcagattcttcattcttctatacccctcaggatagatgtagtcccttttcttcttgcacttacccggtcgtcataaattcttgtcatctgccgtgctccataacccctctaaaatgtgagcactcaatggattgtttctttcggacgaatatttctttaagttctaaagtaaatcttagcaccaggtttggaccttgtaggacgtgaatacctgttgaatcagtggagagctccctagcttgggggaggaatatagtttgctcatggtccacccctcttcctttcttcttcattcagctctcatgttccccagagtggccactgcgctccagggcatctctttgccttcccagggctgaaccacgtgctgtccgttctgccaggtttcttgtcactcttggtttggagcaaggactcatcttaactcccattatgctccctgtctttctccagctctcccagaattattcaaggacatttctctctccccactaagaaacgtctctccactcttgcagagtttttgcattcttccttaagagaagttcctcttctcgccttccatcctacctccccctccctccacaaaatccttcctgtgtctcctctcccagacacatccctgatgttaacttattcatacctctcctgtcatggcaaacttataaaacagtcttgttactgtctgaggagttggacttttcccataaaacatttccaaggtgagccggaggtgacgttgcctttgtagtctcatccagtgacctcacacctatttctcctcccgcctgtgaattactcaaaggtaaagatttcatcatgtagattatggctagaggctctatgcctgagacccattttggtttttgtccagagattgaagcatatgcaattggggaaaggtgagcttttttaaaaaaataataataaagatgaaaaatgaacatttagagagttaagtggacatttattcaaaatgagaaaataaatcaaagtatacgtttacaaagtattacaaatgttaactgtttgtacattgcttgagtccctccctcggccttggaagaggcctggggaagataggggtgcatggaagccccttcacgtaactacgggtcaacccactgtgcccactccagtcaccaggattccagagtcacactcagcacagccaaagcatgccaacattcatcaaattgatttttatctcctgatattacagattgtaaagcaatgtaaagtacaattttaaaaaactatgtatggaccttgtgtctttgaattctcaaaccatgggtcaggaatcagtttcaaacaaccataggtcctttctctcataagttaacaagcttaggtagaaaacaaacagctccactccattgcataaaagaaaatattcacctcatgcaatgagatattttccttatcttataattttaaataagtaaagatcagcactcaaaggtggattaacactgaaagtgcttccgtaagttgtcaatcttgtgtgaatggggaaaaatgatcattgtggtgcgtggctttactgtacttatttgcataaaattttcatttagtaaatgtgcaagctattttacaggtatggaaagtgtagctcctttcagaaagagaatttctatagcaacattattaaaactaatttattgttcattcatcttttttctttttcaacaaatattaattgagtgccatctgtgagccgggctctattctaggcactgaaaatacaacgcacattgtatttgcccacattccagaggaaggagacacaaaacaaacaattgggctgttctgtgccatgcagtgagaaggactgtgtagaaaactaaagcaaggagtggggacaggaactgacctggcgaggaagacaggtgctgtttttcagaaggtcatccagaaggcctgaacacagtgcagctgccatgccctgctggacgctggagaaggagagagaggctgggaggctgacagggccgggaaggcaagaccgaggccaaggcctaaggcgtgtaaggggggctggggcccaaggccagcaggagtcagggcatgcaaggtcctctcagcctcaggaagcctttggatcttaatgtgaatcaactcagaaagcagcagagaggctggagtcgggaatgacatgatccgacttatgttttaaagcgaggtttctcggcctcagtacaatggacattctgagctggatactataattctaggttgggggaccgtcctgtgtgttataggatgttttgcagcatttctggcctctgctcaccagacgtcagtagcacaccccatcgcccggttgtgacaactaaaaatgtctccagacattgctgaatgtcccctgggggtcagaaagcacctcctatcaagagccatgatttaaaacagaatcacattgactgggagtgatatttcagttatataaaaactagcacaagacaaccgaattttttgtatcaacatttagagatttgctctcgctagattaaaattcaccttaaatgtacctacactgcaaacttgtaattaataatcatatcttaatgcaaaggccaagactttatttttgagtcagatcctgatgtgattcaattctctcgtacctgtaaaaatagcaccgagcccgaggtcacagagaaatcttgttaataggccaaaagaaaacactgcaggtgtccaaaccaacccgtgtttccatggacccaaccacaggatgccactgaactacacaaccccttacttcactagatacagaggcacaaaaatgtctcagacacacctttaaatattatacaggatgtacagtattcacttccttagttgtttaactaaattcactgagagtttcaaatattttcttttgatgtgacttttcttcattctcagaaccctgctggccactgcttgaaggcatgaaaagtcttgatgactttgtttgcactgtattatttctaaaattctcctgaaagcatgcatcatgtatatgcacttttaacaaagacctcttcagacttaatgccattgtcctcttgatttctgattgttgtaattccctcactgctgaagtgctgggtagtgggaatgcttttgacaaggaatgttgtgtgctaagctaccactttacgggagaacccaaccatccagagtttctgcattcaatcctcagtgtgttgaatctagaaattaacaagtcagggcacggctgctttcacgtgtttggatctaactgggagaagggtgtttatgagcggaggctgatgcataattcagtagaatgccgcggctactacaagcagaggagaaccccaaagtggggatgtcgatactgaagccgcagcactattgcagctgccagagtgcagctttgcaacctacagttttcagttcattaccactgaggcctgggtggtaaactcgtcacaggaaagaagctcccatatcctatcctttacatcaacaaatgaaacagtgaaggaaaactttacatagaggagccaagagtaaaagaatgactgtgtggggactgctgagccctctgggcctcagtctgaatctggctgccttgccatgagttgtgaaatgtttacacagagattaacttccccaagcctcaatgatctcatctcgaaaataggtgtaatagtgacaactctccagaattgtcatgagaacagagctaaaccaagcaccacatctagcagggaattggcacctaatatacacctgggtgatggtaactattgtaagagcaatgtgaggaagtatcatgctgaccattagttcttatgccttacgttaagaagggccttttcccttattcccatccagagccaggcttaagtagataaatgtttttaagatttaaaaaattaaaatttaattataaattaagatttaaaaaactaaaatttagcagataatttaaggatttcagcctaacctgtgtgaccgtttaaaagcatgtcatggtggccgagcacagtggctcatgtctgaaatcccagcactatgggaggccaaggaaggcagatcacttgaagtttgagaccaacctgaccaacatgatgaaaccctcactctcctaaaaaatacaaaaattagccgggcatggtggcatgcacctgtaatcacagctactctggaggctgaggcaggagaatctcccaggaggcagaggttgcagggagctgagatcgtgccactgccctccagcctgggcaacagagtgagagactctgcctcaaaaaacaaaacaaagcccaaaaaacatgtcttggctatagtttaacctgccaattgaaaaatagaaatacgtttaaactttaattgcaaaaatgagaattttggctgcaatttaaatacatcagttgatgagatagaaatcagttgtgagggaggccagcctgaagtactcagactgagagtcagcaagtgccttagaggattcgtttattgccaccaggtgtaagaggactgtgctcattcaaagccttggggaagccctcactgcgctgagaataaaacctctcagttcctctttggtggtttcccaggccctgactcattagtacctggtttcttgaacatggtgagctctttcctgctttggggtatttacacatggtgtggaggttgcctttctaaaatcacgagctgaaatgcaacctcatggacctcacccaccttgcctggctgcccaccagtgttttccacttactaggttttccacgtagctgtgagtccaccacgtttaattatctgcttgtgtatctgcttgtttattgccaatcacctttttgggagagaagctcccaggtaccaggcagtggtattcattatgtatctcccgcactcagtgagtatctggcacatagtaggcacccaataaataactgaattaaagagtgcaaaaataaaataggtgaaagcaacataaaagcaggtgagtacatcttgagccagttttaaaacagaacctgttttactggcattcggaagcttaacagaaataaaaaaaagccaaactagagttgaccacattgaataagtattctttcagtttcagcccattcaataattgctcattgtcaagagctaaaacagttaagatcacctgactttcacttttgttgccattcttgtacatgctaacttgactgaaggtctttgttttttatgtataatggagtcaggagccacagtggctcgctggatcatttaaatttaaactcttctgcctagttttcaaaatgccgatagttttgcctttattccatctatccagcgtttcctgctcataaatcttgacctgctttcctttctgggcagaacaggctgtgctctgtgctgtaaaggagaggtccctgcgggtgatctgaccaaggtcctgactggtgggtaggaagacttggggttgatgcgggagagggcttgagtgcaccaaagcaagaaaacaggagtcaatatggagaatttggataaacatgcattgcttgtagtgctatttgagggtatgtctcgagaggcaagaggagataatgtcaaggtaggagttaagagggaccaagtcaagaccagccttgagagataagctctggggagatggaaccttcccttccttccttccttccttccctccatccctccccactccctccttccctccctccctcccacctccctccttccctccctccctttctttccttttttgctttctttcattgttttcctgtcttcctccctccttccctccctgtctccttcctaccttctttctgtagattgcaaccaacagcagtttatccaaaacttttcagcatggaaatgacataatccaatttgtcttttaatgaaaaataaagactgaataataatcagaacatacaggttaaagttccattctatctctttccaactgcatgactctgagtaaccctaattccttcttcagcaaaataaggataacatctctgcctatggaggtaccggtgattgggattggggtggtaatacaccgttctgccatatttaaagtataataaagcaaatgatgtgtgttgtcccattcaaataatttattagtctaaatctttagaaaagcctaactttaagacagtcagaatcaactgtgtcccaacagaaaagaaccaaagtctcacgcatatccttgatgctgaatcaaaagtctccaataggttgcagcttttttgaggttccttaggaagcaagagccaatcccaggtgcacctgtgaagtcagagaaagggaacttggcagaggtggtgatggggggatgtctggccccttgatggcagttgtgcctgatttgcaaagtctgattttgtgcctaagggtaatgcagtgaccatggggaaacctacctccattggacatttttccaaatagaagcatttgctgtgtttcactttattaatattacatcactttaaaaagtcttcatcaggcccttcagtggaatttggacagtggctttcgtgttcgtacctctcaaaacacttaacataggacaagcattacatatttaagtaattatcttagtgtgcagaatgcggaagtcgagtattgaagttcagtattccaacatggacactaaaagtgtttatagtgatgttgaaaatatcactatagtgtttcttatcactcaagtgtttcttattttttccaaagctgtaagattgccttaatttatttaaatgtaatcattcagaaaactcctgaaacatgaactcattgctttctcatgacaggcaatactataatgacaagttatttgatctatgacatcaaaaattctttataaatatgtttgaatgcaacaaattattgttaccacttgacattttcctttttgtttgacattgttgtggcaaaatttggtgaatattatataggctacaaattttattaaagattgttattattttaaatgtcatgaatgtttgatttgatgttttattattttctccaaatgttttattcagtatattcagtacatgttatcagaaaataattatgttttctaaaatttattttaggttttgaaactaacatgaacataagtagccgagatgaccctagtacgtcagaaattacttccgagactcaagacagaaatgcaaataaccatggaattcagttatctaattcactatctagtgctataactgctgaaaatggaaattccatctcaaatggtaagcactttttaaactcagaagtaaatgtacaaaagttttaggctgtatcaactttctgggaggaatggatttaaaatatgaaaatgaagtagggttaagaactggaaaatagaatataaaccatgaaactcccctgcaagtattattgtcagcatatgattgcttcagttaaagaattggaattctattcactccttgttgacttttccgaaattttatggagtgttaatctaaaagaactggtccaaaattagtcttatactgagcagaagaaggcaatagattctctaccaatatttttaattaaaaaattattctggaaactaagaaatgtgaaggaaaataatattaaagaaatgataagtgccagactggcttcaggtattttaagtacatcaatgagtgccacatttagaaagtggcttgattgcaggtacaaaagctgaggatcacgcaagtattttctctcacaaataaaagaagacaaaggcgtctgggaataactgatgggaagactcagaccaactattcctgagggcctcccgcagggctgggaaaagcatgtttgtttagtctaattagaggcgtgggagaaccatcatgatgctgaaatgctgggaagcagttgaagacctgggagtggggtgcaaggtgagccgaagcaaggaagcccacacttgaagcttggctcatggggacataagggtacccacattgttcagagaaggcagctaagaagtcaagttgtgcttctgactgccttctcaaattacagggcaagaaactgagtcgtggccccaccaaggccttggggtggggccttcaagtgttcttcccaagagtcagagtgaaccagaaccaagaaccatgttgagttgcccagatgtaaccaggcctacaggtacctgggagaaacacgtgtacattttccccaaagggcagtaatagcatcctaggcttcaaaacattcatagaaaccatttttcaaatgcaaagtccaacacagttagaaataaccaggcataggagcacacaaaataagataaaaaattaaaagcagagacggcagccaattgcaatatgtccacagggattcaaaaggttggaattcaaagacacatgccttaaaataagtatgtttactcagccccccacgaaataaaacaacgagaatttcagcagaaataggaaactataaggaaatcgtcaaatggaaattctgaaattggaaaatgcagtaataaaattgagtacaacagaggataaagttaaatttaattagatatagttgtttaaaaacaaaacaaataaaaaataactggagaagtggaagataactcagaaaatccccagaatgaaacagattgaagcaaaagggaagaatggaaactccagacaatggtttagagatataaagggcaatgaggaggatgattgaagtcttagggaaagaagagggagcgcatgagcagaagaaagacttggtgagaaatgttagagcatctcccaatgctgacgaaagagcaccaggaaacagatttaagttggcagatttttataacattcaacatacattcttcacgggatccagcaatctgactcctcagtatcttcccaagagaaatgacagcagtgtccacacaaacacctgtatgcaaatgcatatggtgacattattcataatcacataaaactggaaataaattcagtgtctttcaactgatgactggcttgtattagtgatccatcactgtgcaaaatattactcccaaaacttggaggcttatataagaaatggttattatttcatagtttctgtgggccaggaagctgtgtgtggcttagcagggtgcctttggtttaaggtcccccatgagacagcaatcaagctgtcagccaagaccacagtcatcttgagacttgagtgaaggctgatccattttcaaggtcactcacgtggctattggcaggccacagaaggttcacatccaagtcaactcacatgggcagcctcccagcacagcagctctccccacatccctgagcaagcaatccaagagagagcaccccagatggaggctgcagtcttcacataacccagtcttgaaaatgacaccccagcactctgtcacgtttgattgagtcactaaatccaggccacactcaatgggtggggagtccgtgagtgcctggaggtgggctcaccagcatctcacaggctgaactagcacatggatgaagcctgcaataaataagagtgatcaactataatgagcatcataaaaaaaagggatggctaaagcattgtgttgaggttaaaaaaaaaaaatcaaaagactaagtgtgatcctgcttatgtaacatttggggaaaagcaaagctggagacagaaaacagctgagtggttgctggaggctgggcgtaatggcaggagatgaagttcagaaggacatgtggtgttatagacaacctggagtgctcatgtctgcagatgcacagatgtgtatgtctaaaaaaggtgaatctcactgtctctaaattacaccataatcaatccaacgtttgtaaaaatgaaacagaaacctttgcaaagcctaagtaggatacataaaactttcctaggtgtatcatagtaaaacacctataaaataaagaccgagaattaattttaaaagcagttagaggtaaaaatatgtactatcttcgaaaagtagcaactgaagtccaaagacaatgaaataacatagttaacatgctcaaataaaataactgccccccaaaaattcctgtaataatgaaagggagttaaggatatttttaggaaaaaaaataaaaatgaaaggaattaaacactgacagactcagaatgcttagagataaaggaaagaataaagaataactaaaaaggcagtaaaatttggaggggtaaaataatatttaatattatacactgataaacctaccttgccagttgtaacctcaaaggtaacccctgaaagaatattagtggggtagataatatccaaactagtaaagagagaaaaataaaatcataaaaagtcaactcaaaagatgcaaaaaggggataaaataggaaaaatagggcaaggagaaagttctgagacagtagatatgaaaacacatgtgaaaataaactttatttaattataataaactttaaaaggcttatttaatgtaaacttatatgaaaaatgattagcagaatattttaaaaactaagttttctgaaaacagtaaaacataaggattctgaaagagtaaatgtaaagggatagaaaagaaaaagatacaatgtgcaaatattaaaaagcagcaaaaacagtgctcatatatttgaacgtcaaaaattacatctctaggccaggcgcggtggctcacgcctgcaatcccagcactttgggaggccgaggcaggcagatcacctgaggtcaggagttcgagaccagcctggccaacatggtgaaacccccatctctactaaaaatacaaaaatcagctgggcttggtggtatatgcctttaatcccggcgactcggaaagctgaggtaggagaattgcttgaacccaggaggcggagtttgcagtgagccctgatcgcgccactgcactccagcctgggtgacagagccagactttgtctaaaaaaataagataaaataaaatctctaagtaatcaatgtattcaagaagaaatcacaaaataaattaaaaagcaaaatattttaactaatgacaatgcaaatatgacaacagaacttttaggacatgtctaatgtcttttgtgtatgagtggaaggggctcgggtacagtgtcggtatggtcaatatgtggctgtatggcatcgtggccatggctgggcttttagtgtccacatcaactgaatagtatatattgtcctgattaagtcgtttcatatgcttcattccatcccatcctcccaccttgccacccttctgagtctccagtgtctattattccacactctgtgcccaagtgtacacgttatttagctcccacttataagtgagaacatgtagcatttttctttctgtgtcttagttatttcacctaagataatggcctccagttccatccatgttactgcaaaagatctcttaagaaatggaaatgtatggcttcaaacctttgcatcacaagagaacaaatacgatgagtgttaaaagggtctagaaattagaaacagaacaaaaactaaatactatgaaaatggaaggaaagatatgatagtgataataagaacataagttattgaaatataaaacaaataaaataatgtgaagggatagaaaggaaggaaagagaaagttgtttatcttttaaaaaattatctttgaaaacaataagattgaaaattttcttgcaaggggatagagaaatagagaaaattggcacaaataacagattttagattgaaaaggggacatcaatacagatctggctgaaattaaaaatagtaagagaatattacaaacagttttacaccaagataaatttacaaatttacataaacaaatacattcttaaaaaaaaaagaactaacgaaaatggacaaaagaagtaggaaagctaaataacaccgtaaatgttaaattaatggaatttgtaattgaatgccttcctacaaggaaaattccagaatcagatggtttctccactaaatgtttccaaaattctaaggattaaataactccaatgtcacgtacacgctttcagagaataggaaggaaggagaaagaaaataatattactccagcttgcataattagccacttaatttatgacaaaattggcatgtgagagcactggggaagaataattgattgctatccatgtggagcaaacagtgaaactcgactctgcctaatgctatacacacaacaattcctgatagattatagatctgtatgtcaaatgtcaaatcataaaatggatagaagaaacaataggagagtatctttcttacttcataaaaggaaagaagggcttgttaagcaagacacaaaagttttaaccataaagaaaaaagaaaaaaaaaaacataaatagggagaaaatatttttaacacatttacccaacaaaggctaatattcaacgtttatttaaattaaaaacaaaagacagctgaaaagaaaattggacagaatatgtgaataccacttagaaaaacaattttaatggagtccaacctcattagtaactagagaaatgtaactgaagactccagggcaatactactacacacactctagaattacagacccgcctgaaaaggaagaggtgctcggagaacggactgccacaaagtgaggatggcaatttcatttggaggggaaggccagtagcgatttggagagatgactacaggagcttccgcagagctgccagtgttctatttctttattttatttgtgtggttgttacaattctgcaatttaaaaaaaaaaggaggaagaaagagatggagaaagggaacttctcttcaccaaaatatttaagttttctgtgttttgaggcaaaaggcaaaaactacagcttcggaaatgatcctaaaaaacttaataataataataataaaaacggcaagtcatactctaaatatcaaaacataaccaaaaaccaaggaaacaagcagaaaccctctagaccaaaatggagatgtttgtgaaataggatccatgaaattaataatataaattctttaggagtatcagggttctaaacttcagcatgtaacacatagtgtgtacggccaaagcctgcaacacagatttctgtgttctcccttaacacacttacaatttttaaaataaagttggttctatgctgtcattaagtaaaaaccacttgaaaatctcaagagttatgcgtgcaaaaggaaaattatttcaattggaaattcaatctttcaaagcaacttgacacatttatgctgatctactcttgtgagcgccatgaatttctgggggcctggaactttccccatgatttttaaaacatccagcacaataccctttatacttaggccctgagtaagcatttgctgattgaaacaatgttgtttgttacggaggaaccagtaaatcccatacagagggcagagtcagaaaaactgcctcgtcagtattatagaaattgaacaaacattacacatgtgcagaatgtgatgtatacatgagcatgataactcttaaagcaattattagtacaggttcataacttacaaagtgcagccaatgcactttctaaataagggcacaagatgaaaataaatgtttaaaataacttaaagttctaattgaatcagaaacagtgttattttctaggaaacatttctcttttgaatgccagtatctgcatgctacctctgcttcccagaaataattatctgtttgttcatttgttgaaatatagttatgtgtgcgtaattatagctatcacttactttaattgccatccttttactgatgcgagcgcagacttggatcttttttttgtatatttaattattccctggacttgtggttatttatcattagattagagagcagtttttagtgttagaacattttagctttatcaaacaaaatattgtgaacataaagatgtttattttgtggggacacacagatataaaaaattccaactagggcattttatgttcagtattattttctttcttgctattcagtgaatacacataatatggctgggtatcaggaaaaattgcaattaaagaatacagacattgcgtttgcatttacatttatcattctgtatacgttgtctatttttaatttgcattatgttcatcctcaatgcacaataagggttatttgtgttgaataaaggcttcctaaggcaaaaggttgggggccatcatttgcaggaccaggaaatctgcattctgtgctctgactccggtgccttgttgaacttaggccattagggcgccaaaccacaccagttctgggaacatctaagaagggcttccatcagccgcacctcgaaatcaatccaaaccaccagccaaggagcctttggttggaacccataaatatctttaatatgtattttacaacatcactttctttatggagattgtacaccttctttggaacgcatacccttgtctgactgaaagcctaacagccagagaaaaggaagcaagcctcacttgacaatctggaatatgttgcaatcatctattttaagcaacagaagttacctttgcaaagaaagaaaactcctggggcatcgagtaagccctgccccactcatccttctagttaaaagcattttaaagtcacattaaataatttctaatttggatattatttaattacattttctccactgcagttgagaagtcagtattgaaaaggaatagattgaaatgctcagtctggtatttccttgcagtggaatagtgttcccagtgcttaaggcatcattctgcctgggtttgaagctcacctctgatgcttattaactccccgaccatgggcaagttacttaacctctctttttcaattttctaatcttaaaaatgggaataataagagcacctacttcatggactgctgtattttatatgatgaaatttagcagaaagttaatactcaagaaatattacctatacacagttattcataaaatattatgtgttttagagctagaagagtcatgagggtttatccaacagaaacaacaattacatgaatgaggtagatggaggtgcaaggcagtgaattcgtttctctgaaaccatggaggctgtaatagtagatcagtgctttatgatattttcttagacacaaatgcccacgtgtacagccaaatacacaatattactttgatggcttgtgctggtattcagggcaaagacagacattacaatttggaatctctgggatgaatagaagcaggaatatctgggtggagttcaggggaagggtctatttaatatctaggttggaggattcaaaataatatgaagggcaggatggcaagaggaaacccagtgaagagagaggtgcacattagtcaatcaaaacacttaccaagtgcacctgtcacatgtaggcattgtgttatgcatgggagccctatgctactacctaagcaacacaagatgacctctgtgtgtgaacagtgaaaatacggagcacattgaaaatacataccaaggagactgcaaaataaggcagtcagcaataatgtcaaatgaatcccataaataatgattactctgttactttccacatagataaaagagatgagtctggtgggctgggattgctaaggatgcttcatagagaaggttgggattttcaaattgagtttaattcagaaaagaaaggagcacatttccatgaatttgctgcacaatgtattgtggcagaaatgtgaatcagcttctctgatagaataggtgagtaaataacagaggaaagaaacaattatgtaggagtctacagagccatgaatgccaatttaaagagtgtctcggccgggcgcggtggctcacgcctgtaaccccagcactttgggaggctgaggcaggcggattacaaggtcaggcgatcgagaccatcctggctaacacggtgaaaccccgtctctactaaaaatgcaaaaaattagccgggcgtggtggtgggcgcctgtagtcccagctacttgggaggctgaggcaggagtgaacctgggaggcagagcttgcagtgagccgagatcgcgccactgcgctccagcctgggtgacagagcgagactccatctcaaaaaaaaaaaaaaaaaaaaaaaaaaagagtatctctgaaagggttgtccttgttttgatgggggggggtactctctgctgttttggaaaagtgtacctgattgtactatccagggtgaacaatagaattggaaactgagtttgggggtgccagttttgaattcattcactacttaagccttggcaggttttgtacatgaagcaagagtattaaagactgtattggtgtaggagtcaagaagaggaaggtgtcaagaacgactccaagaatttgaggcaaatgatgggagaatacagcactcttaagaagggaagggcaattcccaaaggaggttaattctataagcggatttggagctcaagagaaaaggacttctgattatggatgatttttccataaatgatgatgacaggtttggagtttaggccagggttccaggatagaaagagaaaagccagaatttttaaagaagctggagacatggtggttatttatagcatcagaggaacaatcataaagagaaataagaaaagaaatatgaccactaaaccactcagaatgccaaagtttgagaaatttacattgagaaggggggaaatggagacatacaataggtgctcaagagatagaagacagatgtccaatttcatggaaatcaagagggtagtggatttaaaggtgatggaatacttggaaagctggacagatgtaaaaagagaattcaaaccctcttgccattgactaaacaagtttgggtccctacaaaatgacagatttgactaatagattctaaccggtcagccatgtaaaattcagtgccataccccccttgaaagtctctttctcattcttgtcttgtctttttttttttttttttttttgagatggagtcttgctctgtcgcccaggctggagtgcagtggcacaatctcaactcactgcaaactccgcctcccaggttcaagtgattcttcagcctcagcctcccgagtagctgggactacaggcgcatgccaccacatttttttttttgtattttttttagtagaggcagggtttcaccgtgttagccagaatggtcttgatctgctgacctcgtgatctgcccgcctcagcctctcaaagtgctggtattacaggcgtgagccactgcacccagccctcattcttttctttttataagaatttacatgaacccactacgctctgcatgtagacctcatggccccagagtctgccacttttcaaaattacttctttaaaaatcacacagaactccagggaccaggtctacaccacagtgatgaggaggatgtcctaaaagccattcctctttgtgtcctgcaggaaggtttaactttcagtgctctgagcagcctccaattcaggaggagagggagaacagaggctgcttcttcctgctaaaccttcaatcaaggccaaagccttttcgacttttgcccacccaagtttgaaggagcagcagcaggttctatggagtgtccacagcatatccattatgccatggagatcagctttggggaattccttcccctgaacatctgcatgttttctttgagcagaagagctggctatctggagggtagagtagggtggacgcagtttcagaagaccttgatttgctgtcatttgggcaagaatggctttttgaaatagtttggtatcataatggaccaaaagctcaactttttgaagcacactattgccctggaaagaatgtgttcagcaagggacacatgaatctctaagctgggaattgttaactccaagcctggtctggggagaaggctgctacagtaagaggagcagtgggggcttctcagaatgtgcagaagctccttctcagacagaattccaccttttaatgaaggcacagataaagagctccatcttcactttaaatgttcctccaacacgattggagtcttcaccctggttaaaatgcgccgtgggattctctacccacgcaggactgtgggacttttctggaggcctttgcttagcaatgttccctttagctgcgtgagaaaatccttgctatgttaaaaaaaaaaaagttcttgtcagttaaggacacatgtacaaacatttacagctgaaatgacatgatttctgggatttaagtgaaaaatgaataaaaaatggataaaaatggataaaattgacagccccaaggcttggaatgggtgcatggagtttcactgcatattctctttatgtctgaaatgtttgtaataaaaagttttaaaactgtgttattttgatagatagaatgaatgttacgtagtctcatatccattacttggaattcttaatgaaattgaatatgtgtattacttattagccattcatattttcatattttttctcctttattttctaaacttttattctttgtccattttttaatatctgggatctgtaggatgtttgaagaattaaaaaagcctcttatttaatatatttcaatgttctacattgttcttttaaaatacacattttatttttagggcattgtcaatatgtttatttttaatgtttatagagagacatgaatccgttttctttttttttattcatggtttgtgcgtttggtgtcattttaaaataatttgccttaaaaaggtactgcttctaatacggcagctaaataaaatattgtgctggtaaaaaaaaaaaaaaaaaaaaaaaagacctcctttgcacctttggcgcttcctggccgtcactttgtcccttccagttctcaaaatgttactgcgttggccgtgatgaggacccttggcctgtttgctacaaccttcaaaaaatccccttccctctgacttctcgggcccagtcgcttgtcccaccccctcctccacatgcccgtctcccccagcacccactcacctgcctccctccccgctgtcctcacctggccctccacctgcatgcgaccacctgcccaagctgccatatgtccctgtctgtggagccctgacacaggttctgggacccattctttctttagtcaacagttatgaatgaaatacctttgaactcattacttagataaaatggtgtcacttctcttctgggaagtctgcagtgctacctatcgtctccaaagtgtggtcacatttccgcgaagcgtccttgtgttttgttgccttatcacatttgtgctctcagccaggcatgtccttctcgactttgttcgccctccacaattctcctcctcctcgaaggcccaggtcctttagcaacaccaccatgaagtttactctagtccgttccatcagaatgcatccttaccttctccaagaccctgttcaacgtgacctgtactcctcttaatcctgaaatcatgctgctgtgtgtttggcctcagtgccattctcactgaattgactttctcaagggtggggacttttcttcgttcttccttgtatttctcagcgccttatgcagcggttgctcataaatgtttttaaccttaatttaattgactctatgcagtgctcagcaggctatcgattccgctctgagcttataccctttcaactgagtttctgttttgattctgagatccaacttctaattttatgtatttatttatttatttattatttatttatttatgttgagatggagtctcactctgtcacccaggctggggtgcaatggagcaaccttggctcactgcaactctccctcccaggttcaagcgattctcctgcctcagcctcctgagtagctgagactacaggtgtgcaccaccgtgcccgggtaattttgtatttttagtagagatgggatttcaccgtgttggctgggctggtctcgatctcctgacctcaggtgatccgccaccttagcctcccaaagtactgggattacaggcgtgagccagtgcacccagccccgacttctaatttataatttaggtttgaaaaatggatcacatttgtcttctcctgccacagatcccctgtcttagtaagacatctggtgaactggtttctttatggttcctatagaagtgaaggtttatcttgcttatcaatcagccccttcctcccagcaccccatcctttattcccctctaagaggtggtccttcacatgaatcccaagccctttgttgtgccctactacccggaaacacattttttttccaactatctgctttatctagtttcctgaaatttcatattgtgcctgatcttggattgacacactcccttccgcctgtgtgaatttcaggctgctctgacactcactgtgattggagcctttcctgtgtcctgccaccacagtgtctaaggacactattgccacgtagcacctgaggctactgctgctgcctgtggccgagatctgttctccagcaagagaccccccccacccactagccattgtccgcccagtcttcatgaagttagcttttccataccaaggtatctggacatgtaacaagatcacctggaaggccttgttgtgtgttgacaggattgtgtcgacttccctgaggaactctctcctataattggaaaagcgtgcactgattgtctaatgatttttaatttaggaattatgtatatgtttaatcaattacctgtgctagttaattatgctttcagaggagagtagtaatcacttcagtatttaaagttctctgagttgaattcattttgttgggttcttatttctctttttgtctattcatgtttattaatcgaagtcacttgcggtgatgcattgcgcctgtatcacagtgattctcagcccgtgtaggaggggatgactttgccctccaaggaacttttggcaatgtctgggaacatttctgggtgccacaaatgggggtgctgctggcatctagtgggtggaggtcagggatgcatggggcagaccccactgcaaagaattatacaggccaaaattccaatagtgcagaggctgggaaactgctttgatcataaaggataattaatcaaatcatttggtgcctcatagtaacttcgcgttgttgagggacatgtaaagtttcataaacctacaagttactctgcatggttgctcatgaattggtgtgttgtgaatcggcagctctccccaccttttcctcatggaaattcagccaatctctttgcttccttgtgcacaaaatgaactacagccagtggaattcatcagacacacaggcttagttatgctctgattttcaatcccttcctcgtctccctgcaatcctatgaatggcagccacattctgctgtctgcagtcaccctagtgactcagtgggcccgtcactgaccccgtatgcttcttcaaaccttttcagtctctagaagtttcccttctcccctccaatacttatctgctcacttttgtgctattatcacatatctccttattatcattgtatctcctttggcaggatatgccctcttttcctaaatgaagctgccacaatactgtgcatgcccatgtttcattgcaaaatttagtatttagtttgtgtttaaggatcatcatttcaattcataaaagataacaattctagtttattgtaatgagtgcatgacttactttatttggaacaaggagacactgcttaactcccgatttgtgttgacctcaataggtttacctgaagaagatggatactcacggttgtctataagtggcacagggacttcgacatttcaaagacacagggacagtcacaccactcaggtaatgatgtctgtctgttcacatgtgcagtgacaaatggaattaagttatgacaaggcattcattaacttgttaccaatagatgctctgtgtggactggagggctcagctgttctcacctctgccctgcactccttcagctgaatggtcttctctctccacctcagctgactgcaattttctgcttgtttccaaaataaggaataatgtccaaaacaactaaaacataatagttttaaatgaaatattgtagatttaatttatattgtggtactttaaaattattctcgggtgaagatgatattaaatctgctgaatgaagttgctatgcatttgaccttggctaaaataggatgactcttagtgaccacacctgggaataaaatgcttgaaccacctgtggtttcatggcatgcatcttatctcagttatgacattcatttccatgtaattcacattcatttaaaatatgacatatgatgagaacatggtaaaatcaaaatgagattgcagtccacaaaactgtttggaggtgcattactgattgcatgtaaatgttttatgtgtctcttcctaacaatttcaccaaaataaacaagattatcacttcaagaagaagaaaaaaagaacccatttgtgcttctagaaagtgaaagaatttatattatagaatgtactgttttattttccttttatgttgaattttaaaatatactttaaataattgtctttaaaatatataatgttgcattcaaggtgatgcacaaaccacccattagagagactttgttatcaatatattaacagactattgctttagcaacaggattctcattttatctaaagttacagcacaatttttatgtcaaacatctacataaaagtctaaaataacctcagccaagtatccagatgtttccacgaaatcaactatacagctaatgatcagctttccttggaatatttagcattatagaggcatggccatattatcagctgagatttttctaaataacactgatgaggtagtgagaaaaatcaatagtttgaatcttaagaataaatcttacagtaggcaatcttctgaaatcacttgcactgatatccaggcactgaaatagaaagaaaatgctgattggttgcaataatagattgtcctaatcttccctctattccttagagatgcatctactttaccttgtaagcatcacagatgcttcctctgagatcatgcacaggggaacctcctggtcatgaacactggtttgatttttgtattggaggcctgactcctgtacattacaacacaacgctgggccatctgacatcctttccaggcctgccccctgtacattacaacacaatgctaggccatctgacatcctttccaggcctgcccctgcaatgtggttcttagacaaagggagtcatttgaaagacggtgtatatagtagggtgctttgtgacttttcctctgtgtttggctaagaatcaaagagagatgagaaaggtcatcgggaatcattttccattctcagatttcaaagaggccttgttttcaaatgcagacatccctgatgaggcaggaactgccagtcatcttggggcacattctttttctcaaggaaactgaaaaccatgcttattttcttccatgcaaattgtgggcactcacgtgatgagacagattccttactggtgagaagctgtaagagttatgtgaaactatgtgttgaatggctttcagaatttattgctcatgtgacatttatacaagaagtatggacacatgcagggaaccagctttttagcttttctactaatgcaattaaatagaaattctataaaatccagtcctggacagattgggcacgtagcagtaaaattaaatggtgaccaaaaatgaaatttctctttaaggatgtctatattttcattagcctcatcagcagttttaataaactcccttcaaggaagataaaatgtctgggcgttatggtagataaagaaaagagaaaatagagtcagtgatttgccaaagatcatatggaaaattcactgagtccacagtttgaatggaaatcaagatcatatgttccgtttctgagaatgaacttatcataacccattaaaagaaatgcaggagtcattcaactgtttcataaaatttatttatttatttattttattttatttttttttttgagacagagtttaactcttgttgcccaggctggagtgcaatgggatgatctcagctcactgcaacctccacctcccggttcaagtgattctcctatctcagcctcccaagtagctgggattacaggtgtgcaccaccacacccagctaattttgtatttttagtagagatggagtttcatcatgttggtcaggctggtctcaaactcctgacctcagtgatccgtccgcctcggcctcccaaagtgctgggattacaggcgggagccactgcacctggcctgtttcataaaacataaagaatttttggttcaaaaataaaagtcttcagtagccataatggacatttgtgatttggctttttcctgccagtctcacatttcagtttcgcacctaccacgatgaaaatacaagggaagggactccctcttcctcccctgctttgacagctggacaaacacatgtaagatgggctcagttaacctacctacgatggatgcagagtgagggacatataatggaagggacaacaattgacctggctccatggggtgacattgggcagtagtggctccatgcagcaccagcagaagaatattagtcggagaagaactttgctcagagcacgccagccatcagcccctgaatccacctcacccactcgccagacctttttgtcgaagttcatgtccttccttagccttccaatgaagcctctacctgcctgagatgtccaaggttagttttctttgcttagaaatcagaattttgactaatatacacatttaattttattgttactatctataaagttttacatccaaacaagtatttttttcactaagtgtacaaactcttcatttgttctcaaaatagatgcaaaacattttctgatagggctggagccttaatatacggtggttgtttatgtaaaaaaaatatagaaaatatagttgatgttgtactgcattataactttattaatttgaaaactataatggctttatataaaagtagtgaaaattaattttacataaaatgtttgaaactagcaaaagctgggacatttgctgcgctgtgcatggggctgtgttcctttgcacttcccaagcactgggcatgaataaaactggctgtgagatacgacatcatggaattccacacactggcccttgagggagctttgtggcagttcccaggactcaaatctagaatttcgtaggttatagtattttatagtagctttggaattaaacagcatttatgaaaagaatatgacatttatctacttaccattttatgagattttactttttttaaaagtttatgctatttggcgtgatgcaatcctttagaagtaactcggtggtgagaagctaagcggcggtgggggggaatgctgacagcatcagccagccaagaatgacttcttcgcattttttgccatgatggcaatcctctgccgactcagagggccaggtaacctgacacaggaagcccacgatttataaatagagcaaaagcatgaaagtcacagggaggtgggaggatggcctgaaggcagaatgatggcagaaggggacgcagaaacaaaaatgcttggtacttgcccttggcataaaaatttctagttacacatctgtttaggggtccacacttgacattgagaaatgagctgtttaattgtttcattaagcataggctatctctatttatgttactattttaactctaccaccttttcttcatgccttattcttcttctcagcagtctgctctccacagtaatatcatgtgctttatgttcttttattttcattatgggcatttatcatatttcttgccaagtttttaaaaatattcttttgtttttgtaaagaacataaaaagttattatgcatattgatcatattcaggtattcatcgtaagaaaccattcatggtctttgataaactaatggcaatctgggacccaagatcttaataaatatccagctcactcctgccatagctgccgatgaaagccataataagatcaatatgcaattgattcacatcaaaaagcaaattgttatgtggtttgctttactgaatgatcaaataaacctttttgtaatgtcatataaaaacaaagttaagagttgcagagcactaaataaatccaatgccttctttctatattcattgtatttgttatatagactgaaatatattatagcatggaattaaaacaaattgtgtgttagataaaataatgaaatgtggaaatatttagtttaatcattaaacgataattctaaagatatgtcagggaacgtaagtaagataaccctttcaaaaggaaacatatataaatatatattttatataaccatatatgagctacaaagagaaggagatctagcacacaaagctctttcacacagccaaggttcagggaatccgtactcaccactcgtgacttacagattatgtgcaaaaaatgaaggtagtaaattaagttgatgtgtgaaatggcagcattttcaacagggaaaggtcatgtccagtagagataaatagaaatttagaaaataaaaaacaaaaacatatcctatattttgtatttttccatcataaaattgcactgtatttattaatgcaacataagtgtatataaatgcacagttttttctgattaagacactatttattatcagtgaggaggatttaattgccataaattttgagaaaataagaagtcagagtagtgactatgtttttttttgtttgtgtgtgtgtttgagatagtctccctctgtcccaggctggagttcagtggcgcaatctcggctcactgcaacctccacctcccaggttcaagtgattcttctgcctcagcctcccaagtagttgggattacaggcgcgtgccaccacacttggctaatttttttctttttttttttgaaatggatggagcctcactctgttgcccgggctggagtgcagtggcacaatctcagctcactgcaacctgcacctcccaggttcaagcgattctcctgcctcagcctcctgagtagctggggctacaggcacatgccatcatgctcggctaattttttatatacttttttcagtagagacggggtttcaccatgttggtcaggctggtctcaaactcctgacctcaaatgatttgcccccctccctcccaaagtgttattacaggagtgagccaccgcacctggctgtgactacatttttaaagaggaaaaagtcttgtgatatttctgcaagctcaccttctagatgggaaacctgcagttagcaatattattgtatagtggaggagtaacaaagtaattagaaacatttggctaactataaattctaggtaacaacaatttcaatattaatttaattggtttttaaagtgaagaaaataagaaaagaactagataagaatcccagattcatcattcatcatgtaagtgcacaaaaaagtaattttgggggtcaattagagaaaatatatgtaacatgcctagcatgatgctgcctggaatactgtaggtgcttaaaaaaaaaaaagctaaaagcttacttgctcttgttattatggtattcctttctttgcagggtcaatattctgaaaaccagttctgattttaacattgtagatgctatccaaaatatggaggagattagattggatcaagagaacccaatatttttctgggattttggtcaaatctattatatgtgtgatttttaaaatatgatttattatggaatagtataaacttaaaaaacagtgattaatgaaacatcacctttaataagtcttaacattttgcattatttactttagagctacatttttggaaaaacatgtatcctagctctcaatctcatccctgcctaccacaccagaagtgaatcatcacaatgaagtttgcacgtagcccttcatccatgtttgcacctttactgagcataggtgtactcataaatcatataatattcacaagtaataaccaatgctattcatgctttcaaagtgtaaaaaaaaatctcactttctacagattattctgcaaacagcttcttgtttttgctgtggtgggacttttttttccattttgatacatgcatctcccacttgttattttattctaagaattagctccaggtgaaatgtacagactttagggttaacaactgtagtccccgctacttgggaggctgaggcaagaggatcacttgagctcaggagactgaggctgcagtgagctgtcttcacaccattgcattccagcctaagcaacagagaccgtgtctcaaaaaaaaattaaattaaaaaacaactttagggctgaggtatcgatacaataagaaactattgatgaccgacacatacttagtgcaaaattatactcatattccttcaacaagcatggcagggagcaagctcaggaggagaggaaagcattagggactgaagggcaggtgtcacacgacctgctgctgctggccctagggtgctgtggtgcctcagggggacagatgagcacaaggcagatggtgttttcctctggtctgttgtgttgtggtccacagaaaacctaattcagtgatctccatgaaaggtgcagggagatcgatgatgctctgtgctcagtgccaatatgcaggtcatattgtagtttacaacttcactagagggctagaagttacagcacccaaggaagtgagcatacattctggccagtgcctctataagcttttcaacacacacacacacacacacacaaacacacacaatcatattgctttttaggtgcaaacatgcctccttcattggaaacttttctgagaaacaagttccatataaatgtggtcatggcatttcttaagaacatgtttacagtttgaccaaagtgagtggaaaacttacatcaaaatcatttccaagttatcaatgttacaagccatgctacaattaacatcactgaaaatgcctctaacttacaactgggggaaacaaaaaaattgcccaagattcccctagaaatggaagtgctaagtttctgctcatggacattttcaactgtagtggttattaccaaattactcccctaaaaggttaaaccaatgtatgtacttctaaaagggagtaaagttttccatctctcctggtaaacacttggtttaattattcatttaatttttgccaatatgataaatgtaaaatggatcttattgtggttttattttatttcctggttgccaagcagtattttcacatattctcagacttgttaatccaaatacatccttttcttatttcccaacttgtttgcatgattttcttgatgatgttaggaattttccacatattctggataatattccttgccagtttcatgcatggcaaacattttgcttattgtgttttcttggtcggtttagctagaagtctatcaattctattgatttttttaaagtagcttttgatttcattgattttctctattgttttactgttttattgattcctgttgttttttattttcttttcttttgcttgctttgggcttaattttctctatttctgctttcttaaataggtagcatagatcactgacttgaagtgtttcttttcttcctaataaaagcatttaatagagttgtaaatttccatctcaacactgtaatagctgcatcccacaaatcttaatttgttttgtttccattttcattcagttcaaaatattttctaatttcccatgggactttctctttggctaatactgatgctttccaagtatttggggttttccaggtacctttctgctgctgaattctagtttaattcccctatgatctgagggtatgccttgtatgatttcagttctcttaaatgtactaaaatgtttttatggcccaggatatgacctgtctggctgaaatttccttgggcacttcaacaaaaatatgtattctgcttccattgggtggagtcttctggaagtgtggattaggtctggttggttacttgtgtccacatccatgtctctgctggctttctgtgttcatttttcatctattcctgagagaagagcacagaagtctccaactatactgtggctttgtccacacctttcggtttcatcagtttttgcctcatgcatttggaagctatatttgagatacaaagacttttaaaattattgcatcttttttggtgaagatctattcatcattatacaatttcattttttatttgtatttctttgtcttaagtctactttgtctgaaattaatatagccactccattattttgttcattgtctgcaaggtatattttttcatcctttactttttaaaaatagctttatcaagatataattcacataccacacaacccgtgcctttaagttatgaaaattcagtgtttcttcgtaacttcttaatgttgtgcaactatctctacaatgtaattttagaactttttgcctcctccccacaaaaaattcaccccttcactttaatgtattcatctttctatatttgacatgagatttctgtaggcaacataacagatgagtcttatttatttttatccaatctgacaacctttcatgagaccatttctattaatgtaattattgatatggttagatttaggtatgtattagatagattctctagagcgacagaactaacacgatagatgaatatataaaggggagtttgttagggagaattgactcaacaccatcacaaagtgaagtcccacaatagtccatctgcaagctgaggagcaaagaagccagtccgagtcccaaaacctcaaaagcagggaagccaacagtgcagtctttaatccgtgaccaaaggcccaagagcccctggcaaaccactgatgtaagtccaagagtccaaaagctgaagaagttggaatccaatgttcaagagaaggaagcagggccaggcgcagtggctcatgcctgtaatcccagcactttgggaggccgacttgggtggatcacctgaggtcaggagttcgagaccaccctggccaacctggagaaaacctgtctctactaaaaatacaaaagttagctgggcgtggtggtgcatgcctgtaaccccagctactcgggaggctgaggcaggagaattgcttgaaccagggaggcgaaggttgcagtgagcagagacagtgtaattgtacttcagcctgggcaacaagagcaaaattctgtctaaaaaaaatgaaaaaaaaaaagaaggacacatccagcatagaagaaagatgaaggccaaaagattcagcaagtcaagtccttccatgttcttccctctgctttattctagcagtgctggcagctgattagatggtgcccacccagatcaagggtgggtctgcctctcccagtccactgactcaaatgttaatctcttttggcaacaccctcacagacacacccaggaacaatactttgcatccttcaatccaaccaagttgacactcaatattcaccattacaaggtatattagttttattacgtgtttttctgattgtccctgctgttttcattcttctgtttccttatgatgacttctttcagattatttggatatttttaaaattccattttacattacctattggtaaattaaaattgtaatatatgaacatctaatttcagtctaccctggtcaaccgtcttggtcccttcaccctctatcacccatctttacttagcagttgaaccatgtgctacatctgtgtacattgaaaccccccaggccatgttgtaacttcttctttcaacagtcatacagggaaaaaatagtggggaaaaaaaatcgtcttttatgctaactcaatatttacaatttctgttgctctccttcatttctgaagttctgagtttccttctggtatcattttacgtcagcttaaagatctccatttagcatttcatttagagtaggcccaagaaatcttagttttctttacctgagcatgccattattctgccttcattctctacgttttgattccctaccacgatttgtgttttgttgttgtttttttttcaactttcccaattcctcagatagatgttttgtattttatacaaagttttagttgtaatcagtgagagaattagactatagtaggcttacccgtttatgtgtttatcccacgtaaagttttaatgttattatagtcaaattgattaatccttacctttagggtttgtacttttgttgttctgtttaagaaaatctttctacatttttaaggaaaaaaaaattattttactgctatctgccataaagatattatcctattatatttttgtaaagtttaggtttgttttttacatttagggatttaagctacctggactttgtttttgagaatggtgtgagttagcaatgtaattttacattttttctgtacggataacaattgttccacactttttgcaacataggccatgcttctgcttcctcctaacactgagtatgtcacctcagtgacatataatcagtcagtgtaatataatcatttgtgtgtgtgtgtatgtgcaccttgatagacctgtgagcttatagagagtgcattaaatgcatcttaatcacttttgaattccaaacacaaagcacaataatttgtcagctcagtgtaattgttaaccagtagcagccccagaagaattaagagaagctgactgatatattattccctaactttattagatattttaaatttaatcccatgttaaaaatgtatcaataaacttgttaattaggatcacaggcagttgtttcactggttggaggaaattaaagtgaagtcacattttattcagtgattggcttctaaaattatgtaatttgaaagtgacatatgatgaaaaccactctggaacatccttacattacctatcaagaataatatgcaaggtttgtaactccattcaattatatgcatccatgtataagcaatgcataaagcaacttaaagcatataataatatatatttagcattttgagttccgagtgagtggattgcataaaattgaattttcaggctgggtgcagtggctcatgtctgtaatcccagcactttgggaggctgaggcgggcggatcatctgtggtcaagagttcgagacaagcctagccaaaatggagaaaccctgcctctactaaaaatacaaaaattagccgggcatcgtggcaggcgcttgtaatcccagctacacgggaggctgaggcaggagaatcacttgaaccccagaggcagaggttgcggtgagccaagatcgcgccactgcactccagcctgggggacaagagcgaaactctgtctcgaaaaaaaaaaaattgaattttcaaaggctcattcattgatcaaaagatgtttattgaggttctgcttgtactaggcacaagtctaggcacgtgggatactttgtctacaaagcaaacttgcttgccctcatagaagttaaattctagcatggaaaaataggcaatatttaagtaaaatatgtaatacactaaaaggaaaaaatcatatggaaaaaagaaaacgttcaacagggtaagcagggttgggagggtcagactggagagtggtgaggaagaaggttgggctgagttgcaattgtaaatcagggatcaaaaaaagcctcctgagcaaagatatggaagtcagggagagaccagtgctgacgtcagggcagagtgttctaggcaaagggagcagccaaggccctgaggtaggagcatgcctgcattgcaaaaaggctggtgtggctgcagtgagattactctacttgtcactagatgttcaagtggggttgaaattactataagtgttaattctaggaaagggatactttccagttatgaactacggcaagaggctaaatataaaataccaattatgactatatcatattacaaccttctttaaaatcattttactcggtttggaaactttaatctgttcagagtataagtaaaggttaaatgtttgcctttttttgtaagtggaaaatattagacatatagttctgtttctgctcaagatatcagagagttggagagagactccagggaatctggaccccatatttctgataattttgaaagcgaaattcaggctaaaataatagaaggatttccattatgctgaaatagagtcagctaacactgatgaaggtatgtattttatgtcctcagcagacctagtagacctgatttttctctgatttttatgattgcattattatttgaaactgtcattttgtatttctgactctgtttctaaaacagatgagctgtgatattggaaagaagtgtcatgcagtcaatgatataaaaagcctaggttttgaagcccaagtggatttaaattaattttatacacttgcaggtgatttttactatctgtttctggaaaggactattaatttaaaatatttgcttttatattttgcctactttagcagggtcttgcctcttttccctcctaatccttcctgacatctgtttttcttttctctagcatttgtacccacattatttgttctgacattatcttaagggcactgtaattgagcccagagtcacagtggcagatgctgtgcctgccaaattcatgccttctttttcttaatcacaaagctaaactatgtgtcccagtatcccttgtggttaggggtagtcatctgactgaaactagccaatggaatgagaaccattgtgaggggcaccacttacaagcatagcccatgcaacccaaccttgactatcttctatgacctttctcaacccaaagctggatacagaatcctccaagactcagaatcctccaagactcaggtttacttatggtgacatgaaaggtcatccactcatcagattctggcctcaatatgagcaagaaatatccttcttttgtgcaaagccactgatatttatgatttatctgttatgacatcctgggtaacctaactgggacctcttcatcatttatttgcttaatattttattgttgctgttaggcattaacatttatagcacctaagtttagcttccattattcaataatctttattctttaagatagccaaaatcatgcctcttcatgtcttccaatgacagaattgtaggaatattgctaataagaagctatagtacaaaataatgatcagttggtgctccaccaagccacacttcatacatactctctctctctctctccctctctctttctctctctctctcacacacacacagtgtatagagaatagtgtatataaagtttgtaactcctaaaaattctttaaaaataaatgaacttaattttgctgaaggaaaagtcaattccctgtaataaattgggcaccctgagaaatagaaatattttaataggttcagcattttctgagtgcatttattaatgatacagaagtgcctctcttacctccagttctcaagtgggtgactctaacaggtcactgcattttggagttgctaatggatcccattgatttgctaatctgtgcccctttccaattatagctgatgttttaaaatctagttggattgggttctgttacaatccagcttcttaaaattattttcttcattcatatttgattctatttaatactgttacacacgattaaataacatgattatttctggaaaaaaaaatttgagaaattactaaattaatagttaaactgtgtcctgcaaaacaatgtaaattaagacactggctaatgtaacaggttggggaaagtatccttctacttgagtcctctctcctctgaaggctatgtgtgccatgctaccatgattttgacgcttgttttcctcacctttattcctaggccttacctcctttcctagttattcacgactctattgttactccaaagccaactgtcaaatcctatacccgtatctcacagagcttttctctctcttggttttataataattatatacatgtaagcaaaatatgaataccatttgttataccactcaactcaattagcctttcttcttgttgtgtcctagtcatcctttcaatccagatcaaatcacatatcccagtggccatactgcctttaaatgtgttgtttctcttctgtattccaacagcagtaatgacatgcataagttattaatcaattaatgctatcctgcctcgtgaaatttttgtacttgtgtcttgtctaagcatctttattcatataatttttatgcacttatgtcttgttacccaatttgaatgaaagcccctcgatggaggtggtcagattgtgtgcatctggcttagtcctatagaacccaccacagttccttgcattttcataaacatatgaagcacatttattaattgattgacacggaaaacttttttggaaggcaatgtaattaatacatataaaaactgactaaactcaattgtacctgaaatggcattttgactctaccactttctagccaagtgactttaggcttgaaaggtgactttctgcatctgtgaaatgaagataatgatattgaacctgcatatttcacacggttgtgagtgtcgactagagtactaacgtgaaaatgttttaaggatataaatgatatcatgaagatgatactagaaatgggctttagaaaccttgagggggcatctatcaggcagggaattttaattcggacgtacaaaccaggatgactgtagggaagaaaagtagaattccagggtgtgttccacatatatctggttgggttgaaatatagagactgtgtcagaatggatgatgacgaggctagaataattcagtgtggccagaaaatacagaactttctcaaagcatatgggcttgattctttctttaggctaggggaaggcagtggcattaaagatttttgagcaagcaaattatatagacagatttttttctctctaaagaaagtggcaagagaacagagttcatacaagatccttatcctaaatgtcacaaattaactatattgcatgatttgtagtaaaatttttaagtttctattttataactttcagttataaatgtataatgtataacatatacattcactcatcagagtccatttttactcataactatgtgtggagaggttaaaatcagctgccaaatgcaaaaaaaaaaggtacttaaattatactaagtgtgttccagtataatgttacttattataaaagtaaagaatagttgttgattttttttaagaaattaaagcatccagataaggtaaaaaatgcaaatcctctctcttgcttccttccctcactattgtccagatatagctcctcttgtttccaataaaacttttaacgtgccttttaaaggatattttcccctttgtttaaaccttaagcaacaaagaaacaaaatcccaagaatgaatttaattgtattgctatataaatgaatatttctgaattaggaaggaccaactcttttaaaacaccacaagtgctattttgactttcagatatttttcttggttctttagaagtgtagatatatgtaagcttttaatcaaagactttttaaaaatcacactttatgctatatctttaggatttatttaagtagacttcggttttatagactctgttttttcaaatttcatttttcaacattttttattcttcaacatcttgttagctccaagtagaaatgcgatttgcatttgaaacactaatattcactattcagtcagccaagacatttccttcttttaatttccataaatgtcagtaaatgcctcttttcacctttgggtgaatagtcaatagaaaaatcaattctgtgacaaatgaacagcaacatgattttacatatgaattatttaacaaagactatttttatccttgaagggaaagacttaagttaaaaatcggtagcaaattattaatttacatttattaatatgatccacaggaatgcatatccatagaaattgaagaaattttatatcttatgtttaattggttcatgccctagacctcataattgtccaataggaaattattgaaaattagtaaatatataaataatcaataaacctcattaagcctttagatcacgttgtattttcacccaggttgtgagagatttagtgttttgtaatgcctgaaaataagtgaactaattacaagtgtctcactttagagaaaacactggcatcacctccgtttttacatcactttatcaaactccatcttcttatctaattgatgtctcctagatgttgagagacacaagattctttacagtaaagtacagaaatggaaagtagattcatgtcttgaatgtctaaatttcaaatcaccaaggttttctcaataacagaataaaatcattttttaaatccccgtactgagttgtcgagttagtaatcaccagtatcttaagtagcattgtaattttctaagaattaccatttctatgaaggaatcttcttgttgaaaacctaataaatagaagggaatttgtttgagggtgagtatcccaacccatagggaaatgggtctggaccatgatcatttatatatctgtttgcatatcctaggagcttgaaatgcttttctggtgttcagaggcacagacattcattgaatgtaaatgacttagcttttaccttacataatcctgtcttaagagcagaaagaacataggggtgttagaggtttaacccaggccacattttaggtggtccaaactgacaggagcttgtttatgagaaatgctggccccaccctaagggctccagtaatactgccttggccacaaatgtttgtggaatggatccctttgtcaatttctttggacgtcaggttttcctagctccgtataaaccgtgactttgctctctcattacagaactgcaagtggcccccaaactttgaagctttcagctctcttttgaatgtcaactttaaaaataaaaattacagaataactagcaagtgtcttattagcttattcaccaaacaattttgtttttaaagacattaaactgtcagagagcctgtgcacttttctaaatgcctggattttgtacctattatagaacagtacaattttttccgtgccatcccaaaataataattttggacatgtaagtttatttgatcccttaaccctaaggcactgcattctttggccaccaggagtctgtggtgactgtccccctctccttcagcggctccgcccactagccattcagatctatttaggcatgttgaattcacagcaagaaacgagcatgggaccacccacaccccatgtgatttcagagcagccgagcatttttaataagttcccagagctttctagtgtttgaaaaacccttcgctgaatctgtgaatgtgaaatacaactcacgtgtaagaatgcgttcaggggaagcctggcgttgcttgaaggcactctcttctgttctatttcctggacttgatggagctgagttgcccatttacccccaaggtttttttttaaatggacccacacatttaatactgtgtgataatgtttctcccttctctcaaacgtgggccatgcattcatacgcttactccctttaaactctctaagcaagtacactggatactttgtgctgggtagagattaatttactcattttaggctccaaggacaccatagtcttgtgaggcagtaactaattctacccacatgcaatagatcaacattactccaactcttgtaatatacatgatactttttaaatgaaagaaaaacatccccttgacccttaaagtttcttaaattattttacaatgttaattaaatgtatagacatacagtgttacaaataatctctttactctttgagctttcatttcagctataaaaccaaggcaaattgaccacttgagtagaataaaagtctacaaaagcaaaataaaggtaaaattcacaacattgatgttaggcatgagattttgtttagctgaaatgacatgactgttggaaacgtgcgctgactattctattcatcaagttccgtcaagctttgtgtgtttttcccactttatgccactggctaaccaagcccctaccactatttctatttgaaatgacagccagcttttgaacttaccctgctttgcaatatcacatagcttttcttgcaggaaaaagaaaatctattacatattaaatccatctgctcttttctcattaacctacaacagtataaataatattacttctgtcatcctactcataaataaaatacaaagacataaaaaaatctcattgagtactagcttgaaatatagatattcaagatgatacaaagtacaattactttaaaaagatatcatgaatatataaacgcaaataaattttaaattgttgaaggaatttgaggactcctgaaaatacaaaccctaacttcagaagcattgcatttaacaactgtttaaataggtcactaaaatctcttcatactctttgttatcttacccctaaaattcaaaaaagctgtaagagttttctaattttcttcctgtagaactttatttagttttgagtcatatataaatcatagttatgttttaaatctaatgtgttgctcagtattttctgggttgctttttagtaataaaagaatatattatgttatatttataaaaggccataaatcgtgagaagtgcacctatttagcattacttaactgagtcatcaggataatcataattcagcagtgtttaaggattttgttcaagtcaaggagctaaccatggtacaactgtaacagctcatatttaaacagcactcactacttttgtgaggctttcttttaagacacctgcatatgtgactcatataatccacatcaagttgttacaaggtaggtaatttcttgtggtcccactttacaggtgatgaagccagcgaatgcttgttcagcattgcacaagtagcttgcatagttgggttccatcccaggcattccggctccagaggccaggtttttcagccacactgactgtgctcaaaaccatcctccaattccacatgggtttgtcatttcatcatagaaaatgaagtttaatgtcattcctgtcacttgtctacgtcaaatcctgtggaaacccttctcctcgcatgttcttctcccctgttctaactggttaggtgcccatctcacttctcaatattcagatcaaaggttaattaacttgtgaagcctcctcagactttcctccataaagcttcctttctcaagtaaatggtttaataaaaaaggtatatatatatatatatatatatatatatatatatatatatatatataccgtcattttgcctcgctccatctctgtgccctgggtaacactttaagacacgtgttttgtttgtctaaaagctccttgaaaagcagctcagttgtcccattcatgaagcagggagctcctagagcagaggcatacgatgcaagcgtgaaggtttgcagatgtggagtcctttgtactttcccagtcataacacttgccttctggttctaaaagataatgattctgtgtacaaagactattataaaaagttccagaaaagaaaataaataagtgactcattatctgaagtggtgatatggggtgaagataataaatcttttaaagcaatggaaaatgagctttaagttaaaagataccactatggcatcctttatattgtacaaacaaatcaggataaattatactcagtgtgaagccagctgactccaaactcacgctgccagcagcatccttaatccccagaggcagtttttctctttccaaaaagaaatggtatcaaaactaaagctttttgttacaaaatcactattgcttttttaatgataatatttaatttactgtgaatatcaaataatggtaaaggaagccatgagtgtttttgttgttaccagtagtacataaagtttaaagaatggataaacactgatttacatgattttacagcactgactattttaaatgctttgtattgtttatatagtactggactgccatttagatagcattcatgattgtatttgtttgctattctaaaattttaaagctttttctctatgagaagagtaattcttgtgtttcagaatctaataaatagatggaaataaagcagattaaatattgttaaggagtactggcctcctcttctgatcttctatttcttggctcacagatgatgattttaaaatgccctctcaggtaggttgaaggtagtggcctatcatagtcttacatagaattataaccttcattataacgtaacctatgaaaattctttggttttattttaaatcaagatcaataaaataagatgttagcatcttatttcagccattctggcaattcttatatacctagtagattttactcaatagctattaatgtctgtaatagaaaagaagaaaatttccatgaaatccctcaataaaggggtttattctgaatgttaattggttattgcaaacatcagtcaaatttttgcttatcaaagaactatgcaaagttcttgtttgttgattcaaatatggtgtcctgtactcactacattattcaatacatcaataccctcattaagaaagggctttcaaagggtttatgtgtgtaagtttcaccttttataaggtacttgggaattcagatatttttagtaaacactgagaagctttgaaagggtaagacagcatttttttccaaaaagagaagcaatgactcaggggatctgggacttttttttttttttttgtcaaaatccttcccgacaagcctaattcagatgagcagccactgaaagtcactctcagcagattggcactgctgctatgcttctatagagtgactcaaatctttaagtctgttcctgttatgaaggttaagcagagggtcacatctagtatattttggtcactatgaaacactgctgaaaagagtttaggatttagaggaaatctggagtggatgtattttgtgcttggtgtaagcacagagttgtatggtctatcaaacactagcattgagataaatacagcatatgccataaggagatggaagagtaacaccaactgctgggtagagatttggattctgtttgtttgtctagtttttatgctttactttgtcttgttaggaattggtctctattttcatatccttttctctacagttcttgcgttcttttagattaattggatatttattatttcactgttacattaactttgattaaatattatattattcttttagtaatttcacaagagaagacaacatgcatcctttactcattgcttcctaacagatttgatcactttgaccactttctaatactgctagaaccttaagacctcgaaactctacttaatcccaataacaaggttttgcagctattgatggcatgcacttgtgttattcatgtaatttaaagtctataaacatttcaagcatataatttatagttacccatgggtttactaattccagtgttgttaattccctcttacatttccattttttccatctggaatcatcgtcttctacaaaaaaaaaaaaaaaaaaaaatcttattctttctattaatgtaagaggtttgatgacaaattccctcatttttgtttgtccaagaacgtctttatttcactttctttttaaatttcttttatttccataggtttttggtgagcaggtggtatttggttacatgagtaagttctttagtggtgatttgtgagattttgatgcacccatcacccaagcagtgtacactgaacccaatttgtagtcttttatccatcatgccctcccaccctttccttccagtcccaaagtccattctgtcattcttatgcctttgcatcctcatagcttagctcccacttataagtgagaacatacaatgtctggtttcccattcctgagttagttcacttggaacaatagtctccaatcccatccaggttgctgcaaatgccattaattactttttatgccagagtagtattccatcatatatatatatatgtacacacacacacacatcatatatctatacatcatacatatcatatatatgatcatacatatgatcatatatggggtatatatatatcacatacatcatcatataccacagcttctttatccactcattgattgatgggcatttgggctggttccacatttttgcaattgcgaattgtgctgctataaacatgcatgtgcacgtattttttttgtataatgacttactttcctctgggtagatactcagtagtgggattgctgagtcaaatggtaattctacttttagttccttatggaatctccatgctgttttccatagtggttttactagtttacattcccaccagcagtgtagaagtgctcccttttcactgcatctatgccaacatttattattttctgattttttgataatggctattcttgtgggagaaaggtggtatcacattctggttttgattagcatttccctcaccagtagtgatgttgagcattttttcatatgtttgttgggcatttgtgtatcttctttcgagaagtgtctactcaagtccttagcccacttcgaaagaaattatagatgatgcgaacaaatggaaacacatcccatgctctttgatgggtagaatcaacattgtgaaaatgaccatactgccaaaagcaatctacaaattcaatgtaattcccatcaaaataccactatcattcttcacagaactagaaaaagcaatcctaaaactcatatggaaccaaaaagcccacatagccaaagcaagactaagcagcaagaaaaaatctggagacatcacattatctgatttcaaactatactataaggccatagtcaaacaacatggtgctagtataaaacaggcagatagactaatggaacagaataaagaacccagaaatacacccaaatacttacagccaactgattttcaacaaagcaaacaaaaacataaagtggggaaagacaccctattcaacaaatggtgcttggataactggcaagccacatataggagaatgaaactggatcctcacctctcaccttattcaaaaatcaactccagatagatcaaggacttaaatctaagacctgaaattataaaaattctaaaagatcacatcagaaaaactgttctagacattagcttaggcaaagactttatgaccaagaacccaagaacaaatacaacaaaaacaaacacaaacaggtgggacttaattaaactgaagaacttttgtatggcaaaaggaatagtcagcagcataaacagacaacccacagtgtgggagaaaatcttcacaatctatacatctgacaaaggacaaatattcagaatctacaaggagctcaaacaaattagcaagaaaaaagccaaacaatcttatcactttcattttcgaggggtattttttattcagtgtagaattttatgttgactttttttttttttctctcagtaatttaaccaggaacatgttggcttctggcttccagtgtttccatgaagacatcagctttcactcttactgtagttcctcgctgggctgtgctggagaaccagtctacccctggttctctcctaatcctcaggcttgatccgcctttgcctttcattgcgaggtctttgttcctcagccctgaaagatgacagcaaatctagccctgtgtttcagagctcccagcctgactctgcagccttgtgccccacacactttcaaaatccagaaaatgttttaagatgagactggtcacatgctagaggccatcatcacccctgccagggttttacttctgaagcacctctgtcactgtaggaggtttcattctgctttctataaactttggcctagggcgcccatcacccatgcaggtgaacagctaaatgagtgtcccctgtggacgatggctgtgcatttgaggacctataagtttccaatttgtttctttagtcccatgaaactccaaaatatcatgtggtttatcttccttccagaaaaaactctctggatctggggaaatgctcagaattggcaaatgtccccgggaggaaaaaagcagctggtaattatctgttcacctcaaaaagcttcactccatctggaattctctccatttgtcagaatttcctgatgttttagaaaaatgactcttttttgaaatttttacaacaggaacaataacatgctatagctctccagaagtgaacgttcctcagtttgttttctaaataaatgaatatgaagttgtgtcatttaggaaacatggtgtcttaagaaaacttggggaaaataatcagttgacatggtagcgatattcttccatcagttaaatgttgtttcctgatctggtgacattgttttcagagatcactactgtatgctgagtgtgtgccaaggaacataaatatgaatgttccatgtccacactaatgagactgaagggaatgtaaccagcacagcacacactggtggaggatgacggaggagctggcacacactcctggacaaacatagatgactgtggtcccattcagaaaaagaagggaagaggaacatggtacaggggactctgatccttagcctgtatcagatcctagaccacaatagttgggttaagcacagtagactcacagctaaaagcatatcttcttttgagaattgtctactcatgtccttagcccactttgaaagaaattatagatgatgcgaacaaatggaaacacatcccatggactcttgggccaggctgccaggatctgtcattttccatgtggctttggccagattacctgactgccctgttcctgtttcctgatctgcaacatagaagtacccactttacagggctcttaagagctgacgagttaatgcctggaaggtgcttacgaaagcacctagcacacgtgtagccaaagtgttcactaaataacctgatttcatgcaagctcccaccaccctgctttcttggctcactctgctgagagtagaagcaatctggcttccacaagcatctgcccaacagaatttctcatttccaggccattctgatgcagccctaaagaataaaaaaaaaatacccttttaagaggcccactctgctctgcagctcactctctgttatgtctagaaattgctttagggactgagtaaccatagtcctcttttctacccttaagctcttctttcctctggttgtctgtaaattcaactggggaggctccttttactaataaccagctccagaactctagttacagactctgaatatgggtttgaccttcatgctgtaaacatcatctccttgatcccagcctttaaaatcctctttctgggggaaacagtaggctcaggtgttggtgttagaattgggcctggatggaacactcactccctttgctgctttcaagtgactgttttctacataagtgcataaccacttgtgttctgttttgttttattttctctcattttaatggagagggttgtgatgagatagaagaagtgctggaacaaagtagttagtgctttggaggtaggatgagtcatctcatttcctctgaattctccccagtattcctattcggatttccagaatctcattttttttttaaaccagtatacttccttagaattgccagaaaaattgatatctgcaatgtccagctactacagacttctggcggctggcagaagaagggtgaccccagctacatagccagcttgtcttgtgccctagctgaagtcagggggtaagcttggtctgcagggtgtctctcttcaggggccatagtgacacaagatgatgtagccaatacagttacatgttttgatgctttcctgcaaaggcccataatgttcccatctttgagggctcagcgtctgagagtacacagttgctaatttagctcattgctttgtctcactgccaccaaatagagcaggcaggtagatacaccaaagaggcttcaaatattctcaagcacagctagcccgccttgaatgagctcattggatattttagtgactgccttttggaacacctaatgcttgaaaacattttctacatgagtgtggtgtgattgtgtattgtctatgaacggaccctcatgagtaggggtccatctttgggtccatgccttatggtcggaagtgaggtcatgtaaccctaatagtcatgtttgactattaactatgtggacagatggaggagcagctccgaggatggagtgacgcttgaggaagctctgttaataggagaacatctattatggatagaaattaaatgaagagaaagtacaagatgccataagaatgtacacagtaatcgagggcataggtcaagcagacatttgattctttcttgtagcctctggaggtgcagcacaccttaacactctacctagttcccaatgttttgttgcagtcattgccttaactcagcaattcacagcctctctagcccagtgctgtttccagaggcagcagtgcatggagattgaggaaagaggctgcctctttcagcaccagtcctgcccctttgtatccaggtgttgctatcacacttcatactcattcacaatatttggtgctacctgttttttctgcccctcttcctcccacaggtaatccatcagctgaggctctcagagaatgaaagtgtggccctgcaggaactcttggactggaggagaaagctctgtgaggaaggacaagactggcagcagatcctgcaccacgctgagcccagggtgcctcccccaccaccttgcaagaagcccagccttctgaagaagccggaaggggcctcctgcaacaggctgccgtctgagctctgggacaccaccatttgatgtggcctgaactgcagacttacaaaatagaactgcctactgattccgggctgcaacaacagaaggctgccttctgacatgcgctggggcttctctccacgcatttagacaaaaaaagcacaggacacagacactaaatatatgagatcccgtgtgtgtgtgtgtgtgtttgtgtgtgtgtgtgtgggttctttcttatccatctcgtggtgatacactctgattttcaagctcctcatttacggctctgtgctacccctaggtagcaagagagaggctgggaaaagtgtggacgtggccagagcgagagagtagcggaggaaaggagcaatccatgcacactctgtacagttgtttttctacggttcaacagtctgtttattgtacttccaatggttttattataatacagtatacgggacatatattttatttctttgtagctacttgtgttttattggtattataaacctgataattatttacatgtttattactgtaattttataaatttatgcaattggtggtgcttcctttcttcaaaatacagattttaaaaaatcatttctagattatttttttcctccacagtccttttttttcacctaacgcacctaaatcttgaaactacattgttgttttagcttcgccagtgtcaccccttgcaaaactatgaattgagccccatgttttaggtgttactcatggatgaggaggctgttctttcctatgccctgtatttctggataagtggattgtgtaccctttagttaaatttcacctcccgacttcagcatagatcacaggaaatcacatggcacacggttaaacacgtatggcttcaaatccatagccggtggtgtaaaatgatcatattcattcaaaggcctacacagtacaaatgagcacgctgccatgtactggtttgagcagtaggggctgcatcgcacagcgctcgtcccccgggacttacactgcatgattccctcactgtatatcctcaaccctcccataatgcaaggccttgttcattgatgtgctttcgtcggctgtcggaaagttctgagcagtggctccagaccaccttgtcttgctacttggaactttttattcataccagcctttgaaaagttactgtgccaataaagaggtacaactgtgttcttctattgtttttgttgttgttattattgtctcccatgaactcttgtgttttctggtcagagaagtagggacaatgaagtgatctcacccagactcccttaatgtgggggccatagcattgtgcaaactttagacaccaatgatgttttacaatacaggctttatgatgattccagtatggtgagaccaacaggtctggaagggagtcccattgaaaagacggcttgtcatcctcagaaagctcagagaagaggacacatagtgccatcagagggccacaccaaggtcagccaggaagcagagggcatagggggagccttttattttagtttgcacaacactaggaaaggacaaggcaggatcagcaggcatagaactgactgctttgagaaatatcggtgggttctgggttagcggagccatccctacctgtctgggacctagccttgaggtgattagggtgggtggagagtggcctggaatgacagccctatgagagcccacaggggagacttactagggatgtgggctctagattggttgacttgtctttgaaaatcatgttctggggtgagtcatcattatcttttggacgtggctaaccctggaaatggcaattcctccaaggtcagcagggccccagatgccaaagcatcagaacacagcaaataaaagcacatggtcaatatgtagttactgcaatgttactgcagccacccagcaaccacaaggaagtgttctgcctgacctccagcctgacgacagccgagtcccattccctgcctatttctctcatgtttttcccttctgacttccacccccgcgaagaagcaatggaagaagccaactttcccttgatacatggcttcttgggccatgctatggacataataggcacttaatgatcttagttgaattaaaactttgaattgcattctcctccccacaatatatttaggccagggtgaaaaataaactgtttaagcattgcacattgcaagaacttgcttcaaatgttcactgagcattgtgctgactgtgcgaggtgctcagcccatgtgattcctaaactggctattttggttagggctgctgtaacaaatggccatcagcagggtggcttcaacaacaagcatgtattcccacagttctgaagcctaggaagtccaagatgaaaatttccacagatcccgtgtctggtgagggcctgcttcctggattgcagatggccatcttctcatcgtaccctcgcatgttcagagaagaaggggaggaagcaccctctccggtgtctcttcttataagggcatgaattccatcacgaggcctctgccctcatgacctaatcatatcccaaagaccctgcctccaaatttcatcatactggggatcagcgtttcagcataggaattctgggaggacatagttcagtccacagcactgacatatgcctacaaggtaatttttatcatttttgtattgatactgaaattgaagcttatagctt

SEQ ID NO: 386 - DNA, 93462 bp, Homo sapiens
  source 1..93462: mol_type = genomic DNA
gagatgcacacatgcacacagaaatgggcatgcacatgcacacagatgtacacacatggatgttcacacacacacacatgcacgcaaacacagcccctctgcagctctgctgtctgcctcaggtgggggccatgctgggtgaaactgtcatttctccctgtctataagctcctgccttgaggctatgaagacaagaggatgtgaactgctctctggaggcagaagacgtgggttcaaatcttggctcttctctgggcctcaggtttctggtctgtagactaggatattggagttttactcacgttactggagggatgagggccctaaatcaggagctgggaactggtgcatggtaagttgtgggagtggaggactgtggagaaggacaggccttccctaggtgaggtgctactactgtggaaagtggtctagtttcccctctgcccctatgggcacccagtggaagaagctggtggtcagtgatgggcggactagtcctgaggtcctaagactggagtgtctggatgatcagtgtgacctctcagagaagaggtgcacacctaggggtctggctaagggaaggggagggtgtcagtacaggaactgcagggactaggtcaggctgggtacacagaggcaaggacagggtcgtgaggctggtgcttgatgagaaaagctcagtctagacatctgggcctaggccccaagaagagtggggatcaggccttcatgggtggtgttggagagccctgaacaggatgtgacttggtcttccctgtggagaactcaggagactagctggaccattcaggtatttaaggagcaatgtcagtgtgccaggaactctcggggagcttatatcccagtggaagagacggctcacctctttgagctttctggcaaagtcaagggtgctgagtgctgtgtcagggccatccaaaggtcctgagatgagtgggacttggaggaggtcagtcaggaccagcctcgttgtgggtgttgaaacacaggagtatctgtgtggaggaggcctggggggctcctggcagggagcggggcgcagaggagcacgaggtcctcaaggttctcagtggtggcatcaggagtgcccaggtcaacttgtcctgggcagaggatgggttcagaagagaacatcggctgtgtatcctttgtatcttccagaggtacacagccctccccagccgccctccaacctcaggacaaagtgtgggtgtgcgtttggctcctgcgttcccctgtctcctttgtccacaggatgctcttggctgccaggaggttcccactcctcatctttccaggcccgggtcagaggcactgaagtcagaaacagaggtggcaattccaacctaaaagcacaaattacagacaagtctccctcctgcaggtttccatttgcatctggcttttgtgtggcactagaagagatcagctttttgcaagcatggggctgatgaacgcatttgcacaaagggagacggcggagtagcaggagtttgcaagctgcttcattaacttggagccagtggaatgtctgggatcgtctgtgatttggaaaccggtggcagaatgttcccgcgtttctggtcctcatcagtcaggtaggttgaggggagcccaagacgagcttgtggctgcagcgagggtgcaggatgggtacacatctcggtggtccagctgggtctcagctaccttgaatctgacccacgggctttgtgtggtctcagggcttgtgtgtgtgtgtttggtccgctgtgtacctggtgtgcacacattgcctgtcacgtgggtctctgttggaagctcttgcccgtcggttcttcatgtggtgctgtcggacatctactggtctttgagcctccaagtctgtgttggctgctgcaggtcggggcctgggactttgtgtaccagtgacgtggccccactgaggccccgttcctgactcagccatgctgtcatggccctcagaaaagatctatcatttctttgatcctgtaaaacaagtaaattcagtcttcctgtgaggcacggtgatgattcactggaatcatcccagtgtgtaagggtacttcctcctgccgggactgccaggcgggacggcttcctgcagactcagagggtccaaggcagggtttccaagcagactttgcagctggatgagaggaggggtcagcgcacctgcttcatacagagactgatgtgcctgggcccaggcaggcccgtgctccaagcaccctgttcctcaggtgggacagcctcatcttctttttcctttttttttttttgagatcgaatttcactctgttgcccaggcttgaatgcagtggtgtgatctcggctcactgcagcctctgcctcccgggttcaagcaattctcctgcctcagcctcccgagtagctgggactacagatgcacaatgccatgtcctagtttttatattattagtagatacagggtttcaccatgtttgccaggatggtcttgaactcctgaccttgtgatccgcccgccttggcctcccaaagtgctgcgattacaggcgtgagccaccatacccagcctgacagccccttctttagagccggtgcctcgggctcccaggctcggggtggggctcacacccctcctctcatgatcttgcttatcccttggggtgggggggggacctgtgtcctcccaaccccaagcacacagctgtcaccccaggtcacctcctctgcctttctcccagcaccctgcatgctctggcctgggcagccccctccccctgtgcccttggtggcatttgcatacaggtgcccttgcagctgaagtgttggggcagggccagcaaacccacgcccgagagggccagtggctcttggcacaggtggtgggacaatggccactcagaacacggctgcgctcccctgccgcctccttggggctcacaccttgctcggtttagtcgctgtctgagccttagttcctggtcataactgggctgtgcggggcttggggcctcatatgaggaggaactgatggcctgtgtgtgctggcagaggaggcggtgtcatcccggcgggtctctgcagatccactgcacaaacactgcatgtgtgtatgtgcagtgtgtgtgtttatgtagtgtgtttgtgtgtctgtatatatgcgtgtgatgtgtatatggtgtgtatgtgtgtttgtgttgtgtgtatgtgtgtggtgtgtttgaggtgtgcgtgtatttgtgtgtctgtgtgtgtgtggtatgtatatggtgtgtatgtctgtgtgtggtgtgtgtgtgtgtctgtgggtctgtggggtctgtttgatgtatgtggtgtgtgtatgtgtgtgtctgtgtgtgtgtgtggtgtgtatattgtgtgtatgtctgtgtgtggtgtgtgtgtctgtgggtctgtggggtctgaggtatgtggtgtgtgtgtgtttgtgtgtgtctgtgtgtgtgtgtggtgtctatatggtgtgtatgtctgtgtgtgtgcctgcatgtgtggggtgtgtgtgtggggtctgttgtgtgtatgtggtatgtgtgtatgtgtgtgtggtgtgtatatggtgtgtatgtctgtatgtctgtgtgtctgtgcatttgtggggtgtgtgtagggtctgttgtgtgtggtggatggaagggcctcccggggctcttggatttggagggcccacgctgctctggcctgggaaggtggggttatctggagggtatattaggctggggtcctggggaaggttctggggctctaggcagagctcctggtcgggtgcaggcacatgggcttgttgggcagtcccaggccttccaggctccatggcccgtgttccctgttgttctggtgggtgtgccctttaggcacctgcccagggtcccctgtgccatcccagctgccccaacactgtgtgccccggctctgctcctggaccccacgccgcgtgccccggctctgctcctggaccccacgccgtgtgccctggctctgctcctggaccccacgccgcgtgccccggctctgctcctggacctccgcatgcctcctgctcactccagggcagaaacctcctgtcctggctctgcctccctttgaagcctagcaggggacccctctggccctgggtctgtccctcctgagctctcatttgaggaaggcaccagtgaggcccttctttggctcagatccagcctttggtgccagacggtccagggcgtcagtcccagctttgtctgggagctgcgggccctcgacccttctgagcccacctacaagttgggaacaacattgtggaccctcaggggactaaaggatgaagctgccctgtgcccggcaccaataggagcatcctcgttcctcctcctcaggggctggacccatagcttgagtggcagtggggacatccaacctggcttcctcagtggggtttggccatggaggtgctcagggtgtgcttgttggaatgatgggggatctcgctctgggatctgtctcctagaccctgtccagggctccagctgccccttccctctctgggctcccagctgggatgggagggccttgggcacaggctgtagagcccctgtggtcggctcccacccctccccagagtgctgcatgtgaggatggggactgcctcactcaggaagccatcctgtcatcccagagtgtggtgttggcctcgaactggctcttgatctcccatgtggggcatggctggaaccatcccagggtcagtgtgtctcaggctccagcttgggcatcttgggacagagactggaggggtgtttctcccaacatggccaggccagcgtggctgtcatccttggacatcagtcagcagctggccagtgcctaccggttccaccaagctccattcttgggaatgcagggcccggacattcagtccagagactttccctcccggggctctgctgggggtgcccctccccatgagcccatcttgacatttgtgagccctgctctgtctgctaatgagcgatcttcaccagtccagcctgccatggcaaccgcccgcagcctcgctctctgtccaggcacccggtagctttatctccgaggccatctgttctgggagcacaattccaaagccatttaaacagagcctggagcagggcaaggcgctgggccctctgtcctcacacgtgtctgtgcacacactcaggcacacacacgcacatgcacatgctgatgtggtgtgacccctgcagggtggaaggtgatgacagggacagtcagggtgccccaccggctgctcccttttcctgctgtcaccgagccggttcctgggcaccctggtggtcggccagtctgtgtcctcctctctttctctgtgttcctcacctctctgtccatctgtgtgtctgagccggcctggtttctgcctcacctctctgcctgtgggccacctctccctctccatcctttgtctcctttcctgcccctgtctgtgtccgtctctgtgtttaatcgccttgaccctggtccctggaccccctccctggccattgcctctgtttctttggcctttgtctccagctcgtatctctcctactggttcagctgctttttgcctttggctatcgttctgtgctggtaggaccaggacatcagggggtttccacccctgcctcaccctcttggatgctcctagaacagtcaggcaggggcctgtccctcactgttctcctggtccactctgggcgcacctgtctctcctccccactttcctctgcctcagggtggccaggtcatgaggcgggtgggggggcgggggtactttctcgtactgctcttagcttcctgggcccagtgcccagggtagtgccttcagcctgagcttcttactctccaagcccttcactctgagctcctccctctgagcccagtcccgctgttcattgaatgtgcttccgtttcccgccctgcggccttcactcatgctgtgccctcaccctttcctggtcaggcctccctgtcaggagcttctgtctctctctccacagggctggacagatgcagcatcctgggctcagcatggagcctcctggcttccccaaaccacgcatggctgagcttgcagccttgttcagctgaccctgccctgcaggcccctctgagctccacagagcgttgacaccagtctgacttccagggggatgggaaggaagcccctctgcagctgcttccagttcttcctgaggcctggcctaggctgcccctgctgcagggagctgtctcctctggtgccacagcagtcacggtgactttgccttctcctgccggtgcccccagccctcagctgtctctcctctgtctttcctctgtccccacatcctttgtctcctgggctgggctgttgctgaggctgctgtgagatgcacagatccccaggacccttgggctggccccctcagaggcttgagggcctggtgacctgggtcctctgagcagcttctgtcctccaggtcactctgctgtttcagcatccccacagcccagccaaccccctaggatgccgccttccaaggtcatggccctgggtcagggcagagcaggcagaggagccgtatgggcagaccagaggggcttcataggtgcccctgtattgggtgccctactaaagcagaaaccagtgccagcctagacagcgatgaccagcagcctgtgacctctggagcccgggatgtgtccggacatatcacgtcagcccaggtggcgctgagtgctgggaacccagctatggtgggtgatgtccagacggcttcccttgggtcagctgcagcccggcttcctgttgagggcagggaggtacagtggctacacgcagccctgagggaggctgaggtattgccaccttcaatagccagagctgcatcccacacacggggctggactctcccggctgtggggtgaggctgggccgcatggcctatggcaaatgcccctcaaaccctaatgcatccacggtcaacctggtgagttctgactcagcctggccaggttcccctggagctggccccctgagcacgtgttgagttggggtgggggagctggagggcctttctcgagcagaacttcagagaggagcgctggccctgtctttcctgattctgaacgtgtccaagtcgtttcatcacgtgatggattaccaggctggttggttctaccgaaaggcagcagcacaagcttttcctggatttctcaccattgttcctttaaataatcagtcttaattaactccatccgaagaacatattttccccaagggtagggagtcccagtcaggtggagcaagttggaactgcaaactgcatttgatagctgtggtgttgggaggagccccctggctactgcgaggggtgtctccgtgatgggcgggcagatggatcagcaccaacccctgctggcactttctgacatttctgttgccctcatttgatagatcgggaaactgagtcacagaaaggtttggcaatctgccccaggtcacttcccctaagcacagacgtccttgtggacgaggagaagaggcagaactcacaggggaaaacccttcttccacacagcatctgctgtggccagctgcccccacctgcccctgtccccacctgtccctgtccccaacctgccccacctgtccccgtccccacctgctcctgtccccacctttcccatctgcccctgtccccatcctgtccccacctgccccacctgccccacccatccctgtgcccaacctgccccacctgcccctgtccccacctgttcctgtccctacctgccccacttgtccctgtcctcacctgccccacctacccctgcccccacctgcccctgtccctgcctatccttgtcctgcccacctgttcatgtcctcacctgttcctgtcccccacctgcccctgtcctcacctgccccacctgctccatcccacctgtccctgtccccacctgtctttgtctccacctgccccatccccacctgccccacctgcccctgtcctcacctgtcccacctgcccctgtccccacctgcccaacctgtctgtgtcccccacctgcccctctggtccctgccaccacctgccccacctacccctttcccctacctgccccacatgccccacctgtgtcccccacctgctccacctgccccacttgtctgtgtcccccacctgccccacttgtctgtgtcccccacctgctccactggcccctgccaccacctgccccacctacccctttccccgacctgccccacctgtccctgtccccacctgccccacctgcccctgtcctcacctgcccaacctgtctgtgtcccccacctgccccactggtccctgccaccacctgccccacctgaccccgcccctcttctaccttcctgaccccatcccctcccctccccctacttgctccacctgtctcaccactgccatatgcccctcctggccccacctgtcctacctgtctcccctgcctccaacctgcccctcttttgccccccacatgtcccccctcccccctcctacctccacctgccccacctgtctccccacccctacctgcccctcttggcctcccacttgtcccccctgcacccacctgcttcctcctgcttctcctgcacgctcaccagcctctgagcaccttcacccctcgatgttctctcctctaaacaagatgactcaccatttatttccagcctaatctctgcccccagcctcagcctccatactgtcacccttgttgacggtgtcacctggtgactaacaggcgctcagacatcccagcagagccagcaactcccacaaatctgccctccttcagcgtctccctctcagggggtgctgccgcccacctcatggctctggccagccctggagtctcctgtggcctctctgtccctaccacatccagaccctcagcaacccgattcattcctgagggggtgtcccaactcgaatgcaattcgtcacttctcttgggacaccctttaccgtctattgccgcccagtagcactcaccatagacctcactgaagatgtaaatgttaaacattttgctcttggtcacccagctgggaggggccggtcaggggtcagtccagatctgcctcctccaaaggtttgaaccctccatactccgggcctccccctcagtgctgccctggatgggagagactagcctggacttggccacgtgttggtagaggtaagccagcatcacctgggcctccacctgtcccctgcagggacagacacctgcagaacctgaggaccaggaggtgaccctgagctgcctggggtgatgggagcttccctcggcatcaggggaagctggcccagaggacagccgggctccatggtgaggccaagttcatcgtttcaaagggcccctgtgggcagtgaaaggtcgtgggcccagttcgagggactaggaatcattctggaagaggcctctgcagtgcccaccttcactcccatccacacaccctgcccctccctggccctggcgcggctgtagctgctggaaggtccaggtccttctgggcagccctctctccctgccctttccttcctgcacaccccaccctctgcctgcagggcctgaggttgtcgagggattcttgacttctacagtttgcctccccctggcacctcccaccataccttgtgcctgggatctggtggtggggagtcaaccacaccagctgagggccctcaggggccttgtctcaacaggcagtgattgggttgtagggagcgagacctgaccccactcatgcatcctggctggttccccaccaggtttcaggctggacctagtgtggcagttccgagagaggaagcgggggaagggatgcatcttcaggaagggccccctcccctcactcactgtgagtccattactgtgtgggaagggctgtgtctctgcctcccctcactccccttccctggccctgcggggtgggggagagattgtctggggcctgagcccattgtgtggagaagagagcctcattggcaggcagccggggcatcaatttgtgattatctgctccctggtcttgattggctggatgcagtggggtctccccagggccctgggacacaagtttgtgcagcaactttttccagcatgaagtgacgtgtgttcccagagagaaggtgcaccccctggccaggatgacgctctgcgggaccttcctgggtgcgtaccacccccagcccctcgcgtccctccctggtctgttcacaagtttctgcgaagatgccaaagggactaattagctgtgtgtgtccccccctcagagctcagtgctcttttctgggcagccaaggaggtgacagacatgctccctcctgaacaatggccagggcccctggggaaacagccacctccccttctagcggatcccgtggcttgcagaagtgctgacggcacagagccctgtgaacgctgccctgcagaaggttggaggtgggagggcggtgggcagggtgtgtgcagaggccagctgggccttctttctgttgatttacctgcctggatctgcctggcaggccatatagctggtgggtgtcaggagcccttggcctggagcaaggctctgtgagactctgtgagaaggtggcagagagaatgtgtgtgcgcgcgcgcgtgcgcgcgacagatgtcccctgggacttaactgtagctaaggggctttggccagggccgctgctgcttgcgtcctcatcacactcaaagttgctgtgtgtgtgagtgcacgtgtgtgagtgtgcatatgtatgtgagggtctcacaaactggatgccaaatgtttgtgagcgtctgcgtgagtgtgagacagaaacacaaagtcagccccgagtgtggcggagagtggatcccggttttgtttgctccatctgccagggccggcctggggcagcacccccgccctcagctgttctatacaatattaatgctcaccatctcggcctcacacaacggccctaattgtcgtctgcagcattaaggcaggcgcccatctgcggggaagctttcagaaggaaacaagaaaaccctcacccccagctggtcaccggagaaggtggtgccaattacagatgcagaaagtttagaccaaaattacttgaaagagtttttatgaagcaaatgaactgacacttggaatgtctgtgtgcagatttgcacaagtaattacactttatttgaaatgatcttaccagctaagcgatcattaagcctgctcccccactcacacaaagcgctttctcagcgagtgcggctgcggcgtaagtttggttttgcaaatctcccgtttccctccccgtgtggagtctgaggacccgccagtcagacaggagttatttcctggtggatctttccaaacatattattaaaaagtcacatgtgactttcccacagacttttatgaaataaaacccaaaggaacagcgtgcaacatgctcagttatggaagagaaaatattttatgatttcaaaaagtcctgacaaattttcaccctctctaagaaaggaagcttaagactataccttgctgttgtcacttacaagcagggatctgttggggtttggaattctctgtctcagcccggagcccagagttcagcgatagctgaatactggtgcgagctcagaagcttccgtgtgcggagaacaaagactgaggcgctctggggggagagcgctgtccgaagtgctgatcagacttcggatccacccaccgctcaggccgcctcccaggggctgaagggcggcagccgaaccggagagacgtgccggcggccgctcttctgtcctgctcttttccctggactcctttgtcttgacggggtcagctaaagacttcgaacctttactcatcaaagctcatcttcggaaactgctcatagcactttaacctcccggtgggagctcccagggcgccctaggtcctgccagcaggcaccgatttcaagtttccaggcacattctgaatgctcctcctggcagcgccacagagggtctgggggcccattcccgacccccggagcgccacacctcaggaggcctgtgattgttcaaaaggggaagtgagaaatgccgaaagacttacgttttcacaaatacaatttctattacctgaaaaaactgttgtgccccacgaagcccgtgttgcgcaggttcatctctcctgctgccacctccgcttcgctgtggtttcttaggtgtgactgttgcatatctgaattaagtcgctttcatgaaaccttgggtgtcgttgggaaataaggctgattcagcaacggccctccctttgattctgtattcatcatggaacaatggcccgcaagcctgcccggagcctgcagcctgccgataagagtttaatagaatttctgaatgccgaaggtttggggtgtaagacatcctagcactcacagcatgtccagaggagacagaaacggcttttcaggagtgctctcagctgaatgtgtccttttatactaatggatataagtttatgacagaaattaaaaatggtaggcagtcattgtggaaacctcgaactgttctcatttgactaattaatatttcatcctcagtttgaccagtgcaggcttgcatttatgtccttgtgctcaatctgaacaattgctctgtgtgcattttgtgttttatttgttgaggataatgtgtgcgtataagaatctaagatacttgcctttggggtgaagcttttggtttgtatgtaacgtgtaaagcacaaactgtatgttaaaaataagccactaagattttcaaaacatgctctcttagagaaagctgtgttcagttctgcctcagtcacacttttggtggcccgagccctttagcgctaattaagttggggtattgtgctcttgcataatttaccaagaaatgatgtttactgtctgttgaaatctctgcactgaacttctgagatgtgagttttctgcttctccagctgcccttggacggcggcatctttgcaggcgtctcacattgagttttcacccttgtgtttcacagtttcatttctaacatcctgattatgataatggacaatcgtttgcctgatttatcagtacaagaaggagatttgggccgcaaacaagaatactctggctcttgagttctcttactgaagaaattcccactttatccctgaatgtgggggaaaatatcacaaactggcagatgagaaggcagacagtcaggctgcatagagagtgggtgagcacttctattgtgtgtgttatggatttttctcttcttgattttcactggatagctcctttcaggccgtttataaaagaatcaggaaaagagcagaaaacttgggcagtgtgcttcgctctggttgcaataaacttagtctttttgtgggggggttcccatgcccaggaatccctgagttctctttgggaaggtttttattattgtaaaaattaaagtgaaaagggaaagtgtgagaacagaaaaatgtcttttcctgatctattctttgtgtgcatgactctattttttggtctgtggctatagttaccttttatgccgttaaaaaatacatatccatttaagtcaggggtacttgaatatgcagatgagccgatatgtaatattcctggttcatttgagtaataaattctgcagcccgctctttatgatggtagatcatattcctcaccaccaataaatattgtaaagtactttcgctgtagccatgctaacccggggcatctgtcattccggttgctgctattaggaattattggactgaaccactggcagagaaagcagaggggggtgaatgtggtggttgtgatgctctctgcccttttgtgtgttttgctttttaaaaaaactcaatcatgctgcacattgagtatgaatcagtgtggacaaacataggcaccttctgttggccgaggctcagagcaggacacaggactccaccggactgggacacctctcacccccaattcagcagatccatctttctgatgctatactgtaaatttatttcacctcagagagtaaacagatatattggagccccaagggttcatgggtagcgtatttacaaaggagcctcctccgccagcccgtgccaccgctgctaatgagagcagtcattaagtaaatgagacgtcgcctttagctggcttaggagttcgcacactaaggggagaagatatttaattgaaacccgcacgcaggcttccccacatgtgaccgctgtacgggaggcagctgccttccctctcctcccccagtccaccctgcaccccccatgtaaatttcatgattgctttccgtgatgtcattttgaaagaggacagacaatagctgtggggaaaggtaagtcaacgttacgttctttctgacaaaggcagatacccaacgcttggcttttcctcttggacagagacagggagagggcgcgcgggcagagttaatttctaagatgaaggctctgtttgcaggaaaagcaggtctgaggatggctttttgaaactgctctggaggacgggggctttcttctcctccctggcctgccgtgtgctgtttttctcctgtctctctgttgttcatgctcctctgagattccaggggacatgttgtgcgtctgacagaggagacattaggggaaggggagcgcatatcaaaaccagaaactttatgcgcatttctggaagaggaacaacggatatgtctgtggccgtgggacccagcagccccgtacctggggagagcactggccgcttaagcagaagacctctctgaagcagggtctcagagtctggggtgtgtcatgtgtgacccccacccaaggtactgaggagaggtgctcacgtgaacgttttgtctgcatgtcatgcatttctcaacttaaggatcaatatctagggtgcatgcgtctgtgggatagatgtgcagaagtaaatatcggccgctcctctcagccccttttttcgctacgtgtccgtgcagctgtggagtgtggttgtttatggtggtagtgtaactggatttttgtatttaaaactaaaaatcagggttagctaagaagttgaacaccctaatgccattgtctgtagttctggggccgtggactttggttctgtctattgaattcactttcttctctataaaccaggaaaataaacaagtgctggtggctttgtgttggagtggtgggttctcactgctcctcctgagtcaccaagggctttgcttgtctcagcatcacctttgaatcagtggacaccattggctggtaaagttgggtgtttaattttggaaaccaaacatttgcggtggtgcggggggttccgtggctgcaggtgggtttggtcctgggcatggactctgtcacgatgatgataatggcagcgatgattataattatccttttgggagaggtcggtggagaattttgcccttgcagtttttttttttcttttaaatcacagaaaactgaggacacctctaacgccagtggctgagtgcacaaaaggtgggagggatgtggggcagacctgggggggcccactcggtgctgaggggtatgctctgcctctgtctcctctgaggtgccagcagagcctgtcctggcctcactctggcctggggagtgggggtgctgtatcctctacagggctgactgagggaggctcccctcggcccccagcctccctgccaccccgggctcccctcccattggtccttggctgtgattatcgcctccttccatatggccctgttaattaacggtaaacaaaagagtaagagagcagggattggagtcctgtggtaccagccagggtgctgctatcagtagaggcaggaccctgccctgtctccctcggtagctgttccttgtgcagaggaggctgggtcagggcttagagggcagtttgttttcaaagagaaggaggcagtcttatggattcttctgtcccgtagagactgagactcctacagggtccccccgaccccctgggcacctggacgtttgccgaacttcccaggggtacttgctgatccaggagcttgagcaggagccacagagagttggacaaagaggcctttctgctctggaacagcctcggctctgacctccttgggccatgaatccctgaagagggcctggtagccctcttcagagacccgaggcaggggggctgcttctgtccaaagtgccactcgagggtttttgtgaccctcagccattgcccacagatctggaggtagcctcagttgttcagagctaatgctctggcccctcttggaagattctggcaaaggcagtggtcacctactcccttgaatgcccctggtgcatgagtggggaaacactctctgagatgaccccttctagccatgtgggatgcaaagttgctctggtctgggggttgcagcagcctctacttggaagctctgttagtgccggagatgtcagggagaggctggcagagggtatgcggccacgggggtgcatgctgggcagctctggcagctgaccaacggcagcctggatggtggctggagcttggcctgtccctgctgtggatgtggtgggcgctctccctggtgctgctcagagactcactcccttcctctctggcctggggtcactgaatgtgcagacaatgacatttgtggtggtgtggtgggtagaggagacccacaccactctgcactggggagacaggggtcagagcctgactaactgtcttcctggtgctgctcagtctggtgatgtctgggccgcttggaatgccagtttgcacaacccagtactgtgcagagagagcaggagaggttcctgaagactgacaaagtgccagagagaaacccggggcctccagccgctgctcggtggcagtgggcgggctggtgggggctgagctcttcctggacggactcagtgcaaaaggtgcgtctactttggaaaagactgagcaaggcttgtgtccacccagtccctctgtcggggctcagggtggggatgagaccgggaacaaccagaacactttggtcagcaccgggcctggagtagatgaggaggtagagaactgacccagctggtggaacaggggtcaggaggttagctgtggggtgggtgggggctgctggcggtcacctgatctgcgagcaggcagggtactggacggtcagccagactttcatgttactcaggcatcttgaagagtggatgctctgcctgtcccaatgctggaagacacatctcagagcccctcttttgttgcctgttctcttgtaggaacctgggcgggagagtggagcagggtgcccgcaggggctgggggggctcttctctttcttcctctctcccatcttcctcatcttagatcctccccctctgcattttccgtgtgaactccctcatgaataaaccagaagttagttgtctacagatgtaattttaacaggaatgttgtggtgtgagtttacaggaaaatggtctttgggaaccagcatcattagattagtcagaccgagaaacgccgtgtttcccagaagggaagagagcagtggctgccgtgctgctcccccgtgggcttcctgctctttggggactgcgggacccatccccgctccaggacagccccactggggagcccactgcccagcccggagtgtctgctggaggcctggggggtggaatgtgctttcacggcctcttgaggttcccggcatttttctgtctttcagaccaaatttccccaaacatcactttaaaaaactcaaaacaaaaatgagcaagaggaatttcaccggaattaaaatgtttttgatctcaggcttccacggagccagcttcagagagaagagattaatggatacttgcaagtggaaagtgtagtttgaaaatgtcttcctgtttctcttcagtgttactggaactaaccagatacaagtgtggagtcttttctccccagggttaatgccattaggagcgttccttgtgggaagattggtttcacccatcacttcatccttttttttattttacaatttgcacttaaaaatgcaatgttattttaatcgggaacgaaagtaactcagcgtgctttaatctgccctggctgagtacatctgccttggccaggattggagtccaggccttgcagaggagagaggatgtcgacacagctgtgggtgtctgtggtcctcctgccaccccttgtcctgcagcaccggaagcctccactcagcagccccaaccttcaagagagtgactttgtgctctggcaactgagtgtgtggtttgccctggggttgcttggagttgattggatatgttccctgtgccttggggtttatttgggactgtggcctgggagcacggcctgtgccaggagggtgcaggttggatggtcctcaggaagtaggctgcagcgctctgcaggagtcagggtggccaggcaaggtgggggtgagcactggggatctggatgctcgggaggaaaggtggaggcaccatatggcctgagctgctgacagatgagcctgctggccccacctctctctcacgcctggcttcacacctccatcgtgttcaacactggtctgagggctggggcagaagccatctgggtcctcttctttttttccattttgctgcctgcaatccacacatcagaggaggagcgtgagaagagggggccctgggtcaaggcggttggagcctctcacctggtcctgggggaccctccatgtctccctcagggacccacagagctgccagtggctgacctgtcctgcctgagtgggaggagagtgggagtttggatgctccatggtgcaccaaggcctgctttagaaggccctagaaggtccctgagactctcggaccgcaaactgacagcagcaggtgcctggggtggcctcccagtgagccagagccacagacccgaggcgcgtccccaatcccggtgtgcgcctcgctgagctagcttgtcaaagcgcttgggtctttacacctacagggtttttgggttctgaaaatcaaatggctttagcagtcctgctctgtgggcagccaaagtggctcctaactgaaggtgctgcccattctttacaagacttagagctgggggacaagttccctcttggctctgagtttcccaggataactgccgtcccagggagcccggggatggttcagagcagcctcccagttactgctgactgaatacttggttgtcagtcgctcgtcagcatgtgggattgtgctcaccctgcccttaccaaagttttgtttagggaaaaacagagatttgaaattgggacgacttactatggttaacattattttcattgagactgggccttaatcttcgaatggaacaaaaaatctgacttaggtcgtaaggggcagagaaacacgtttgacgctgttattttaatcgttgagaccgtgctaacttgttcagttctcatgaacgtgttctgtactggacactgaggctgggaggcaaattagcttcccaggtgagtggtgtagctcgaatctaagatctttccagcacagcctccctcacagtcccacccagccccacccagccttcctgccgagtgccccaggctgccatggaggctgcccgcaggccacagtatgaccctcactgccctcgtgtctcttcctcacagcctgggacatatctagagcctgtccccagcataccctccaaccttattctccgtcccaaactgggttgttacccacgattcccaaacatgcctccctatctcccttcatctcctgcagctgaatttttgcttctctttcaaggcttcttacagatgccaccccgggccctcctttacttacctttactctcacgtgtctcacatttgaaatcccgctctcgggatgcaatgtctctgctgtgacattgcatcagactgatgggtatccctgcttgctttccgggagagcctgcaggcaaccagctctgggggctgctgggcctgaggaaagcatcccaagtcaaggggctgctggacccaatggggcactgcaagtctggaccagggaaggatccacattttagctttgaggttggaaggacacttgtgttgggaagaaaagctacttaaatgctcagttgagcagttctgaattattcctccactctgttccttcttgaggttgagccctgccttctggttatttgagatcaagtccgcctagataaaatgttagactattactgcacattaaagaggtacctcttacagtcatttttttttaagtggtctgattttgttttggctggcttatttagagttttgtgcttcctcattttatttccacgaaggctgtgcccaaccttagcctcggtgagccgtgacccagccatgtcaccgatgcgtcaaagtgggttggctgtgaggcattcattctctccccatgacacagatagacaaattggtcatatatatatatatatatatatatatatatatatatagagagagagagagagagagagagagagagagagagagagagagagagagacggagtcttgctctgttggcctggctggagtgcagtggcgccttcttggctgcaacctccgcctccgggttcaagcaattccgtctgcctcagtctcccaagtagctgggactgcagatgcgtgccaccaagtctggctaatttttgtattttttttttttttaacagagatggggttttgccatgttggcgaggctggtcttgaactcctgacctcaggtgatctgcctgcctccgcctcccaaagtgctggtattacaggtgtgagccactgtgcccggccaaatttacccaatttttaagagttatgacgtgctgcaagcttgctgccttccctcatccagcggtaagtcctgtaaggagtctgcttcctaggtgcatcagccagatagggaaaacaaagggatttgttactgaatggcattcagggaagcaatccctagaaggctgcctggagcctgtctcggggaatccgttccaggactctgggccctgcacctcttccctgtggagtgtcacccacaccggtggcctgggctttgtctggctgcaaatcgcacatgcggcttctaagtcagaacctgctgctggatgtggagctcccttcatccccagggtctgagcctttgtccttggctgacccctatcctctggcatctggaggaacccaaaccctaacccctaacctctggcatctggaggaacccaaaccctaactccctacacctctggcatctggaggaacccaaaccctaacccctaacctctggcatctggaggaacccaaaccctaactccctacacctctggcatctggaggaacccaaaccctaacccctaacctctggcatctggaggaagccaaaccctaacccctaacctctggcatctggaggaacccaaaccctaaccccctacacctctggcatctggaggaacccaaaccctaaccccctacacctctggcatctggaggaacccaaacccacttcaatataagagttagagtccaattcctcttcctggagagccctctgatggccttgggaccctggacctggtgagctctccccctgccagcccctcctactggccacccacttcctgcccagtcacccagaggccaggccacctctggtgtgggtaaagcgtttgtgttttccccaaatgtgttctgtgttggctctcgtgtactgaccactgtccatccaggctgggaaattaccatacacatccccccgccccccacaatttttctaagcctgtagagcagcagagggggctgctctgagccctggagctagggctgcagttggacccatcagagagcagctgcctgggcttaccctacccaagcagggatttgggcaggggtcctgcagttggagagcctgggattggagaaggaaaacagaactgttgtgaaagccaaaatccccaagggctttgaggcctggggatcttccctcgagctctctcccttctgaactggggatgagccagcgtgtgggctcatcctgaccctaaagggaatgtgagatgcccctcctagtggaattttgtcttcaaggcctcagtaaaatgtggttttaaggcagaaggagatggccatttcctttctttttgggctggaaagctgaacggttctaagaaaaatttctgggaccaaggaacgaaaatgctggagcagaattccagagcaggacctcttgatcccgcgaagccgacgtgtcttctggggagttcccaaagatccatggggaagacgcccccaaacccagtgctgctggctctggccataccctctttttttttttttttttttttttgaagatggagtctcactctgttgcccaggctggagtgcagtggcgtgatcttggctcactgcaacctccgcctactgggttcagcaattctcctgcctcggcctcctgcatgtgccaccacacctggctaatttttgtatctttagtagagacagggtttcaccatgttggtcaggctggtctttaactcctgccctcaagtgatccacccacctcggcctcccaaagtgttaggattacaggcttgagccaccattcctggcctcataccctcttaattcttatcttgcatctggaatacctgttggaccaggcctgtttccatcacagccccttcttattgcctttgtgttctctgtgttctaccccttcccataccccaggattcaggcaggcgagtccagttgtgcctgattggaaaaagtgtctctgatggtggcccagtgaggcaaggcccatgggtcagcctggccaatttccctcccctcctgagcaccgtgggagggtcaggcctcaagcagccctcggaggcagcagtcacagacagaggtgggctgttggacaggtgcggctgatagagtgggtgtcttttgtgggcttctccccagcctgtggcctggcctagtcagtagagatggtcaggggagcaggagggagcccataccccagtgcctgtagttgtgtccatttcccctccctgacttctcctcctgcagcatccttccctttagttgtgtccatttcccctccctgacttctcctcctgcagcatccttccctttagttgtgtccatttcccctccctgacttctcctcctgcagcatctttcctagttgtgtccatttcccctccctgacttctcctcctgcagcatctttccttgtagttgtgtccatttcccctccctggcttctcctcctgcagcatctttccttgtagttgtgtccatttcccctccctgacttctcctcctgcagcatccttccctgtagttgtgtccatttcccctccctggcttctcctgcagcatctttccctgtagttgtgtccatttcccctccctggcttctcctgcagcatctttccctgtagttgtgtccatttcccctccctggcttctcctgcagcatctttccctgtagttgtgtccatttcccctccctggcttctcctgtagcatctttccctgtagttgtgtccattccccctccctggcttctcctgtagcatctttcctagttgtgtccatttcccctccctggcttctcctgcagcatctttccctgtagttgtgtccatttcccctccctggcttctcctgtagcatctttcctagttgtgtccatttcccctccctggcttctcctcctgcagcatctttccctgtagttgtgtccattccccctccctggcttctcctgtagcatctttcctagttgtgtccatttcccctccctggcttctcctgtagcatctttcctagttgtgtccatttcccctccctggcttctcctgcagcatctttccctgtagttgtgtccatttcccctccctggcttctcctgcagcatctttccctgtagttgtgtccatttcccctccctggcttctcctgcagcatctttccctgtagttgtgtccatttcccctccctggcttctcctgtagcatctttccctgtagttgtgtccattccccctccctgacttctcctcctgcagcatctttccctgtagttgtgtccatttcccctccctggcgtctcctcctgcagcatctttccctgtagttgtgtccatttcccctccctggcttctcctgtagcatctttcctagttgtgtccatttcccctccctggcttctcctcctgcagcatctttccctgtagttgtgtccattccccctccctggcttctcctgtagcatctttcctagttgtgtccatttcccctccctggcttctcctgtagcatctttcctagttgtgtccatttcccctccctggcttctcctgcagcatctttccctgtagttgtgtccatttcccctccctggcttctcctgcagcatctttccctgtagttgtgtccatttcccctccctggcttctcctgtagcatctttccctgtagttgtgtccatttcccctccctggcttctcctgcagcatctttccctgtagttgtgtccatttcccctccctggcttctcctgcagcatctttccctgtagttgtgtccatttcccctccctggcttctcctgtagcatctttccctgtagttgtgtccatttcccctccctggcttctcctgcagcatctttccctgtagttgtgtccatttcccctccctggcttctcctgtagcatctttccctgtagttgtgtccattccccctccctggcgtctcctcctgcagcatctttccctgtagttgtgtccattccccctccctggcttctcctgcagcatctttccctgtagttgtgtccatttcccctccctggcttctcctgcagcatctttccctgtagttgtgtccatttcccctccctggcttctcctgtagcatctttcctagttgtgtccatttcccctccctggcttctcctgcagcatctttccctgtagttgtgtccatttcccctccctggcttctcctgtagcatctttccctgtagttgtgtccattccccctccctgacttctcctcctgcagcatctttccctgtagttgtgtccatttcccctccctggcgtctcctcctgcagcatctttccctgtagttgtgtccatttcccctccctggcttctcctgtagcatctttcctagttgtgtccatttcccctccctggcttctcctcctgcagcatctttccctgtagttgtgtccattccccctccctggcttctcctgtagcatctttcctagttgtgtccatttcccctccctggcttctcctgtagcatctttcctagttgtgtccatttcccctccctggcttctcctgcagcatctttccctgtagttgtgtccatttcccctccctggcttctcctgcagcatctttccctgtagttgtgtccatttcccctccctggcttctcctgtagcatctttccctgtagttgtgtccatttcccctccctggcttctcctgcagcatctttcctagttgtgtccatttcccctccctggcttctcctgcagcatctttccctgtagttgtgtccatttcccctccctggcttctcctgtagcatctttccctgtagttgtgtccattccccctccctggcgtctcctcctgcagcatctttccctgtagttgtgtccatttcccctccctggcttctcctgcagcatctttccctgtagttgtgtccatttcccctccctggcttctcctgtagcatctttccctgtagttgtgtccattccccctccctggcgtctcctcctgcagcatctttccctgtagttgtgtccatttcccctccctggcttctcctcctgcagcatctttccctgtagttgtgtccattccccctccctggcttctcctcctgcagcatctttccctgtagttgtgtccatttcccctccctggcttctcctgcagcatctttccctgtagttgtgtccatttcccctccctggcttctcctgcagcatctttccctgtagttgtgtccatttcccctccctggcttctcctcttctagcatctttcctgctccctggtagcctcttgggagccacctatttctggaggtccccactctgggttccttgtcctgggtgtggggcgaatgtgctggactggggtcacagcattgaaccccacttggagctgaggatgttctcgccccagaaggaaaagctgtgtgtgtctgcgtggagcagtgtggagtggtttccttggtgccgcctgggttccgggcacccggcctgggtgtgaggcctggtcacatggctgaactgctctcccaggcaccccgggagggatgaatgtgacactattggtgtccctcccagcacactgcctgccctgggctgggcacactcctcccctgttggcagccggggatgacaggccgcctggagagcccgtcctgtgatttggtttggaaagtcattattactgcagagcagtttagctgttgtttttacagcgttggtaaggttaaaagaaataatgataataatataagaaagactcagccacagtaactgcctgcaacatgctatttgcatttttaaggaaacacttctttgagacagcctgggtgaaaggtcactatttgcatataaatggaaaagaaagtgtatgatgctggaagttacatctgtattattttctcagcagtgagctgctgttggagagattagaggacatggcttgcatttggcttttattgaatagagaaagtaccagcgaggctgatttagaagcaaaataatgagagaaatgtgcaaagctatagaattgccaactccctgcccccacctctcccttctctcattttcacctaaactcagcaaaagctggtctgcctttgcgccactcagcaagtcttcattttacttctctctggattccagagaggaaaaaaaaaaaggaaagaaaaagagcaaaacttgccctcattttcccctcggtcccatttgtgtttcctgccagtgtttcctccagatgccccaaaccccggagcagaagcccctgtgactgtggccccccagggtgtggagaggaagaggccctcggggcggggacaagagggcacccctctccagggtggggacaagagggcacccctctccaggggtggggacatgagggcacccctctccgggggcggggacaagagggcacccctctccagggcagggacaagagggtacccctctccggagctagtgggcctgttttggacccgctgctgggaaaggctgggggcaggggcaaatgtggggggtcctgtgtgggctgagggagtcctgttccaccttcccctcagccccatgggacccgcagtttctagggcatgggttccaccttcttcatggaaatttccaagcttgtcagactttctcaggtgcctggtcccctgggctttccaggatgcccccaggaacaaagccagccatccctgagagaaaccctgggtggggctggggccggcacctgcccagccagctttggaagcagacttggctgagcacatcatggacttcagggtcttccaggagcagtcctgggacagagggaggtggagcgtcctgcccggaggaggcacctcaggatcctccttggtcccagcttctctcttcacagaggcctccactgaccactggttacttaaatcacagtcccccatcctcattattttcaaaaatacattttgaaacaatctcaaagccacagaaacgtttcaagtaaagggccaagctgtttctcctgagcgtttgagagcgtgttgctgatgcgatgccatcaccaaggacacttgcatgggtgtttccagcagagaggccgctctcccactgctccaccctcaccttctcggccatctggtcctcagacccattcaggggtgggttcagaaccacgtgctgtgcgtggtcctggtgtctcgttcgtctgaagtcgtttttagcactcctcgcctttcgtgaccttgtgcttttggaagagcgctgagccgttattcagtgggatacccttcaacgtgggagcactgagccgttattcggtgggatacccttcaacgtgggagcactgagccgttattcggtgggatacccttcaacgtggcagcactgagccgttattcggtgagatacccttcaacgtgggagcactgagccgttattcggtgggatgcccttcaacgtgggagcactgagccgttattcggtgggatacccttcaacgtgggagcactgagccgttattcggtgagatacccttcaacgtgggagcactgagccgttattcggtgggatgcccttcaacgtgggagcactgagccgttatttggtgggatgcccttcaacgtgggagcactgagccgttattcggtgggatacccttcaacgtgggagcactaagccgttattcagtgggatgcccttcaacgtgggagcactgagccgttattcagtgggatacccttcaacgtgggagcactgagccgttattcggtgagatacccttcaacgtgggagcactgagccgttattcggtgagatacccttcaaggtgggagcactgagccgttattcagtgggatacccttcaacgtgggagcactgagccgttatttggtgagatacccttcaaggtgggagcactgagctgttattcagtgggatacccttcaacgtgggagcactgagccgttattcggtgagatacccttcaacgtgggagcactgagccattattcggtgggatgcccttcaacgtgggagcactgagccgttattcggtgggatgcccttcaacgtgggtttgtccagtgttgcccgtgatgcaggaacacctgagtgggaggttctcccttcacctgatgctgatttgtcccttaactcataatgttgacttggtcactggattagatggggcatcccagcacctctatgccagagggaaatgccagtcattttccctttgcaattaataaatatttggggggaaggtactttgaaactatggaaatatctccatcctcaacaaaccatcacttaactttgatggatatctctatagactcgttgtttcctgttttaccccatgggctgaaagccttctttggatgctcagattgtccctgattgaccagtggaagcccagtacagaggctcctgcagcctcggtccagctcccctgtcctttcttgttcttgcctttcctgcttggggcctggaactctggttccttttattagaaaatggtgttagcctgagacctgggtgttgggcctctagtggacatggctgggaagacgtatgtgtgtacacacacatactcacatgctacacacagttacacaatgctacacacacacagttacacacacatactacacacaggctacacacagttacacacacgctacacagttacatgcatgctctatacagttatacacacatgctacacacacagttacacatttgcacacagttacacactcacatgctacacacagttacacacatacgccacacacgctacacacatgctacatgcagttacatgccacacagtcacacacagttacacaccacacgcagttacacacacatgctacacacaggtacatgctacacacacgctacacacagttatacatgctacacacacgctacacacagttacatgctacacagttacatgcatgctctatacagttatacacacatgctacacacacacagttacagacacacgccacacacacaccctttttcacctaggtctgtatttacttctccatctatcgatgtttattgaaaaacacaagttcatattgataacctctgattccaattcccacacagggttcattctaaggttctgcctttccgtaggcataacgtcctcttccaacagtgagaaagctggtttccattatctttaatgtgtttacttctttgatccacctctttccccataccagcaccctccttactccacacaagtgctgaccccttgctgagcccctctctgcaggccaacctctgggtcgccacaggacagccccaccctctgttctaggccttggtggggacaccttctcccctgcaagggctctggtgctggggagcctcactggccagttgcccaggactttggggttcacagggtgtgggccaggacaatccaagtataatgggctgattggcctccctgtggctccagaactggaccttttcggacacttgtgctcacagtgaccagctagcttcctttgtagcgttgagcgttatctttctttatcttcagtgtttcgctggtggaccaaacagtttaccagtgttatgtctcatacaagattttgtggtttgtttttcttgtagacagtgatcaccacccctgccacatgcacctccctgccctcgcttcccttactcgcggttcaatgctcagtttttgaggctgtgcatatctggatttttttattcttctacttcctgtgatcagtgttttgcctgggcatagaggacatgccctgaagttgaatgtcaactcccttgaaattgggaagaggctttctctactgtctgtgaatgctgctctggagcaatgtgatcctattctagttatcggttttgtttgtgactttttcccacttcaaaagcttttagggtcttttttctattcctggtgttttaaaattttatagtgccgggcttggttggatgtgggtctctttttattcacgattatgggcacttaatgggctttttaatctaaaaatataatttcctttagttctcggaaaattttttttattatttaacttacacttttccttcccattttcttaattctctctttctggaactcccaaatcgggtgtcagtcctcactcagcgtttcctccgtctctgctatctcttcgtccttttgttcactttcctagtatatttctttgactctatctcccaagtcttctgttgaatttttcattttggttttacaatttatttccaagttggggaggatggacacaatggtattaagccttcccaaacaagtcctcctgtcactgtctgggctgggccatatctgccctgtccacatgcgtctggagagtctgtgtcctgcctcctggtttgtccttgttcctgctctaaccgctgcccacactgttagtcgagggagcctgaaggagcctcctgaaacactcatttgctcatccagtgcaggttcctcccacaggccaggaaaggtcccaggaacagccattattgagcaccctggcagttctcagactgcggtggggacctcgctttgaactttgagaggcagatgctggacctagtatttctgctgcctcctccaggagccatgtgacatggatgtgagtctgtttgcctcctagggccttaccttcctatgtctgggggtgtagcctggacctcaggggtgtccccttgggtgtcagaggctctttgggactagagggaggaatcctgggctgtggtcccccaggagtctactgtgacctgtgactggtttcgtgtgggccttaaattgtttctaaatttttattctaaccgttttcttgctgccttgccaggctctgatttaaacccaagtagcagcaagaaggggataaatgagggattgagaggagaagcaggaaaaaagttttttgttttttgttttttttcctttcgaatggcaagatgtaagtttatactcaaccctgggcccagcttttcagtttcactctgcatgaggtatgatgaaagctaagaaggcctgccctctccagggaagtggcggctggagcagccacggtgtcccagggcgtggcaggcccagccaatacgcacgcacaggcagaatggggggctgttgctgctgggttagctaccaggtgggattggccctggccatcggctcagctgcatggatagctgtggacacatcctgacatagcactggccgaggtgggaggtgagcttgggccgttctgggtcccgatgcctcctggctgtgcagaggcaggtcgccttcctttggccctgttgaatgagtacagctctaactgctctggggagtgggagggtgaagtggacccaagagctctcactctgacctccgtggcctgtctcgtgtcactcgcatgacccatcctcctgttgtatccctggacccagccctccctggcctccaggagcagggagtgataggcatcaaggtggtccagtttggggttgaggcgcagcggtccagaggctggcccaggacacaggctcacagaacccagtctggagaaccaaaggggacttgctgggacctcctgccctaggcaagagtccccagagtgtctcactgaccatccacatgccactgtttaaaaacagcgttattggaatgtaatgtgcacatcacagaattcacctattaaaaatatacaattcagtggttttagcgtacgtgtagggttgtacatctatcaccacagcccaagtttagaccgttttgatcaccccagaaagaaaccccatgcccgttcacagtcgttctccattttctcctccaccagtcctaggcaaccacgaatctactttctatctctacgaatttgcctgttctggccatttcacaaatatggaattgttcaatatgtggtcttttgtccctggcctctttcactgaacacgaagtttttgagattcacccacattgttgcatgtataagcaacttcattcctttttattgccaaagactgtgccactgtatttcgtatcacccattcagcagttgatggacatttgggtttttccactttttggctagtatgaataaagctgctatgaatagttgtgtacaagcctttatgtgacatatgtttttatttctcttgggcaaatatctagagtggaattcctgagtcatgtaactctatgttgaacattttgagtaactgccatgccattttccaagtgattgtgctattttacattcgcatcagcattctatgagggttcttgccaacacttgttactatctgtttatctttaacattacagccattttagtgcaatggtatctgagtgtggttttgatttgcatttcctggattactagctgttgggcatctcttcatgtgcttattggccattcccgtgttatctttggagaaatgtctgttcaagtcctctgctcattctaaaattgggttatttgtcttattatgagttatgagagttcttttttccaaatacaagctctttatcagatttacgatttgcaaatattttctcccagtctttgggttgtcttttcaccatattgatagtgttattcatttatttatttttgagacagagtcttgctctgtcacgcaggctagagtgcagtcgcatgatcttggctcactgcaacctccacctcccaggttcaagtgattctcctgcctcagcctcctaagtagctgggattacagacacgcaccgccatacccagctaattttgtattttcagtagagacggggcttcaccatgctggccaggctggtctcgaacccctgacctcaagtgatctgcttgcctcagtctcccaaagtgttgggattacagccgtgagccactgctcccggccgacagtgttattttaactccgaaagttttaaaccttgttgaagtccaatatattactttttttctttaatggcttgtagtgttgttgtcatagctaagaaaccattgctgaacccagagtcggaaagatttaccgcggtgttttctaggagttttggttcttacatttacatatgtgatccagtgcgagctaatttttgagagaggtccaacttcatttttttttttgatatctagttgtcctggcacgtttgttgaaaagacagtttttttcccattaaattgtttttgtgccattgtcaaaaatcaattgatcattaatagagggggttacttctggactctcaattatgtcccacttatccatatgcccgtcctgatgctagtaacacattgccttgattactgcagctttgtagtaagtttggaaactgagaagtgtgtcgtccaactttgctctttttcagaattgttttgactagtctatattccttgaattgccatacaaatttttagaatgagtttgtcagtttttgcaaacagaacaaaacaacacagccagagaggtcagaaatggtcagattctggtgagatttagaaaataacattggcaggatttggggccaaggatgaccctcagggttctggcttgaggagctgatgactgaagaggggaagaggaaaaccccacgtcacgtaagaagcagatattgtgggcagcgaggaagcaaaaaggagaagccatctgacatggggtggccgggtggccaggaggagcctgtacaggtgaccgacaaggtcaggggcgagtgtttgccacagaagggggtgaacagacacgcaccgcagtgatgtctagtgggccctcacgtgccctgtgaacatgaagccgcctgttgttccagtagagggatgtgggtggaggccaactgtggtggggagtgaagcgtagttatgaagcaggaggagatggagagggggctgggcaggggcgtgaggtccaaagagactgtgtttttaaacatggatgcctcaagccagttgaagagttgggaagagtagttcaatattccagaagaatggagggaagagttgatattcctgggaactttcattgacagtgggaaggaggtgggtataaagtccagatggacaagctggctcagcagggaggcaagaccccatctcctgtgctggagacggaggagggctgagggggtgcatgggagaatggaggtgtgggctcctctcaagtgactacccttcccctctttgctgaggggcaggtggtaacagctcctggccccaaaggcagccctagttaccagagatgcaaaacctagtgaagactgaaaacatgtggctttccacacttaccacctggcctctcactcagtcttcctgttattttgttcttgttttcagagtggggaggttttacacagtggaagggggtcaggttgccagggctggagtggatcagagctaactgccacagggactcccatccggaggcccaggggatgcaccatgggggcaggtgggctcaggccagattccaggctaccgagccagcatgaaaacagccacggtcgcccgcagggggtcccccatggggttgtgcgtggagtggccacagtgccagtgcaaggaggaagtgtgtgctggcagtgggtcagccggcagctggggtgttagctctgggacaagggggctctccttgccatgacgacagaaggaaaccttggggtaggccagcagcacttcctgggaagagcccagcagagcactggctctcagtggaagcgtcctgtctggggcctgggtcaggctggtctccagtttgcagtgctgctgagttggaaaaagagggcttcattaggagaagacagacggggggctacagctcagcactgcacatctccctggcctgtgttggagtctctggccagtgaggggtggttccctctcctctggacctttgtgcatcaatctcagctgaggaggccctgtttgtttcctgagtttttctgcccacaagagccccataaaagtgagtgtggggccaccatggggacagatgtgggggttaccttgagcaggcaggactccaggtgcaaagatgccgggtccctagagaggggtcccagccagcgccgccctctgggtgccgggagctgatcccgagaggcttgttttccaggagacgtgctcaggatggagcggtctctgatgttccgtttcccattcgcatccacgagcagggattcagattaactcactagaaactcaataacccaagagaacaggctcgtctggatgaaaacctccacttcacttcagattcctgacaagaaaggccatggtgatgacaacagcactgacgtcctcatgggttcacttccaggctccgtccacacatgtctctccatctccaaataattcttcccctcccactttgtgggtgaaggacttaagtctcagagagggtagtgacctgctgctcaggtctgagttggtggcagtgccctgtgtgagctttggggacccttgttcccaccacagagtgtccatggagcagcatgacttctggaagggcgtctttatggaacacctccacgtttccgtggagagatttcctgtagcccgtggccccggcatccacgtttccgtggagacttttcctgtagcctgtggccccggcatccacgtttccgtggagagtttcctgtagcacgtggctccggcatccacgtttccgtggagacttttcctgtagcccgtggccccggcatccatgtttccgtggagagttttcctgtagcacgtggctccggcatccacgtttccgtggagagttttcctgtagcctgtggccccggcatccacgtttccgtggagagatttcctgtagcccgtggccccggcatccacgtttccgtggagacttttcctgtagcccgtggccccggcatccatgtttccgtggagagttttcctgtggcacgtggccccggcatccacgtttccgtggagagttttcctgtagcccatggccccggcatccacgtttccgtggagacttttcctgtagcccgtggccccggcatccacgtttccatggagacttttcctgtagcctgtggccccggcatccatgtttccgtggagagttttcctgtagcacgtggctccggcatccacgtttccgtggagagttttcctgtagcctgtggccccggcatccacgtttccgtggagagttttcctgtggcacgtggccccggcatccacgtttctgtggagagttttcctgtggcacgtggccccggcatccacgtttccgtggagacttttcctgtagcctgtggccccggcatccacgtttccgtggagagttttcctgtggcacgtggccccggcatgttgtttgggtgcatggggacttaatgtgctgctagagatgctgattgagcagagcctacagacaggagagctttgtctggggtggagcctactgagcccatggggcagggtttggccatacacaggccccagtaggggaccaagagggccacaggagaagaactggcataccttactgggcttctagtagtgatagccgtttgctgccaagacatttcctaggagagggaggctatcatgtcaaggttgagccgggtcctcaggcccttgtaaaggagggtctacgcttgggggtttgtggttacttgtgtgctctgtacccaggggtatggtgcacaggtttcaccgggtgccattctgctcttttgcccagagaagctcagcggctttgctgcctcagggaggcaggagtggctctttggaggagcagttgatccccgggatgctagtgctctgcctgagcagatgtggggcctcagggcctcaggacttcagagcccagggctgactgacctagggacaggagtgtaagggatgtgggcaacgaagaattccacagggctgtatttccagactcccatgggtgggtgtgggtggagaagccccagtgagctggttatctcccaccaaacaaaactggaggtccctttgcagagactcttgcagttcatgtccacatgacttctctgagaagcaggagagactcagcgcagaactcaggggagtcgcactcgggagaggcagcgtctcctctggagcacacagaccttatgtccttccctccagctgtcagccagacatgccccagttgtcttgcatatatacatatgtaatggtaacaaggaattctgcttgagccttgccaatcagcccagtgagcaggtttctgcagcatcttgtctcctgggatagatactcagaaagtgaaccctgtgcactttggggccttgtctctcagcttctgttgacacataagaaaagagacacacagaggaccccacgccccatcttcaaagtgtgaagcacactccccggctgatacgattcttgtcgattcacttacggaatcttccaatatgcttttcctccctataccccacatccctgtcacagagttgagaattggattacctggtgggcaggtgggccccagttagaggccgctcacaccggctcagtgcagatgaccagtggcagatgggaacccaggaggcctagagatcttgggtgatagggaagctcccgcagctccctcctcactagtccaggcaccggagcctgcggtgggagccctgtcatctcagcgacggcctgcgggtgacttacagctcaatgaggggaggcacagagtaggtgcacacagtaggtgccgaatctgagtggttttattcgttcctctgtagacctcgtattaggctgtctccttgactaccaaatctgctttcctctgtgtttatgctctggaaggtaatccgaagccctttaatgggatggaagcatttccagataagaagagggtgctgtggccagaggcacagggctgcctggggccaggagtggccagaaccctagagaagaattgcatttggggatgcacatcaaaaacacgaggaaaagaaagaaagtgggtgggaatagcgtgccttcggcagaatccaaactcacttccaaggcaaagccagggcccaacacgagaatattcatttcctgtttcattgttggttacttaatgaccttcctttgaaatgctgcagttatgtagaaagcaggttgtcatggaaacggggagtgacgtgcagggaataggtacacaatgcgtttctttgtcatgtccagctgatgcgttcagcctctgctcagacatgggaatttatgtgaggaattaaatattaactggaggcattgccctggagagaggcagaaacacagggtgacaaaagatgctggaaaccagggcaaagagcatgctggggcccccgggatcctgcgggaggcaaagctgatttgagaccatgggtggatctcactttcttcaatcaatgggctccagagaagtcgtgcaaaacaatcttctttttcaaatgcatatgtactgtgcattcttttgaggggcagaaggatctggttgtaatgcgaataattactcattagtcagctcattttcaaagttggaggggtgacatgccaagttttctcaaggtggctctcagctgccttgtcccagcactctgctggccgtggttgtcagtgggaaccaacacctagagctgggacaacagtgcaggggactgcaggaagactccagggaggccccaagtcagagagaaattgtctcttgttcctgaagcagccatggagccatgaccttgtctgtttctccggtggattccaggaaataggcattgaatatatgatgttaaaaaagtgcctcaagtttctcactttctccccttgagccagcacggctggcacccaccaagctttccttttctgaccttgaacctttttaaaccctcagaaaatgagttccgaggtgagctgttaaatcagaggtggacacacggaggcaaggccagcagctgcaggacctcaagacacctgggcagacactgcaaggtgagacgtgagagggcagcccctgtcgtagggccccaccccatggctgcctgcacaaagcctctcttcagctgcaggcatgaagcatggaggcgacttttggtctgatcctcaccagagtccgggttaggtgaagggtaaatggggactaggatcagcaatgatccggtcactttaaaattaagggaagaaaaatgactctgagtagatcaaaactaaaatgtgaccccaggctgggcccggtggctcacacctgtaatcccagcactttgggaggctgaggcaggtggatcacttgaggtcaagagttcaagaccagcctggccaacatggtgaaaccccgtctttactaaaaacacaaaaattagccgggcatggtggcatgcgcctgtaatcccagctatttgggggaggatcccagctaaggtgggaggatcacttgagcctgggaagtcaaggctgcagtgagctgagattgtgccactgcactccagcctgggtgcagatcttatctcagaagtaaagggactaggaatggtggcttttatctctaatcccagcactttgggaggctgaggcaggtggatcacttgaggtcaagagttcaagaccagcctggccaacatggtgaaaccccgtctttactaaaaacacaaaaattagccgggcatggtggcatgcgcctgtaatcccagctactggggaggctgaggcaggagaatcacttgaacctgggaggcagaggttgcagtgacccaagattgtgccactgcactccagcctgggtgacagagcaagactccatctcagaaaacaagcaagcaagcaaacaaaaaaaacccaccaaaatgaaaatgtgaccccagagtctcacttccttgctttgaggtgtgaccacgtctgggctctgtgataggcctgagcaactgttctctattcaccctgcttttacctggccaggctgagaatccctacaggatctgacagcagagattgctggcaggagcttatgaagtctgttggccttgttttatttcgatcttcctaaggggaggcagatggtgcaagcccttcttataccttcccagggtataagatctcccttcggggacactcccgaactgtgacatcacatgtgcttacagccactgttctccaccaccaaccctctaattctagaacttcccaccaatactctctggatgaggccaggtccccagggtcaggtgaccctcacagctggaagtagaggctgacaataggcttaggctgaagcccttcccagagatccgattctgacctctcttttttcttttttgcatgtagatgctctccagcaaggatccagctgtgactcagggcatggctcaaggacagtgatggcgtagggtgtaggcaaggagggctatgcagttgtagtgggaacttcatttgggggtgcttgtgttttactctcaaaacccaacctttttcttttgaatctggtggcgagaatgtacattttaatgggtctgttatagacaacttgctgagcacctccgctcatattttggctcccgcaggattatcagtgctctgctgatccatgttggagcctggggcacaaggaagagtcagtaatatggatcctgtctttatttaaggttttggtatcttgtttattaggggttttttgcatcatgttgatgtttctaaatattgaattaaaatattatttatcttgatcattgagtttttggcctcattcccctcaccctaccccagatcctgaggattcacatagcgctgtactggcatgagatcatgtgagcatgaacgttacttgacttgaggccaggggctctgcatgcagcgttatctacaaatgtctggtgccatgtcaggggtgggtcggaagacttttgtctccccctggcccagacatgacaaactcagagagtttgggacctaccatgacaacccatggctgttcaaagtgctgcttctgtgaacaaagccagggacccgtgcccaggttctcgtggcatcaccagctctttcatcactgctctgtttgagggtcatttcccttcttttcttgcagatagggccgagtgactgctctgaatagagaagctaagatgaaaagtgtgccagagaaggcgagaggatgagaaagggtcgactgcctagaggacagtggggcagcaggtgcaagtagaatctcctgactaagaggctgaggagggtggcagcagagggcataagccgtggtcacagtgtgagaatgtcacacagccacagcagcatcggggtcagccttccagaggctggcttcggacaggagatgggtggtgaggagccagcatgggagggcagtgaacacacaaaccctgtgcatgggaccgtcacagcctgcggcgtgcctctgagttcagcaccaggcatgtggacagctcaggaccggttggaaggggctgccagaagtcaggtggtcgtgtgtcggggtatgcaggagctgatggtagctcctcaacccccttcttgccaaatattcagagatatggaatcaaggaaaagatcagttgcatggccattcagccaacccttcttcctgccacccagggcaggaggtgcctctggcaaggactactggacagaggctcctgcaagggaaggagctgccactgggtatggcccttctggcctctctttatgttgttggattctaccctgggtgggtataaattccatttatgctggagtttttaacagacggttgcagatatggctgcttcatcagggtatccattatgtagctctaatttttgatttgggaatgaagtgagccagtatcccatgcttagagctgtcaagagaaccccttctcagacatgtgttaaataatgccccatggaggtgtcctttctataccccaaggaggaggctggtctattctgctgaatttgttgggagaatttcagaatttcagacatgcaacaggacatcacccaatgtgaggacagaactatctctgcaaggaaccaagggtactgtgatggctgccagtggggatcaggggtgagggcatatggtttagcctcagagatcaagagagtggaaagcaggatgtgtgctgaggtcaccgactttctatatctgttctgtgggctgagctggcaggcaggtccatgcaccaaagaaagggaaggggagggctgtggatgcagcagaagatcctcctgggatactcgggaggggagcaacacaaatgcttgaatgctgctcttagatcgttgagtgggagcttggatcttccacaatactgtctgctgtaatggcttcacagcagtgacagggaagttgatgctgccctcagtacataaatgagagaagaaaacaggccagaccatggctctgtctttctcccctcccctcactgcagagaagtgagactgaatgtggtgtgaggtactgctggagccaggcagggtaggggacagccagtttctggccacctcctcaccccccactcttcactggccccttccttctgggaagtggctgcctatggtccgctgggactcagcaggtgctcttcctcttcttctaggtctctgggaggaaaaccattatgcaagaggctcaaccgtcccaccgagacactataacctatgtaattttatggatttttaaagaatagttgtaagtccattctaattctccagatttgctggctgtcagaacacattttaaataaaataaaacactaccgtgtctccttctctggcccagcgctggggtgaatggcccccgtggtgtcagaatgcccggaaccccccagctcagcgttcccacatatggcctctctgcagcccctctgaccacggctctccacacaccccagccccagggtttcagagatgtttctgactgtccccatttattcattcatccacctgtccatccacccatccttaaatgacatgcactaagcagctgtctggaggagagacaatgaccttacaaccatgaatgaatgagctcatttcagattgagatgaggactgtgagggaaacaaacaggcacaaggtggagactgagaggagctgggaagaggcagggtgctggccacctaagaatgctcccagctctacctctggagtgcctcccaccccagatgtcctcaggtcactgatccattcaccctccccatccctacctggctctcaacccttagcagagctctctgtttcttgaactctcccctgagcactccctgcctccctggggtgatgtacaaatcttggaatgccaggctggtgcccctcagggccagaacagctcctgctggggccaggacaccctcctgctggggccaggcttcagccaggattctgtcctttgactggccctgggccattggtgcagaagggatgtgatgggggttgagggaggaagctgttcagctctgagggccctgtcctgggaggaagcatgaaaaaggaatgaaagaggcagagagagacagagagggagtccgtgagtgagtgaggagaaatgggtaaccctgagctggggcccgggaaggagtggggagacgcagcctctgggggcaaaggtggaagttggcacaaagcccgttgggcttcatggaaaatctccaaccctgatatctttggaagctgagtctaccatttccccttagaggttagacacgagtggtttgttactggctatgtgtctgggttcttttcattttttattttttttgagacggagtcttgctctgtcacccaggctggagtgcagtggcgtgttctcagctcacctcaacctttgcctcgggggttcaggtgattctcctgcctcagcctcccaggtagctgggactacaggcggccgccaccacacccggctaatttttgtatttttagtagagtcaggtttcaccatgcctgcctcggcctcccaaagtgctgggattacaggcgtgagccaccatgcccggccctgtttctgggttctgagtggatttgttacagctgcagcctcagcgcagatccctctaggtttcaagattgcttactgcattggcttgttttggttcctgagtttgtaaacacccaactcagggcactctgttttggccaggccagcatgcagatgagtctggaaaaggggctggtcttcgtaccatgtcatggtgagaactgtgtgtgtgtgtgtgtgtgtgtgtgtgtgtgtgtgtgtgtgtatacttttttttttttgagacggagtctcactctgtcgcctaggctggagtgcagtggtgcaatctcagctcactgcaacctccacctcctgggttcaagtgatcctcctgcctcagcctcccaagtagctgagactacaggcgtgcaccaccacacccaactaatttttgtattttcagtagagatggggtttcaccctgttggccaggcttgtcatgaactcctgacctcaagtgatccacccgcctcagcctcttaaagtgctgggattacagacgtgagccaccgtgcccagccagaaccatgtatattttcaaaagagcttacatgattaatcctgactttactaaacagaaatataaaacagaacaaagcaaaaacacacttttgaggagactgcttttatatggcactaagaaagcaagttaaatggatggacaaagagacagttctcttgggttaatttggcaatatacaatgtatttgcatttatgaattattctcctccccacagttttcatggttttcctatcgaaggcagaactattgaaatattaattagagcctcaagacatgctcgcagtggcagaatgaagctggcatttggagaaacagagcagacgttcttgagaaaggttgccggcccagcagtaagagtgggtgatggggtcgttctgccttttcactctcaaggggagaggtcaccgggctatctgtgggttgcgcaaaaaagggacctggttggcttgtgtttggaacaagtaaagtgtgttttaaaaatcaatgaaaaattgagaagtgtttaattttctttgcatcattgagctgccctttagggcccagctgtcattgtgtggtgggggcagaaggtctggggggctgccgtccagggatcaccaaggtgagcctgggtggtgctgggcacagggccgcccccagcacccgctctccatctaccacatcgtggtgccgatcttgcggcaggaggagagcagagaactcacctctgaagtgctttgacttctttcgaaaagaaaagtgatgtaaatcaagcagtgctggttttgtccagatgctttcgcgtcagccggcactgctgatttcaaatagctcagaaaccagtgtcccaagtcacccagctcttacgggttcattctcgtattaaagagcctggtttattttttcttcggtagttcagtttttttccctttaaaaatcaaagctacacgctcctaagagaacttctcgcttattgaccagtcaatgcagataaattgcaaatggtaaaaaggtgctcagcagaaggagcggcagagctgtcagcttcatcaacgggagctcacagttttcaagcagtgcccattacacatccctgcaaccctctctattctctgctctttgaataatttatctgcaggaaatccaaattgccaaggcacgctttaacctagcagaatgcttgccaatatccttgggaaaactggcaataaataaataaataaataaagccgtagattgcatttcagctgagtgcaggcaccgcacaagtcccattgtacgtcctgcatcggaaggcattgcacacgggctcagagcagacgacatttgaaggctcataaatgtaatgaagtccctgtgacacctgctcctctattcactttaaatgtgagccatttgtccatggggaacctccgctttaaaaatagaaattgtagtaattgtcttccgttctattggaaggctgtaataaacgcacggctcacagcactgtgctccacagcctggagtcggcaggttgcataaattacccaggttttgatttttcttccttaacaaatcacatacatcattgtatgttagtgctgctgcatgggggaggttcaatttgcaaatttcatcttactaattgggggaattcctttttctttcttcccaggtggttctgtagacatttgtctctttttctggctttcaggagcaaaagccccatttaagacgtgggggcttctgagccccctcctgctgcctctcttcctttcttctgctacttctttccactcccctgctttccctttgactacctcacgcatagagccctggcagctctggtgtctgtggcctgggacaggtgtggatttgctgcctccccttcctgaccacaggtgatggtggtggagtccagtgctctcctcttgggcctcccctgtccggctagaggtgccctcccccgcctggtgtggctccccgggaaggatgttttgcatagcatggagtgtgtaggatttacttgcctgcccagatttgtcatgagtgacacaggacaaggatgctgtgtgtgaccctcaccactgccccacatgtcctttctgtgattgtcaccctcctgggggctcccccatgactccctcgccggacaatgctgtgggcagtgtccccacagagggtggtcagattcaaggatcacaggtggggagggacaccgataggctcaggcaaggcagccaggccctcgaggcctggagaacatatgggctggggccgctccaggttgcctgtttctcacgggatgaccctggtgcgtgaggggcattaaagccttctgctgggccgggcgcggtggctcacgcctgtaatcccagcactttgggaggccgagacgggcggatcacgaggtcaggagatcgagaccgtcctggctaacacggtgaaaccccgtctctactaaaaaaatacaaaaaattagccgggcgtggtagcgggcgcctgtagtcccagctactcgggaggctgaggcaggagaatggcgtgaacccgggaggcggagcttgcagtgagccgagatcgcgccactgcactccagcctgggcgacagagcgagactccgtctcaaaaaaaaaaaaaaaaaaaaaaaaaaagccttctgctgtagtgggaagaaagggcccatgggaagctgtgctctggggacacgttggggtcagaagccactggacgacccagcactgccgctggtggctgagtctgtggtgagcgacctgccctgatgcctcagcacctgcctgaccaggtgagcagtgggtgctgctctgtgtcgggccaggagaccctcttggataacatacggacattcatcaggcttcagtggcgcagggcccatgcctcagcacttgttggcaggtgcaaacctgggggcacggtgcactgtaccctccttgccaaggccggggacatgctgatgggacacttccaagccttgtagaaggtcctttctctacaccctcccacctgctgctcctggccccaggcctttcttgtcctgtgagcccatccttgtcattctgtgcccaaaatcacctttgctgtcaaagcttgagccagaaaatggccagacattcctgatggctctgtactccagaggcactggctgggttttcttgttaacgtcgtggttttttgcttgcagatgagcttagaaaatgaagacaagcgagctcgcacccgatccaaggccctgcgaggtgagtgccgccctcccctcctccagggctgtaaatgccactttcctccgcggtcttcctcaggagcacaaacccctaaccacacatgtgcagagatgccctggggacctcaggcctcttcagcctcattcatcctcagggctgctgagctttgaagctggcatctaagagggctgctgaggggcctttggcccagatgaacctgccttgagggcagaaatgttgaggtagacccagctccatggagtgggagtagcaaggctcagttacgagaccattctgtttggaaatgagaggccgccagccttccaccgccagcccccttccttcccaggcgatcagtcttggtgctaatggggcataggaggttgttgggttgagctggaagtgcagtgggaggagaggaggctgactctgttaggatctgagccccaacccctggccagacttacctccctgatacgggcgggggcttcctcttgtgcccaagcatctcaggtgtgcctgccccggtcagagccccgtgcatcttggcagccatcactgaaggaccagtaactcggtccagttgttctcttctctgtccagcttgatctggtggtttgtgtttcctgccaaaagctgacttctatctgcaattagagaaagagataccatccctggccctgaggtcccagagatcctgtctgaggtggagcatctgtcccactttgtaaaactgccaggctgctcaggggagcttctgcggcgagcaccaggcttgggggagcagctcactctgttgaccttggaggactctctgggaggtcaggaaagggtgagcgccctggggaaacggctcaggtctcactgagatttgcctccactcgtccttggcaaacctctcggctgtttaacttagtttatgctgttagggcaatgagcctttaaaatcacaattcccacatgttttccctgtttctgtctttttcccaggacccccagagaccacagctgcagacctcaggtaaggaagtcttcctgttagcaccaagcatcgtctatgtgcctgtgaccctggagatatcctaaatgtcccaaacggggtcttcttggattgaccaaacacccctggtgagcccctgctttccctaaggagactgcctttctcctggccacgtgtccagctatcttggccccatctctatctgttctcacctctgtcctggccccatcatgtggcgcaccagcatcatggcaaggacacggatgtgcctacacctggtcaccacgaggacctggactgtcactgcggtcccccaaaccgaaaacaagccgctctcttaccggaccctcacaagtgcttctgtgtcagatggttggaggcccagttcggggatgagatgagagaaggggtcttctacatcctgagtcttccattggctcgggatgcaaacagcagttctgtgtgctgatgacccggctggctgagctctgtgaccgtttccttcctgcttctcagggatacagattctcagggcagggaccatcttactgttcagcatacaattgaagagtggatggcttctgccaatcaggaaaatgagaggactgcaaagttcactttgtaaaccttttgcagaggtgggacaggaagacagtgtccctctgacacttgaggccccgtaacttggagatgaagggggaggactacgggagggagttggggtgctgcaagccccaggctctgcgtcagtcacacatcacagtcttgatctctgggaaggtcatggaagcactgcctggtgatgttattatcctgtttgtgaagtggggaaacggactcaggggttaaccttcatctaaccagaagagctgaatcgcatgtgctacttgctggaagccccaccctgggtaacaggtgggaggggtggggtggaagctcagccaaacaggtcgtgtgccagcacttccggtctggggtcctcagcatcacaccgggtgctccccagaacacagtccccggaagcacaggggtcggctccctggaagggagacattgcctgcttggccagcctgctgaagaagcggtgattgcgacggcgagagatgctcagaaggaccccgagtaaagggaagaggaggtgccacgtggagtcgcccagggacacggtggagacaaagacggaggagaatcccaggcgagggtgcagtgagtgaggcacaggagttgaggaaactccaggcttttttggtaacagatggagtgtggaggaagtcgaaaaggcaaatacaaatggcagggtgctctcttgtagctttgaaacagcagaaggaaaagtgactctcaaatagatttgttcgtttttaaacattctgagaggacctgtccagtctaagtgaggggttctgtgagcatttggattttgacgccctcatcatgagccttgtggtctcaactgacatatttggtaatagtgagacccttaaactttttaatggagaaactaggggaaatgtgttgacatctagtgttccaacaataatttcttcagcaattcttcattgctaacatgcaatgtgatgcttagagtaaaataggacaaagattatgttccaaggaatcaaatacattctgcacggaaggtaccattcattcctgtattctcaaacatctgttggccacacgcttcacgtgggcatgcctgtggctcgtgctggctgactgcgtgccccagccatcgtgggagcatttacaccacagaaatggactgatgatgttccccctcccagagacctgtttaccagcacacgctgggctctgaccggacaagcagacgagacctctgtcctggtgggggccacaccgtgggtaccagaacaggaagcatgacccacgcagaaaacgcaccgttgtggtctgtgagaggagcatcgcgtcctgtgtgcagaccatggcactggatgagctcacagacacagagtcacctgtcgggaacccccgtgtgtcgggaacccccgcgtgtcgggaacccccgcgtgtcgggaacctctgcgtgtcgggaacccccgcgtgtcgggaacccccgcgtgtcgggaacccccgcgtgtcgggaacccctcgcgtgtcgggaacccccgcgtgtcgggaacctctgcgtgtcgggaacccctgtgtgcaggactttctctgtggatgacttaacactgcattggctcagaacttcacagcctgcagtgcccctaaccccagctcgcctccccaccagctcaggcagagctcccaggaagacagtccattggttgtttaccaggtgagctgaggagaggttggacttggatcgagcaggaccctgagctgctatttccgacctcggagcccactgggagtgcctgagcgaagaagcagtttgatggtttttcctttcaccccatcgggagaactgatgacgtttcagcttgtatttttgcctgggtccatctgttgtcacatggcctcagactggctctgccagaggcgaagactagggaaggttagggttggggttagcatctttgagacagcgaggcgctgacaacaccgagttcaggaccatctccaagttcagagagagaacacgtctgtagctcacccttcttcttctggcgccttcctccttgagccactggccaactcccacccagatgactgccccaggagagggagggaaggcagggaaggcagtgtcttcaaaggctagtagctgaagcatggggctccaggctgggattcagttcctctcctgacttgtctcctttgacgcctacttttcaagtttgggtccctcagagctgtcatgcaggatgccagctgaggggtgactgtgggccacaccctcttcccagcctcacgtgcatcctttcctcacatctctgacaccagccctagtcagagctggggagtcaaggctggggaattccctcctcccggagaaaagaggctcgggagtcctggagccctggccgtcttcctctccctacaactctggccctgagcacccagaggacatcaggaaataagagctgagtgtgcttgcaggtgaactgcagggctggcatctgctggcacgacacccttggaggccctggctgggtctcttgtccactcggctgtggggtggggagcaggcatctaaggggtttccagcttcctgtccccgagcggccttgtccgctccacgcacttgggctcacagccgtgtctcacaccctctgaggctggggccggaaggtgcaggcccaccttcctggggaccaggactcttctgagctgagggtgacgtgttcagggcagtccggtccccacaggcctccacagcagctgtcacctaattgcctgattcactcagtgatgtcatcggctaattgggaccttagcttcaaatccccattaacaaggagcttttttgtgaaaagtcccaaagctagttctccaaagagtgaaagcaagtgtgggcctggattttagaagagactagaggcagggagaggtgggtggcagcggcggcaactccctcagtttggaaagggagcccccagtcgagtgtggtgtgccctccctctctcgctctctccctcttcctccctcttcccctcccttcccgtctgggttccctcttccctcctccctccctccttccctccctctctgtcttcttgttaacacactgaaaaccccaccctggaaggctgcagagaacatccccctcccccaccccatggctgctgttgagccaggggatagggtaaggcctggattctgctgacggttctcccagaggtagtcggggagggtggcctgcaagcccactgggccccacagttgtctgcagtcaggcctgtgatcagtcgaattagaaacgatcagaggtgtctggatagagactggggatggcgttcttttccccgggtcccaggtatgggggcaccagcccttaccttcctcccttcacaggctccggaagatgtgcttgggttttggaaagagctcagactcacaatgccagtcctgttaaaagcaaggtcttcccatcttggccaggaaagcctctctcttcccacaaggagcgcaggcctgcccctcccacctgccttaggtgacctggcacaggcgtctgggtcttacaatggcagctccttgtagtccttgagccgtggatgcatccgacagcccacaggagcctgatacatggtgaactctggccttacactccacactggcccctttgtgcctgaggctgctgtgggagctgtggtcctgccgccacgttggttggcatagtcagtactcatgctcagaagtttccagagcttcctgctggtttggttatatagggagacagatgatggttaaggaagaggaactcctgggtgtcctgccttgtgcttctagggtgagagatgcaggagggtcagtgtcaccccctccccaaactgcccttcttagcacagcccaaaagtcttccacgaggcagatgctgttggttcctggttcacgggccctcccggcttcttttccctgcgtggaagctgggacccacaccagctacaggcactggtgggatcttcaccactgtctgtggcttgggccacagattcctttctgcctgtcagtcctggctccgtttgctggggcacgaaggtcacagctggcagggaatgcagagactgttaccctcgagggccataggccttatggcattagtgatggccacagagaatgccaacttctgtgctttggacttgggacctctttagagaggggtgccgtgttcagggcacctcagagcgtctcgtgtccaagctcctggaaacctggtggcagctagtggaatgcctgccgtggggagcggtctgggagactctggcgctagaagtcttgctcttatgtatacacagtctttaattgaacactcgtaaaactgtaatgagccatttatttatttgaatggggcgagttattaattttcagcaaactgcaggcagccattctgaggtgaatcgtctggagacattctgctccccagggtgaaggtctgcgacaggctctgagatctgagcccatcgcctgatgtggccttgcctttttatttcccctcagctgccccaccccaggatgcacaggctcagggcacgtccggggcaagtactccaggcaccgaaggtaagaggacccttggatctcacggagattcctgggcggtagatttggagcccctgcccactctgcagatggagaactttccatctttttccatggctcccaaggccaggctgctgacccttctgcgaggcagcgacctcccactctagcgtggagatctgtgtggccatgggcgtgccatgtgggggaagacagaccatctgacctcccgcgaggcagcgacttcccactctagcatggaggtccgtgtggccatgggcgtgccatgtgggcgaagacagaccatctgaccccctagtgctgcactttgctttttttgtccgggttccctgcaaggactggatgagtctgtggggaagggagggagggaggaccctcgggaggggctcatggggtgtctgaggcctctcgtggccctagcctggtcctctccactgcctactcctccctcccagtttacagagctgccccctggccaagaagaggaagctggagggcgctgaggctgagcacctggtgtccaagaggaagtcacaccccctgaagctggctctggacgagggctatggtgtggacagcgacggcagtgaggacactgaggtgaaggacgcctctgtttcggatgaatcggaaggaactctggagggggccgaggctgagacgtcaggacaggacgagattcatcgccccgagacagctgaaggtgctttgtcgctctttcttccccgaataaagggcgcttagtgtggccctggagaattgcagcctgtgagcggggaggggctcactccgggcaagagaaagcccttcctgagaacaaggcatgtcttgtcccaacatgtgctgggcttcctgggagagaggtctgcccatggtgtttatggggcctgtggtgtgtttgtgtgtgaacactgtgtgcgtaggagagaggcaggacagacagagacacggggctggtgtgtgtgtgtgcagttgtagtgtgttttggcaggtgtgtctgcatgtatatgagagagacagacaaggctgtgtctctgtgtgtctgtaagtggggaagggaggatcttagactggccctctgttctgcctggccctctgggagacctgcctgggggcatgggtgagaggtctgcgttcccctgaggtactcacaggcagatgctgaggaaacacctcaggttgagcttcaggtgattgaggaccagatggagcctctgaagacggggtgcccggggaggccaagaggggaaggaggaaagcagacgagtcccccacttccttgtggggtctaccaggactgccatgttggagctcctagcccttggcaaaagtgcatgaagcaggtgctttggcccctgggtcccggagggaggggtctgtgcccctgagagccctggcagatctgtagagacctggggtcagatgaggcccaaggtccactccccccaccatccccaccactcacccagcactccccaagcttctgcagtggggaagggtctgagatggatttcagaagcaaagccagagagggtcctcaaccccagctcccttggggggctctggagtgagtgcgctgtcccgtggaatcaacatagtcctagatcccaggtagaaaagacacacattttcctgctttcttatcaagaagggcgtctggggttcagctgtcaacctgggcttggactttcccctccgaagtaggtggatggcagggcccattcctaccactgtgggacgtgctggcccaggtgtccttgctgacaaccctacggggcctgcatgtggtgagcacctaccatatcttagtttcgttttgtttttgttttgagagagtctcactctgttgcccaggctggagtgcaggggcacgatcttgatttactgcaatctcctcctccttggttcaaggaatagctgggactacaggtgtgcaccaccacgcccagctcatttttgtatttttagtagagacagggtttcgccatgttgaccaggctggtcttgaactcgtgacctcaggtgatccgcccgcctcggcctcccaaagtcctgggattacaggcatgagccaccgagcccattcttatttactgattttcaattatgaaacaattattattatttttttaaaatctgacttgctgcttaagctccattgtatacaatgcaggtttatctgatttgggaaagtaaacgtgatgggagaggaacattaagaaaaagtatcaaagtaattcttagtttaaaaaatacatcagtggcccatgacctgcctcctaaaatatattcaccgtgatttctggattcaggcagaagggttgacagaaaggtccataccaaatccccacttctggagtttcatgtttccccttggctcccgtataaagagtgagtggtaggtcaggtggaggggtggtgggtgtgttggggactggagacctggagtcttcccacgtgctctctggcccccacgttgattttgattttgtgcaggaaggagccccgtcaagtcccattttggatccaaccccatcggcagcgccactgcctcctccaagggcagctacagcagctaccagggaatcatcgcaacttctctcctgaacttgggtcaaattgctgaagagaccctggtggaagaggacttgggccaggcggccaagccaggtcctggcattgtgcacctgcttcaggaggctgcagagggagctgccagcgaggagggtgaaaagggcctcttcatccagccagaggatgccgaggaggtcgtcgaagtcaccaccgagcgctcccaggacctgtgtccccagtccctggaggatgcagccagtgaggagtccagcaagcagaaaggcatcctgagtcacgaagaggaggacgaggaggaggaggaggaggaagaggaggaggaggaggatgaagaagaggaagaggaagaggaggaggaagaggaagaggaggaggaggaagaggaagaggaggaggaagaggaagaggaagaggaggaggaggaggcagctcctgatgtgatctttcaggaagacacctctcacacctctgcccagaaggcccctgagctccggggcccagaatcacccagtcccaagcctgagtactctgttattgtggaggtccgctcggatgatgacaaggacgaggacacccactcccggaagtcaacagtcactgacgagtcggagatgcaggacatgatgacccggggaaacctgggcctcctggagcaggccatcgccctgaaggctgaacaggtgcgcacagtctgcgagccgggctgcccgcctgccgagcagagccagctgggcctgggagagccagggaaggcagcaaagcccctggacactgtgcggaagagttactacagtaaaggtagggctcaggggtggcctggccctgcagactcatcctttcacccctgccccaggtgtgcagatgcaggctgagagcccttctaggacagggggctgggggatggcagaaaagcagacaaaaggacaaatacatgacacagactgtggtcagatactgagcaaatgggttcccacactgctttacatagagcgatctggagcgagacacagcggagacgtgtgagaaagaaccaggtgggagagaggaggtgggagggacagtgacccacccacagtgactggtcacagcagcatctggggtctggagagggtggggaccgtcctgtcccttccaccccaactcacactcgtggcagggattgtgctatgacagaacccgctgtttcctacagccatgctgggtcatcctgatcctctcgtggggtggagaccagcaggcagatgtgaggggtgcccttgctcctcagagggagcagcctgccgctggctctgcatctgtctctggatttggctctaaagtgtgcagggtacaggggagccatcccctgatcgcacggagtggctgatgttgaggtgaggatagacaaggagggctgcttggaggggcctggggctgggctgacgtggttggggagcagctgggaagcagctgatgtggttggggagcagctgggagcctggagtgctgaggtctgaggacgaatcctgagtaaacggttacggccttcattgttactggggtgtcagggtctggacaacaggctggctctgctctgctgactgcccatctcagattcctcctgggacaggggtctggggagcagggctggccaggggctgctccctcagtgagccatgccagggaggccaggccttggacaggtcagctttgacccagccggcctggtgcggagggcctcctgcacctgggcacttggcctctattctcctaagactagggacctgccctgatctcggcctcttttttccccatgtctagtcctgcatctcttctccaggtggacgggggcagtgggagttcttggtgctcttccaatgagtgcccccaggaagagttagctgagaccagggagggagcagataaggagagagaactgggatgggagatgactcaggtgctggagccacgaaccaaaaatgcaggagacacggaattgccaaccctgggaagatgcacttgggtcatgggagagacagacctgagtgagacataattcaaggggcatgataggcaggtcagtggagacacgagggacatgttttccgggaacaccaggcatatgagacaagctcaggggaaagatgctaaggggacacaggtggggacatggtttcagggtgagatggacccaaagaatggctttgcggggacaccctttagggcaacccagatggcgggacagctctttggggacccagatttaggtcggcagtgtcatgctccggccttgtggggccatgggcacaaagagacacaggctgaaggtgagacttagggacaggtgtcaagggcccggggtggttactagcctggctgtggtgtgcttgggccgcacagatcagcgcagaatttggtgggacacatatgaggaacacagacaccaagtgacagccctaggcccaggtttttgagggtctcagacctgtgggacagacataggaggacccagatgcaaggcatcctgccttcagggatagattttcagtgcatggacccaaagggacacggccccgggtgacacaggtggccaagctgagaacaccaggcagtgcccagctgggctgtgagtgtctgtgcaacgtgaacgtgcggttctggttctgagggactgatgttggggcacagatgctgcgagaattctggacagaggccgtgggacaggggtggcaagcccaggaggccggtgttgggcacgggtttggaagcccctcaggacacccctgcctgtccacatgggtggaagtctgactcctttgaacttggggcagcagagcaagagctccttccctttggagccccctcctgggaccctcctgctctgaggtgggagttctgagtttggctctgtgacctctgcaccctcccaaaggggacagctctcgtccaaaggtgtttcactgagatgtcagctctgctctgagggtcctccgtgttcctgctggtccctatactctatagtgaccggcctggacctgcagaggctagaagaggtcgataactgagatttgggtttacatttctgcccaggcatagattagtcatgcagccttggataagttactcaactcctttgtcttcctcgttttgtcaaatcccaaggatatctcctggcaggaatattgccaaacgccttgacctctctaggcagaaggctgacccatgaggcctccacactgtcagaggagagaggaaagaggactccagcggccgtctgggttgttctccttaaaacgctgcacaaactgctatttgggattgtcagggcagcctcagggcttccgcacaggcagccagtgtgggctggtttcttcagggtctcctgactgtccagccccagtccctgttcaagctcatgggcagtctcgcctcccttctctctggacagccagagagagggttcctgagctacccctgccccctctctgctcaccacccagcttcctggctctaactgatgtgacttgtgtgttttagatccttcaagagctgagaagcgtgagatcaagtgtccaacaccaggctgtgatggcactggccacgttaccgggttgtaccctcaccaccgcagcctttctggctgtccccacaaggataggatccccccagagagtgagtagctctgtgcagcgttagccctaactgtgaagctcacgctgcctctgtggtgtttgggtggtgtctatggggaggcgtggcctgcccagggccataaccttcccctttggtttgtccagatgctcatccttacatctccccgctttcccccacaaactccctcagcccaaacttgagccctttgaggctggggccctgcaaccagcccatttgtctacctagagacgccagtccgggtcagagcccacagtaacagatcgatgggagggggacaggctagtgccatccaagctgggaagggagaggtcttcttgcagcaacctctgtgccctgaaagcttaggaagcaaatacttgttcttatgtttaggctagaagcagtaattgtgaaaattaaatttaaaggagcaaaccacagaatgagaggttttaaagctgagtctggtttctgccgcaggagggagggaccacagtggtggtggcggtggggggcatgccctgaccaggctgagggtggggagttgtgtctgcaggctcttgggggctggagctgccctgcgttgctgtgtcccccacctgcctaccaagcagcagcctttggacaaggctcctgcaccctcctcagcctgtgctccccacacagctggcgctccccagattctctgacagcctcggctccctccaccccctgttctcttacagtcttagccatgcatgagaacgtgctgaagtgccccactcctggctgcacaggccagggtcacgtgaacagcaaccgcaacacgcacagaaggtacttggactgagctgggccgtagtgggggccagggtgggggccgtggtgggggccagggtgggggccgtggtgggggccagggtgggggccgtggtgggggccagggtgggggccgtggtggggggctccacgtggggtagggcacctgggttgggcctgtgtgtccctgcctgggccgtgagcccgtgacctgggacggggctctggcctgcctggggctccctgtgtgctacccttctcccagcctgccgccctgaggagtgggtacaaggtcagggcacacctgggcggtgaggggcctttgtgagggcagagtggcaactggaggtgcagtcacccagtggtgttgctgccttaaccctacgagctcccgagagagcagggggcggcctgcagaggagggagcaatgcaccctctgtgaagagaggtacaacaaccatgtgagagccaggtgaatactttgtgtcctacccacattcagaaaacctctgcacactggctcttgctcctgagtgggaagggcagacatgaacagtaacctcggcaggccaggactgtgctctgggctgctttgtgggagttctgaggcccaggtggaagtgaagcttcccgaccaccctcgaggtgtagttgttgactggtcttctatggtgaggggggactactcctccagccttaccctaagtgccatgggtggccgtggcctcggtgggatatgctttcccccagcaggcttatgctcagctgaaaggactgccagagcttttgaggtcacttcatttgaaaagaggccagttccccattacgtcacctccctgggctggctgagggactggcgctggagctcacagttaactttattctgacagatgaagctgctgcctccgtgtcttagactgagtactttcctgggcctgtgtcatccagggtcagtgcccaggctgtggtccaagtggggccctgggctgccccagagcagctaacagaacaagcgccagagagggctgcagaatccagccctgcaagctgggaagggagaggaagggggtgagggcaagcctgtctcccagacccatgcagaggaggcatctttgcccagagctttcaaggcctttaggatatatttcatctttgtgtgtccttggcatagaatgttccaaaacagaaactgactgggcagcttgtactgtgagggctcaagaacagagccagagagaaaacccctgtcctgcagaatgacagggttattcccggctctgggcttctctggagttcacctggagttctcacatctgaatgaccttgccgtgagacacccacacacacagacacccaggacaggacaggcatggaggggaaggctcagaaacccctcctcttccttcctctagtttgtctgggtgtcccattgctgccgccgaaaaattagccaaatcccatgagaagcagcagccgcagacaggagatccttccaagagtagctccaattccgatcggatcctcaggtgagtgagatgagccacagaactgaagaggctgcctcccaaatgcctgcagagggcttctcagtctcccgcaggctgtatgtgcatgtgtgtgagtgcatgtgtgtgagtgtacgtgcatgtgagtgtacgtgcatgtgagtgtgcacatgccccgggccccccaggagcagaactgcggggcagttttggagccacacaggacagagtctcatgtctaccacattcgccagtgcctcagccaaagcgcaaactcctgcacagttgcctctgcctccgacatggggctctgcctccttggagtcgtctgatgtgaccacttgaggccccttggggattcatttgtggagatgctggtcctgtctggaaagagcagactgcaccagccaaggaccacggacgtccaggaagcaccatgagccactaatccttggccgtcctgcctgtccctccccgaccccagggatagaccccaagtcaaggaagagggtgggtgcaggctttgctccccagagtgctttgtggcccctgaggttctgagatcacagtaggtgtgtgtgaacatgtgggagcgtgtgtgtgcatgttcacacgcctgtttgtgtttgcatatgtgcgggtatgtttacatgtgcgtgcaagtccatgtgtatgtgaacacgtgggagcgtgtgtgtgcatgttcacacgcctgtttgtgttcgcatatgtgcgagtatgtttacatgtgcgtgcaagtccatgtgtgtgtgcatgtgtaaatttggctctaatcaataaggatctttcagaatgtgtcccattagtgtcccctccttccatgtggctctaagaagtaagtgccacaaataaggccagaggctcagagagttgcccaaggccaccctgcccatcctgcctggcttcaaagtctctcctctatggagctgagtccttggaccacggtacccactgtcgaagaggacacttccactgctcctgtcttcacctgcagacaccctgctccccactcccgtgaggaactagaactcacacacagctcctcctccccagctctcagacccctgttccatatctgtctcaccagacaagagtgtaggagaccccggctggggtgagcgtgaatgactgcatagccccttccactgtccgcctcctttcggggcccacctgaccccggcccttcctggcacataattggcaaagttccagccagatgatcttcgctgctcaccttggctgtgtcatgcccaggcccttccctggtctgctccagagtgttcctctgaaggtgcaattcccacacgtgggatctctgggcagagcacagagacttgccttcctgctctgtgggcatgcttgccatcccacacacaggcaccttcagccctgcaggtcccagcaggctgctttccaccagctggctctcacaatggtttgaagctgcttttttcctctatcttatttgctgttccctccagcttcctgtcagttgctaattcaatcctttccctctttgatctaaatcaccgataaaatgtcaaaccgcagatttggcccccgtgtgaggccaggcaggggtgtcaaacaggctccaactttggagactgcactccctgggactatgacctcagtttgttcacttataaaagtaggacaacaaactaagtcgctcatgaggctcaagtgacactctgccgccctcagcccatggtgaatactcactgaacgctagagagattgtggctagggtggaggaggcctcccgttaggcccttttgattctatccagcccacatttctggctatcgaactttggggtgtgaggacgggctttgcaaagcttcgttggcattgtggacaataagtgtacagattctgactgaagccttggtcaaggaagccatcaacggtggtaccaatgttaagcttattattattattattatttttagtgacagagtgtcactctgttgctcaggctggagtgcagtggtttcaatcataactcactataacctcaaactcctggtctcaagtgatcctcccacctcagcctcccgagtacctaggaatacagatgtgccatcatacctgcctattttttttgcgtttttttttttttcttttttttgtagagagggtctcactaggttgcccaagccggtttcttactcctggcttcaacagacctgccttggcctccaaaagtgcttggattatagacataagccaccatacctgacccaatgttaagtttaaagttagttttttccctcctggcctcactcttgcaacttttctatctgccactggggtcaggatccatcctggggctcccacccttcctggagaaggagaaaacacccacgtcctggtagtgttcagttcttccaggcccatcagagctggccgtggttgcagggctggcctggtggtcctctgtgctgggctctgttcttagtccacacttaagttctcgtagcacccagcaccttggaggctgtcattgtcagctccttcttaattccactgattgtacactttccagactgaagtcattgcttggtccagacaggaacaaagaaagccatggctgcttgccaggatctcctcttctctgagctgccaggttcagaagctcctctgtgcctgtgtggtcaccagcatctaccaccagtcttcctgcccctgtgccttctatgccagtttcttcgtgccatcttttgtgcatgtaaaatcctgaagtattccaagagcattagtggcagtgaactgaatgcttgcagtagctttttcgtggctgttgctgacccttccaacagttccttgagggtccacctcaacacagctttaagaagagggcagctgagggctgagtccctggctgaatgaagaagggtcaggcctggccctgaggccactcctcagaaatgcacctgatacaactagcgtctcctgtagattcctcagcttcctccttgctggggagttctaggttatgctgccttggagtgtcttgctattgtcctgggctatgctactctttggccctgcctgatactcactccagttgcagctgagctgtttgaaacctgctctcctaagttctggggaaaatcttaggccctcctctatctgatgctgtcagcaggacaggccattgattatttgagggtcctattgcttcctccctgcaggccattcttcaccggcctgctctgggagcccttgaccctgggaggtggaactctgcccagctttagtggtggaatatgcaggggtagtgtcttcctgagtctccttcctcaccagacgctgtgaggcccctgcctgggctgcagattggggttggggagggtggcacgggatccccaggtcccatctcactggctgtgcatccctgtactgcaccccaggcccatgtgcttcgtgaagcagctcgaggtccctccatatgggagctaccggcccaacgtggcccccgccacacccagggccaacttggccaaggagctggagaagttctccaaggtcacctttgactacgcaagtttcgatgctcaggtttttggcaaacgcatgcttgccccaaagattcagaccagcgaaacctcacctaaagcctttcaatgtaagttggggagaattgttcttgtttctcttctgtgttgctcctgggaggggcaggattcaaggggcagtggaggagggaccctctcgaggagctactagggagggaaactctaccctcatgggaggaccacgatgcaggctggaggtctcagctgtcccagtgggcactgtggtggctttcttggggcctgcatctcactcctgctgccaccttcatgttcaccattaacatttatgtgtctcctagttatttgtgaaacaaaacccagatccgttacgggcgtgtgtgtccaaagacttcagagcaaccccaccagcatggttcacactgggagacgccactctccccactgtcctcctgctacctgtttaatcccagtgcagccggctgtccatttcccagccctgcctctggggagggtcagactgtgggctgggtggggccagatgactgcggggctgggcccagtgccctggcaggaagccattgctctcctggtggggaccatcttactggatacaatgtgttatctgtgacattagtaacaaattttctgggtaattgtactgacaaaaatcattcctacaaatctttaagaacaatcctttctgtcttgtcttgtcacttactgccctaatttgtggaataagcccattagccctggaagtgcatgcgaaatggaaaagcattcagtgtacacatgagattgggagtggcatcgcggggcagatgttgtcagccccaaacatgacgtgacgagtttcctacatgagaataataaaagtactgattgatgcggctgccagtggggtgtgagcctctcttcctaactttgacagaacctgctctttaggatggaggacttcctgcctccaggcacacatgcctacttggatgagggaatgcaatggtgccagtggagagggggacctcacgataagctttccaatatatctagacctttctggatatactggtgacatcgtgattgctgagaacatcgtgcatgagagtgattttgcagctacagtacaattgctagaaaagataacattctgtgccttcatttgtcatgttcatttgagcaataatgttacttttttaaggcagtgatggttaccggggacaccaagtcagcctaaatatgggtacacccttttgagatcatgggacaaaattttcctatttgggcgatatggcaaacactcatcctattcacagaatgcttcagtttctgatagacaagttatttttgtttgaaatatcagggctgctggaatgtcttggaggcttttactccttttgcccaaattttcactgagccagaaacaagattgtctcctcagtcccctagaggagggtgggtgggagtgaggtgtgtgaggacttgggactgggacgggtggccaagcccctggcccacttcgatatagctgtgccctgggccctcccatccctcccaaagtgccccctccccactgacttgtctgcattgctgcctcttttcaagttgtatatcagcctggtgttgttccctttttgcagccaaacctttcccaaaggcctcttcccccaggcacagcccctccagtagttatgtgaggagcacttcatcctcttctgcaggctttgactactcgcaggacgccgaggctgcacacatggctgccactgccatcctgaacctctccacgcgctgctgggagatgcctgagaacctcagcacgaagccacaggacctccccagcaaggttagtacatctgccacagagcctttcttgggagaggtgagttggtggaatttgcagtcaggcccacctgctctctgcacaaaatgtccctaggaatggcttgtgcctagctggcaattctcattcttaactttttctccctcctggccatggccccaaggaccgcagagcttggatgggtccaccaggagaacctggtgtgctgagtgaagggggaccaagggctgcgaacacaagttcccacgtgttaggttgtgtgcacaccatgcgcccgcgtgtctccctctgagcctgagggtggtgcacacacatgcccatgtgtttccttctgactccagggcggtgcacgtgccctgttcacacgtgtttcccgcagtcttgtggttgctgacacactctccttgctcagaggacctagtcttacccgtgtttatgacatgtcctgagggactggtttttgtgctgttgggaggcaagaggaattgtagggcccccttcatgggaaatcaggaaatggcagctggattttttccctctcgctgcctgtctgtccccgttgtcctgcttccttctatgggaaccagtgttctggactctgtacgtttgattcaaatggaccagaaggcacacatgggaagggatggaatcgctaacagatctcacctttgccattgcagtctgtggatatcgaggtagacgaaaatggaaccctggacttgagcatgcacaaacaccgcaaacgagaaaatgctttccccagcagcagcagctgcagcagcagccccggtgtgaagtctcccgacgcctcccagcgccacagcagcaccagcgcccccagcagctccatgacctctccccagtccagccaggcctcccgccaggacgagtgggaccggcccctggactacaccaagcctagccgcctgagagaggaggaacctgaggaggtgggtgcaggcgcctgggcaagcagtcaggcggctgcagccagcttgccctgcctgaggctgttgtgatattggcttttcaaggaagcttctcctcacaggcttctggaagagcctcggggagccatcccttttcgtgaagggtccttcatcttctgagcagctgggactcaggggctcaccctctgggtgggattttcagcagcagggtcatgctgtgcccttgtctgtcaagaaggaggtggtcttctcacccctgtggagcatggtggccagcaccaacgtgggcactgtggaggcatggggaggagaaaggcatcgttcagatcccaggagttgattggggaaaagctcaggtttcttgggttttgagcctcccaccaccctgcagagctaacctgctgtccgggtaggggcagagccagtgagagagcttaggacctgggcttaggatcgcccatggtgggcagttctacgtccccgagaccaggaccaacctggcatgggtgctggaactgtggtctgggaagcaggggatccttccctttttagttccttaaaacatgtgaaagaagaatcctccgaggccacagccggttctgggctttttcccaaggaggtgtgtgtcctgaagagcaaagtccagctgtgagggcagcccagggtccaggcggcagcagccgcgtgtgtgagactagcaggcccctctccctctccttcccctcccccaaagcccctcaggaggtggaaggggtccctgtggaaggagcagggccagaccctcaaggaggaatgaggggggtggggctaggcccctatgaagggtgggggctggatcaggcccctatgaagggtaggggctggatcaggcccctatgaagggtgggggctggatcaggcccctatgaagggtgggggctggatcaggcccctatgaagggtgggggctggatcaggccccctccacaatccggcctcagtgggaggcagacttccttaccggccctcacaccaccctcaggtcaccccatttcatagacgagcagcctgggaacccacaacgaggtccaattatccgaagactgttattatgctgggctgtgggcttcacgggcatttcctcatttgacccccaaaaacctttgaggggctgctgttatctcaagttggacagagtggcacctgggccccaagagcctgagccacttgcctgggacacatgcgagtgcctgtcaggacaggattttgagctctggttacagcatcctgcagaatgttggccttctgacccttcctggacccctggcccctccgtgggagggactacgccctgcttatctgtgtccacagctctgagcctccatacccagcattcagttcgaagcctttatcaagcacctgctgtggtcaaggcatcgcactggtgggcgtgtcgggccaggtggtttcgaggttactgcgattgttgtaatttgtatgttattaccctcgttgtgccatctcatcttcatggcatttcggtaacacttatttagtgcctactgtctattgagtgccatccctggctctgaagggaactgtatcctgatgtttacgctgcggagtgatgtggcggagggaggccagggagggtgtcaggagcctgccacactgggcagcaccaggcctcatttctagggcaacgcaggacctctggctgaagcaggggagggatccagcccctcaggggtgttgtcttctgtgttttgctggggggagttaagtcttcctcccttatccagaagataggagactccgggagatgcttctgtggacactgtcctgaagggtccctctccctcgcccactgggttgggcgcccaggcctccccgccagccggttaaaacatcttcctgctggttttttgcagtcagagccagcagcccattcttttgcttcttctgaagcagatgaccaggaagtgtcggaagagaattttgaggagcggaagtatccgggggaagtcaccctgaccaactttaagctgaagtttctctccaaggacataaagaaggagctgctcacgtaagtccctgtttggctggcacagctcctaggggaccctctgtggcctggggaggaacaggccctggtcccaacccatgacgaccgggtctgctcaggctttccccgacctgtcctgaccacctcgagccaggcagcctgtgacaggagccagggtattcagaggtttcccaacacctttgtgttgtgctgggctttactgcaatcttctaaaagtgattaagaacaaagaaatcccctggccaagctcaccaagcaggacagagcagggcaggggcagagtggaggagagctcctcagagagctctgcaggaagccctcggggcacccagaggcctggccctctccctgaggccgcagctgggcacgttctgccctgggctccatggccaaggcctggaatgtactgccttagggctcaccaccctcaactctgtcagcctggctggcccagaggctgcgtgtctgagctggtccgcatggggttggaacagacagagttgctgatggatatgaatcagatgtcaatgaccttctggtcagccttcattgccagccacctgtcctaggggactgtgagaggctgtgcctggcacctgctccacaggtgatccagctctcacatgtgctcagagtacatttctggggtccctcttctccccaacctgaacccctcttgtaccctcacacttgtagcttgccctcctgggagtggctggatccagggaaggccttgcttcagggcctggagaagggaaggagctcctctgcctaaatattcgtgggcacatacacgtgcacacacagcacatgtgcgtcagaggcatcctaactttaagctcaactttaatttggttactttttcttcttgagttaagttgtgtgggagaaacttccagcctgagaggcaccggctgtcctccaaggactgagtggaggaggggccaccgcttggctcgcgggtgagccaggagtgggcaccagtctccctcgcagagcaggctcagcctggggggcaggtacacaccactctccggtctgacactctttttcctttgtccagctgtcccacccctggctgtgacggcagcggccacatcaccgggaactacgcctcccaccgcaggtttgtctcctgctcgggtccgtctggcctgggtgcttcgtggtgggtcttcctcctctcctcctcctctgctctccctctttggcttaccccaatatcccatctcttctctttcagcctctctggttgccctcttgctgacaagagcctcagaaacctcatggctgcccactctgctgacctcaagtatgtttgcgctccctgacctcctgtctcttgggcggcaccctcgctttgctctccttccatgaggctcctgccaaaatcagccttctccaaggtgccaagcctcagctggccccagctctcctgagatgggcagaggggcagggccgtggaggggccgattctgcttggctggggctgctctgcctgtgtgcacctgctctgagctctgctgtttgcctctccgctgggggctaggggtcgctgcaggctcctgcgctgctcttgacccatcccccaccctccagcctctcctgaagatccccgacagggctgtctgggcctgctttcttactgccctagagatttgggaaaagcccagaaccgaccagggaacgtaagccctgccgtggctcggcaggccacaggctgtgcggctcttgctaaatgaactgaacgctgataatgaagagaaagctccttcccctcccctctcctgtcacgctccagctgcttctgccttggccctgatgccctccccccatgctcatgccttctctttgctgggctcacccgtttctgcttctgtacctccctgcccctacctaacacatgggcagggcaggccctgcaggcaccagctatagcttgctggacagtcctgcacaaccaggcgcaagcacccagaggtttccaggggtcagtgtcctcctggggctggagtcagggactgttactgcctttggttttcatgcctccagttgtgctgtgactcctcagcctgtgtgaccctgagccatggggagctcctcctgggcaccggggccgagctgaggccttggaggaagggggtcccattcttgtctcctcaggtcacctctctccaggggtgtccctccctcccataggcctctgtgttgggggccctgaatccaggtcaacacaccctggcttattccattctggggccagacaggatcctgggcactggtgcctctaagatgaggaaatgaacttgctgaaggcttctagggaccttggctggctcagacctggacagaaagctctaggtctcccagagcccccaccagcagccttgtctctgttcccctctggaggctggtctggccccagcagccaggaggagtgtgtcatgaggcccttcagttcccacagagtggggtgcagcatctaagtttccttcctggaagttaatagcttcaacataagcattttctgaggctgagatcaccacagcagctgcacacattgacttattcattcattctgccgcccactttgtctagtcctagaaacccaggaaacactcagtcctgcagcttctgggactgtcctctctccctctttccttcttctcttgccatctttcttgcattcctttttccttttccaattctgctttcttttccgtgattagtctccatggtttttcccatttgggcctgaataatttaagaggagaaatgtggctgcaggcactcagtggccccaaatgtcaccatgtcctttctgtcctgtgaagtggatgcttgggcggatgaaaggagcttggcacagttcgggcctggagacatggccgtctgggagagttagtgcttttttaagactaagagcctgtgaagaaccttaacgccaaacttctttagaaataacgaccaaaagcctcccctgtgtgaaagtgaaccgctcatcagcatcagcagggtttgggcaggcagccacggcctccaggctccttcagaaactccactctcccccaggggcctttccatgggaggccacttcctttcctccctccgaccactgcatgagcttgggacgatggtggtctccccccgccacgtgtcctggtgtaccaacctccttgctctctgccacctcctgtgtgaggcggcatcgggcactggcccctcctgatcagcctcgtggcagccatgggtgacggtggccttgggacaaacgaggttcctttcatgacttccctgtccgcacctggctgcagcgacagtcagatgatgtgtgttctgtgttttaagtgaatcccaagggcgttcactcttccctcccatgtgtctgatgtggtcaagggctgtgaggacatggccgcctcgggccactcagctcatcttgtgttgggagttgagctgcaaccacacacacctgccagggcatgacaggctttgtgcagggtgaagaatgcctgtccacagcacggggatggggcttagagaggtgagacctggtgtgtattgccaaggtagagggtgcccctcagacacggtgttcccttctgcccagatggggcactcagaagcaggtggtgggaggggtggatgtggctccagattcctgcagctgaccctgggggtccacagagccatgaggggcatgcagaggggacacctgctcctctgactatgtgagtactttcctctctgggacacaactcttgagaaaagccattgaatcgggccttagtgaggactgcaggatggccccccctgtgtgttaggtactgccggccccttgggagttatacccccacctgagactcactcacagatgccatcgggaagtatctcctctgctgttgatgccactcacagtccaatgctgtgcttatccccgttgaggcctagagctgctgtgggtctgtcactctggccacctgagtggccacttgcccaccgcactgaacctgagctctacctgatgctttgctgccactgagacaaggagctggagccccaagtggccacttgaacagctgccaacccaggaaggagaggcaggccatcttcagttctcttggctggccagcaaggtatccaatgtgtggcccacagggcaaggatgaaggaatgtgaggctccccaggagggcaccccaaaaaaactcctaggggccgaagagaaggttgcaagaggtggggccagccctgctgtgccgccacagccctttgggtgccaggctgtgcccggcttcatcttcctccaagcgaggagatgtcctgtcccagtggccggatgtcacatgtgctggtggaagactccggtgaggaagggccagcagcatggaaagtgagacgtcctccctggggtctgagcaccactgcaaagtgcctttgagcagcaggtgatctggacacaagcactgaactcttgcctggctcctgcagggtcaggggtcaggaggggtgaggcacagagagcaggcctgacgggggatggatctacccgcagaatcaggtcacctcctcccactctctaacatcagcaggaactcacatattttttcctcagtggacattcggaagaaaataacatccgtgcttgtaatattaaagtggaattttgtaccaccttatgtgatacattcgtcaaatagttttgggtgtgtaaagttggacttttgtgtttctcctccttactctctgctgtaagccactggctgtgtgaactctgcagtcatgctatacaacagccaggcctggcatggccagcgccatctgctctgcagcaggtgtgcaaaaaggcctctgttcatttaccagcccatggtggccacgctttgtgagggcaagctcccagcccatccaagaagatgaactggtcttaggctgtgcttcaagttatggctcagatatgctctgaatgcctttagtccagaccggaccctacagaagtccaagctgggagcccttcgtgtccttggctgcagtggaccctgtaggcctgtcccagtgcccaggtttggtgtctgggtgtaaaccgatgctggagcagcagttggctgctctcctctcagacttcctggtctccctcggggagacgggggagcaaagcactgaacccctgagatgatcgcatcagacccctgttgctggcagtcggcagccggggtgaacatcggcgatgctcctctgcggacaagggaatgtgggtgggcgcactcaagggctgagcccagaaggctttcctctgggggtcccagggctctgggccggggctaaacgccttcacgggctcccgttccagttctgcttccctctgcaggtgccccacgcccggctgtgacggctctggccacatcacagggaactacgcttcacaccggaggtgagcctgccacaccctcaggtcctgggccccaggggtgggcagggagtctcttccttatatgaagattagaagacactaatgttgctgacagctagagtccattcccatctctttaatctgaattgttgccatttccagaacctgattaagttgtcctctgcagtaagataaaaagacaaggggtcagggctaggggctcgtggtaatgcttctccttcccgaccctgctgcctcgtgtgaaggctgtgtctgtggattctgcttcttacaactgacccatcggttgccctcactccctcccaccccaccctggggtcacagagcttgaggggagagggtgagatgaacgggtgtgagaagctgcggttccagcactaaggtggccttttttcctctttcgaaatcagcttgtccggctgccctcgtgcaaagaaaagtggagtcaaggtggcacccaccaaggacgacaaggaggaccccgagctgatgaagtacgttgggccatgctggctctttcattgcattgcggaattgagattttcgtgtgttttataatgtaaaaaaactcctactagattcccttttcattaatacaacgggtcacctaactgaccaacgccaactttcgtttctttcatttttatggaagctctcatacgctacacgttgatacctgtgaagataggagccctggatgtcgcgtggagggcatgggtgccagattttctgggcttttcaggtctggagtatttgacggggctgggagaggcagagcacccttctacctatgtcttagggccacctgggagtgggccccagggccttgcaacctgcagaatttgtctggcaggaaaggtgagatgcaggagtcaaggaggagaaggtggttagaacaatgttgaagctccaaatcccatgtgtccatccacccacacacctgtgcagagagctggtagattgagagagccaggaggatctaaactgggagccagacactgttgggtgaaggaaagaggacatcttgggccttaagtgacccaagtccttgaggagaaaagattctcctctattgctcttctcactggggcagggtgggggctcgtgtgtctttgtggggcttataggtgaaccctgactctgtgtgttatcctacttggtgggggtttgtgtccttacaagcttattctcccaatagggaacgggtcccctgcactgcccacttttaggtggggggaatgctttgctacagactcagaccaggtgacccactggccattttgcccaggaccgaggtactttcagagctgacatctggcaaaatgggcagtgggttccccagcaggtgagcagagtggaaatgatggctctggacaccttgttgcccagggttaggggccggctcggtcgggacggggccctactatgcccgcaggaagcaggttgccctcgttgtgttacctgctgggccaagagcagccagacctcacgcccggggaggggcaacttggcctgagattgggttgctcctcctggtagtttgctccagctgtgcccaaacacccggccacactggaggagcctaattgaccaacatcacatccttcagacggggatgggcccaccagctgtttggtgtaataggctgtggcttgtttatttatttaatttttacaataaaactgtaatgaatgctaaattaacaatgcaaaattttggttgttagtactatgaaggtcgcacactaaatgctgaggtggataaaaagcattttgcccctgagaatccaggaatttgcctatgatcatataagtgcaacacctttatggatttggcaaggatcctgctggcagggatattataagtgaatcgtgctgcatttgcaaatgattaaaatcaagatcagcatttttcaaattaaccaggaaaaatggttttcctttctaatgtgctgtcaactgagctttaaaaaaaaacaagagttctgcagccgagtggagactgtgactttcagaaacacttcagcatttgcaggatagaggaaggtcctagaggctccatggcagagggaacctgactactgaaccctccgttttacagggttccttcccagccataaactttaactgcacttgtaattgcctagcatatttaaacagatgcatatcaaagcagaaactggaatggatgtgtcaggtcatgctgagggatgggatttcgtcagcatgcatgagctgtgatttggggagcctggtggaacaggagtcctttttatgatatctcctgcctgcgctatttaaaattaagtcacatcaggcgcttggtggtaaatccctttgccacagctttataactggtcataaaagtcttgcggaggttccagcatgggagtcaagaggtgaatgctccccttgccctgcccactgtccctggaggggacttctggtcctggccatgtttctcatgtcactggcacacacggcttctgccccccaacacgtgataggaaacactagctcacccaagaagcacagaggcctcaccagctcagtgcctgcccccaccgccccagcacctctcaacatgatgtccctgacagcttgaaagtctccacaccaggttttgtgagaaagagaacatacctgaaatctgaaatcctctccatgtatgcgattcaagggaacaaaaacagtttcccttgatgaaggggagtagtgttttgcaagaaagggagtgaaaataactcagatttgggccgggcactgtggctcatgcctgtaatcccagcactttaggaggctgaggcgggtggatcacctgaggtcaggagttcgagaccagcccggccaacatggtgaaacctcatctctactaaaaatacaaaaatcagccgggcgtggtggcgggcgcctgtaatcccagctactcgggaggctgaggcaggagaatcgcttgaagccgggaggcggaggttgcagtgagccaagattgtgccactgcactccggcctgggcaacaagagcgagactccatctcaaaaatactactactactactaataataattcagattcgactgtgtagagtagctgaagagccagccaccccccatttggccacagagcctcttcccagccagtctgtgcctggtgcaggtgtcccccagggtcccatggctgggccatccccatcagaggggggctggacattgaatgtgaacttcccaaagctcccataggggcccctggcagtgtctctgctctggacggggatgaggtgacctcggactggctcagggaatgtcctaaaagtttctgagggccaggtgggtgggatgagtaacaaagggaaaagaaccaagagaggggcctgtggagagagagaaagcagggtcctggccgagttggctgggaagggtctgaaacggcagcttcagagacgaggccagagtgtgggggcaaggagccggacgctgccctccctgtccaggccttgttgaccttccactgggcagcgcagccctgagccgcctctcacccctacggcgggagcctctgcccccgcccccgccccctgctaccgtcctcccgagcgcttcctgcgctgacagtgacttccctgtatgcccatgaatctcctcgtaaatggagccatggtgacctctcggggtcttgtgttgccaggtaatcagcacacagggagtgtgtgacaaacggtaatttggatgagtttcatttatgaagagataagaatgagccttgcagattgaagatcttgtcctgggtttggcgtgggttcctggatgacgtggtccctcagctccccaagtcctggtccaggtccttccctgaggcagtggggacagacactcagagaggtcatgggcctgggccctctgcgctgtcctgtttgtctctgacccacactgagcccaaggcatttgccaatctgaatttatgttattttcataagggcctctatccctctcctggaacacccagaacgaaggaaaggaaaacaccatttaaggccagcctcaggcacgagtgattatgggtagcgagtctcccccacatgaggtctgcgttcttccttctagaacatagatctcagtggtggcaaagctgcaacatctatgggcattgccccctgattgcactggcctcagtctgggaggctgtggggtgacaggcctctgctgtccctgagctcccctgcttaggggaccttgtcattcttttgtgatccataggcccccaggcctatgcttgatgcaagctcccagggagtggcctctaggtggtctcagctgacaacatggctccacattgctgagtgacacacaagtgactccagcagcaaggcttggagggaacctgagagcagcccccaggcccagggtcacggctgctggagggcacggaaagaaggtggctgtggagaccccagtcatgcaggggctgtgaggccaaagcggaagagggagcgtggcccgggtcttcacactcagcccggaagggccagttcttccctgaggctccaggacctcagcggccctccctgcctcactcagaagccctttaacggctctgagttgggctccccttgtgtctggcttgagagagtctccaggcttctcctcccaacccttcgcccctgtactcaccccggcctctctgtacccaggtgcccagttccaggctgtgtggggctcggtcacatcagcgggaaatacgcctctcacaggagcgcatccggctgcccactggccgcccgcaggcagaaggaagggtccctcaatggctcgtcattctcctggaagtccctgaagaatgaaggaccgacctgccccaccccgggctgtgacggctctggccacgccaatgggagtttcctcacccaccggaggtaactgtgcctgcaggtcctgcccctctgtgcagtcagtagggaccctcgcctggggcctggggctgaagctcctgagggagggccagaccagggctccgtgtgaccagagttgctcaagggaaaggccaggccacatgggtagcggatgggggaggctagcgggtctgttggtgccaggtgatgctgtgggttatgtcttcgccatgcgtctcccctcatacgccacccttccacatcctgatggagtccttcctggctgggtgttatgctggacacagaggccacacatgagcagagccctgggtctgacacttacgttctcttaacaggctgacaacttctcaggaaaagtttgtctcctacaccttatgccctgtccctcccattcataccttctcaggaaaagtttgtctcctacaccttatgccctgtccgtcccattcatgcctcttctttgaactctgggcagagacccctgcctgccttgcaagggagctggtaacccctctctgtcaggcagtgggcctgggcagcattcaccaactctcgcctgccctccaacacctgctccagagccgaaggaccttgcttcaccagccccacttcctgtctgtgtcctatggtgacaatgagtgcctggtcccatcagaaaccctgtgtctgggcctagggccaatgctgactcttcattccctcccctgtccctcccctccccttcttccctcctccttcccctcccttctccctcctttcctcttctccctcccttcctccttccctttccctcccctctcccctttcctcccctctcccttcccctatccctccccctttccttctttcccctcccttccccttcccctcccctctccttccttcctctcccctctcccttcccttttgcctcctctcccctccccttcccctcccctccccttcccctcccctctcctacccctcccctcccttccctctgcccaccccccacctcccccactccctccccaccccctctcctccccttcttcctctcccctcccctcccccctcaccttccccttcccttcccccaccttcctccccttctcttctttttcttcccctcccctcccttttcccttccttcctccatctacaagattaattaactcactcattcaacaaaagcatttgcaccatgtaccaagccttggagagagagcagagaaaaaaaggacaactaccccttatccttgtagagtgcattttgggcagagtaggtgggacagcctgtaaacaaataaatacgtaaattacttagtatggtgaatggtggtgcgtgtgctgggcaaaaaagaagcagggaagaggacaaggaagtcctctttgagaaggaagtagcagcttggcctgaggtgtctggggcacaagccctcagcgaagtggctggagctgggaacagcctggcccgctggacaaggttggaggtgctgagggcctggagccagggagagggagcaaaagagatgaggtagaaagttctaagccagggcttatctggctgcccgctggcaaggactcagctttcactgtgagtgagggccctggcagaaggcagaggagagactagatctggcatgggcagctggcatggacacagctgcagaagccgggaaggccactaaaggagactactgcagccggggtcagttgggcagagacttatgctgggcttcctaaggacatcttaccttgcctcaatcaacctttacttatggtgtggatacaatcacttcataaatgaaatcatgcttgagaatgcacaattgtaatgcatttttctgcttgagtgtctatatccgaggagtgatctgtgactgtcattatcaccacagcctagagggtatctcagaggcagacgcagctaggatgggctcctctgggaggtcagggctgcaaagtaccggcaagtgggtcatgtggacctcagaccccagagggagccctgctgagagcaacggtgccctggccccccgagtatcaggcagggtcagctatggctgtgccagatgaggtgagctctggagtgtccccttcccagcctctgccctgcctagatgtagcttctttttccccatagaacacagtttggccatagggaggccctccaggtcatctaggtgaggtggaacatgccttctgttaacccgtaatgtgtgaccctgggctggccgtggtgggtgaccctgggctggccgtggtgggtgaccctgggctggccgtggtgggtgaccctgggctggctgtggtatgtgaccctgggctggccgtggtgggtgaccctgagctggctgagtgaccctgggctggccgtggtatgtgacccggggctggccgtggtatgtgaccctgggatggtcatggtgtgtgacccggggctggccatggtgggtgaccccgagctggctgtggtgggtgaccctgggctggccgtggtgggtgaccctgggatggccgtggtgggtgacactgggctggtggtggtgggtgacccttggctggccatggtgggtgaccctgggatggctgtggtgggtgaccctgggatggctgtggtgggtgacactgggctggctgtggtgggtgaccctgggatggtcatggtgggtgaccctgggctggccatggtggttgatgctgggatggtcatggtgggtgaccctgggatggccgtggtgggtgaccctgggatggtcatgatgggtgaccctgggctggctgagtgaccctgggctggccgtggtatgtgacccggggctggccgtggtatgtgaccccgggatggtcatggtgtgtgacccggggctggccgtggtatgtgaccccgggatggtcatggtgtgtgacccggggctggccatggtgggtgaccccgagctggctgtggtgggtgaccctgggctggccgtggtgggtgaccctgggatggccgttgtgggtgacactgggctggtggtggtgggtgacccttggctggccatggtgggtgatgctgggatggtcatggtgggtgaccctgggatggccgcggtgggtgaccctggaatggtcatgatgggtgaccctgggctggctgagtgaccctgggctggccatggtatgtgacccggggctggccgtggtatgtgaccccgggatggtcatggtgtgtgacccggggctggccatggtgggtgaccccgagctggctgtggtgggtgaccctgggctggccgtggtgggtgaccctgggatggccgtggtgggtgacactgggctggtggtggtgggtgacccttggctggccgtggtgggtgacccttggctggctgtggtgggtgacccttggatggctgtggtgggtgaccctgggatggctgtggtgggtgacactgggctggctgtggtgggtgacactgggctggctgtggtgggtgaccctgggctggccgtggtgggtgacgctgggatggtcatggtgggtgaccctgggatggccgcggtgggtgaccctgggctggccgcggtgggtgaccctgggctggacgtggtgggtgaccctgggatggccgcggtgggtgaccctgggctggccgcggtgggtgaccctgggctggccgcggtgggtgaccctgggatggtcgcggtgggtgaccctgggctggccgtggtgggtgaccctgggatggccgtggtgggtgaccctgggctggctgtggtgggtgaccctgggatggtcgcggtgggtgaccctgggctggccgtggtgggtgaccctgggatggccgtggtgggtgaccctgggctggctgtggtgggtgaccctgggatggctgtggtgggtgaccctgggatggcggtggtgggtgacccggggctggccgcggtgggtgaccctgggatggccgcggtgggtgaccctgggctggccgcggtgggtgaccctgggatggccgcggtgggtgaccctgggatggccgtggtgggtgaccctgggctggccgtggtgggtgaccctgggatggtcgtggtgggtgacccggggctggccgtggtatgtgaccctgggctggccgtggtatgtgaccctgggatggtcgtggtgggtgaccctgggctggtgaatgatatgtggcctctgcttccagtttgtcaggctgtcccagagcaacctttgctggaaagaagggaaaactgtcaggggatgaggtcctcagtccaaagttcaagactagcgacggtaaggatggcttcctggatttccctgctcatggctgggtgccagggtaagtgagagctgtgcaccttttgtgctggtgggaagaaggttagggagatgaagcccctcctggaatgagtcacggcagaggcagatcccttcacctaagctgacagcctttcggaccttggctctgaagctcttgacacctgtgtctggggtccctggccctgaggaggtcatgcctgctgtaacctgcggctttggtgaccactgggatcagagtccagtggagcccatgtgctgtgagtttgtggagaggtgtggctcattcccccttaggtgaggaaattcagcattgcctgaacaaacttccatctttaatgtagcatttaatacctcccaaagagatttaagcctttccacctgccagccagctcggaaggcaaactataaacactcatctcacaattttcaagacagatttctccagcgcataatgtggggtatgagccccagagagagatgagctcggaaaaccaggaggggagacctctgctgcacagggggtttcagttctagaaagcaggcttccccacagcactttggcccaggcctgcctgaggcccaaagccacaactgaggtttctctctgggtcagtgttggagaatgatgaggagatcaagcagctgaaccaggagatccgagacctgaacgagtccaactcggagatggaggctgccatggtgcagctgcagtcccaggtaggtggtgccgccccccgctcctgggctctttgcccacccaacccaaacattcgtcttggggacagtgaggcatccgtcggcactcatcaaggttgctgtcagggctgagctgacggacagcgcagtggctggcacacaggcacacttaggacgtgctggccgctcacaatgcggagtccgtgaagtcacactgtgagtgccagtgggccgccggagctggttgtcccgccagggctgtggtctcattagtgttaataacactattaataatactagtcccattaagattagcagcactgtttctcttactctcattagaatgagtagtcctgtcaagaccagcggtcccattaggattaccagtcttgtgagtaccagtggtccatgagcgtggtgcggtagagccaggtctctggagccgggtttccttcccagcacccagcacagccacatgtttgtcacagctgagggacctgacaaacctttcagcctcttcctcagtcaattcctccataaaatggaggtaagaataggattctactccagccagttattgtacaatgaacgcatttctatgaggaaaacattcagcataagcacctgatccagagtaagtgccgtcgatgagagctgctgttgctgagggttaggattacaaattattttaaatgtttgtgtcatatttcctgatttccctaaaatgagcatttgtaatcagaaaaaaaaaagcagtaaagatcttattttgaaaataagagcatgccccacctgtggctgctgagtggagtctgcagccgtgctgggggagacataactgtgcccctaacagctagagggacaaagggacaaggaagtgaccaggtcccacagagaatttgggcagagcccctctgggcagggacagatggggagatggtggcctccaccaaggcagcaaaaaatgagtaacatcctccagccccacgtgtctcattactctgctcttgtctctactggcaaacaggctcatgttgactctgctctggtctctactggcaaacaggctcatgttgactctgctctggtctctactggcaaacaggctcacgttgaccgcttgttactcaagagcctgtataaaaatagcatcaccccacagggatcaggaaggattttcgctgtcatgcacatgtcgatgttgcatccccccaggttcataggcagtgacgacagagaaggagtgatggccctcccggcggagccatccccgtcccctcctggtgtctctgagtgtggagatgcactgttgtgtgggtgtccattttgtgctccctgctcctccccttctcagagtccccagggccttcatcagtgtcagtgtcgttggggtagcacctctgatttctttttatttgccaaaaccaatctttttaaagacagattattaccttttactagcatccctttggaaggactcagaaacccctgtccatctgagggagtttggtgactggtgccctctgcggaagggcaaaggcaaagggaaggcaggtccctatcccccatgcaaccctttcaaagccacatgcttgtcaccaggtggcagaagaagcgtgcttgaccccatccacagcctcccaggaatgagctccccactcctgcctcgtgtgtcacccacactgtctttctgtgagtttagcctctgcccccgtggctccctgcagatgtgcagtcaggctgggggctattcctggacaccaaaggcctcagggccaacacaaccctgggcaggttcaccgccatggtggggaagtgagaagacttgcctgtagttggcctggggaagtcgtgcttgggaggccctgaggaggctctttgtggggatttctggtgaggggaagacccaaaggcagtctgacactccacgggggggtgcagtgatttccatcttacagatagaagcaggaaacatggtgaagctaagaccacagcaggtggagtctgagattgagacagggcgctgtgaagtctgtgctcccaccccatcccctcaggacagaggggctcagaaaaccaggagtggggacttctcctgcacggcgggtttcagttccatctagaaagcatggcacagagggacgtgccacacgagcccccttcctggcttccctggagtcagcccatgtctccagagggcccttgcctttctctcctctgccagcccctcacctgtggcagaaccccctacaggaaggcagggtccctgcctcttcccccaccccagggttctgcattctcccagagggttgtgagaggcagcccagagaggacccccaggaggatgggggccaagggcaggcggcacttcgaatctctctctggcacagatctcctccatggagaagaacctgaagaacatcgaggaggagaacaagctcattgaggagcagaatgaagccctgtttctggagctgtccggcctgagccaggccctcatccaaagtctcgccaatatccgccttccgcacatggtaggcagcacgcgggcctgccggcaccacagctaccccccagggtctcttcggaaagcaggagggcagggcatctcccaccccctctgcctctgggtcctgccctaggggccctgtgcccttgtggagattctctccaccccgaatggcccgggctgttggctgtggtgggtttagccaccataatgagtagctgccataaagagtagctaatgaatccaaagcaaaatggtgattccatgagcagagaggctactgctgggatggctgcagagaggaacgcccagtgctgcctctggttggtgtgggcttgtctcaggtcacgtggggacataggtttgatgctcccacatcaggctctgcggtgtggggcccactgcatggacggagcttgctaacctggttctgttctctaggagccaatatgcgaacagaatttcgatgcctatgtgagcaccctcaccgacatgtactccaaccaggacccggagaacaaggacctcctggagagcatcaagcaggctgtgaggggcatccaggtctaggccgtgtggtacccagaagtgtcccagcccaccacaccgtttacctccctcgccctgccccgcaccgtggggatgcccaactcacagtgacttcccgtttggggcccggtgtggccgcgggcgggtttatccaaagggatggctggaaattggccgctcccacgaggctccctccaggcttggggccgtggtggccctatctgtgtgcataggggcactgaagaattacaaagtgatttatttttgttttctgaaagaaatctgaagagcagctcaaagtctccagtggaagctcatggacaaggttctcagggaagttttggagtttgcaaccacagtattcctttgtctgtcgaggctgggagggtagccgtgagcgtggtgggtgggtggtgtgagtggcatcttggcctggaggacacgcctggggcagcgtgtctgtgctcagtgagggccgatgaagaaagtgcgttttctgttttcatttaattcagttttgtgttaagggtggaacaaagctctgttctagagggaaagttaggaataggcctcccagaggatactccagacagttgacaagcatcgcagcccctgtcaggtcaaggaattttaacctgggagactcctgaaaatcagcctaatgtctgggggcagctggcgctgaggctgtgcagatgtgtatggccttgggtcacagctccctactggggctgcagcctttagaccctgggtctgggatccacgtctagggaccactctggcttctgtgcatccacccaggcccccgacccatcactgccacattctccgggtcatggccgagcttgacctctgcatccatggtgacggaggtggcaatgacatcatcaaggtcagagggtaaattcctaacaggagaccacaaaggtttcacttcttttagatccatccaatatgcgaaaaaagggtacattttaatttaatgtgttaaaaacacaatgtccctaccgtgtaaatagaatccaagtcaattgtgactgcaattccaagttagtatttaaaaatagagaaattgcacttcctggaaaaaattaaaaagtagttagtttaattattctgtaaattatttaattttgtcaagatgtaagtatttatattcacagcctcttatgttaacgtttgctatttatttaacatttttatttattaattttatactatttcaactagaccccacaccagggcaccctaagaggggaaaaaagtgaattcaaagcaaaaataactatttgactataatataggccacaaaaaatcttgatataactcctagttataattttgatgcaaccaagttattttttatatattttgttatttattcttttaataatggaatttttttaaaaagtattttgtaactgaggaattttgataatttggggattttgttttcccttggtctaatggagagaaagacattttggttttctttttccattttgggttccttttgtttcaggcacggataacagcaaatggaattctgtatttattattatttaagtgtagcgcagatgtgtgtgcttgggcgtgtttctcgtgtcgcgtttgcgtgtcggctcttgcggtggagtcctgttgctgtgagggagtgctggccgcaggcagcctcgagtcaccgccaggctcacaggctgtgccacccgtccctccgacagctccaatactgtgaccctccttcctcaggaagcgcgttgaacccacagcactccgtggtgtgtttgcagggtgatttcctaataaaagtccactctgactgtgaatcggtgctgtggtctgtggggaggacattgtctccattcttggtgagctctatcatgcaccctcctgggagcacatgcccaggaggggaatcttccatctctggtctccccttgataccacacgtgggtcccctctggtgtcagcttagccagtatctccttttgaaactaccctacctcaccgcctccacgtgtgtttctagaaggtgtaaatcattgtatcttgccccttcccacatgaccagtcatatgcaaattgaagtttttcccaggagtcttctcttagggtcagggagaataacttttcctgctgaggttgttagacttgggggtgtggaactggggttgccctgggctatctctcctggccacaggatgaagccatcagtagtaggagagagttcagacattctggaggggggcaaagctgacaatggaggtagatgtgaaggaaaagggagctctctgatgatctttttagagctcatggacccagccatgtctgaaggcactccacccttgaactgcccagttatataaggcaatggtttatttttttttttaagctggtatacaaggccaaaaagccaatgcataccagctttaaaaaaaaaaagagacttctcccctttttcattttcgtacttttgtgtcaggtggagctctagtgctcctagagtaagacctggacttgggacttctagtcacattcagcctaaactgtcaacatgcttttgacctccctggaatctggccctggtggtagtcctggagcgtccatctgatatgcaaacaaaggatccatcttcactgacaaattcttagaaattctggactgagtttccaccctctgctgtagtcagacagggtccacaacacctgtggaggacatttgatctgccttcaaggctccaactgctggttgtgggggcccaagcaggtgccagtgcccactggtgggttatgcagaacatgttcaactgtgaggaagggttcctgggggtcccctttggtgaggccccatttgtgatggggagaccagtggcctggagttgtaccccttcacgtcagcacagcagatgctggggtgggtgtgagcaagaccgattctgaagtgtcccctcagcaagctgaggtaaagtcattctggggggtatgagagttggctggagaggtggggactatgatgttcctgctaggggacacaggctgttaccatgatgttagaaagctgcacaatcccatagtttgataatggcacgagctggtcacccccaagaagattctctcacttttcgcttagaggcactggctgggccaccagcctactgggagctgagagaaagagcgtctaaagtcacaggcatgtgctctcttaggatttatttttggtatgggaccccacagctaggccttctctaccagcctgcagaccctcctgtttactgtatccagaggataaagctcaaggtttcatccagagggaggggagtgtttgcc

SEQ ID NO: 387 - DNA, 545160 bp, Homo sapiens
  source 1..545160: mol_type = genomic DNA
ggttgtttttattgattttggtacatttgtaattgttttggtatttctagtatagactgagattgaggcaaaatataaattttctaagatttttgaaaatattgtgaaattgctttctaaaatatttacatcaattctcaggcaaactgttcctatggacaaatagcttttaataatcctaacagacaggcctgagccagcacatcattaactcggcttgttcctaaagacagcctttgacagagcttcttccaccctgcgggtctagagagacagagatgcagggtggtaggagtgagagtcgcctctctcttctgtcagctctgaggactctaccaaggactggagggggactcactgcaatcaccagtgcttccaggaagcagtgctgttgcaaatgagccatccgaacacactagcttataagaagtgctcagaggaccttgaatcgtgaagcagctgaaggcaccactgggaataaattatgaaatttaactaagattatcagagtccctttctcaaattttatattttgggtgattgtgtctatgagaggagggtatttttggaattttaaaccatgacattaactaatatagttgatgtgaaagtgggtaattcattgttaaattatatttgaagggcaatttaagtttatgggtgacttgctgccgggatccttgccaacagcatggaagtaagaaggcatcatctttcaacacccaggtaaccaacgatgggctgcctgtccttctgctcccctgacgtgaaactggagaaggacacgtctcccagttaacccgaatcagtcaggaggtggcagccagtttgggacattttgtaaaacaatggccctgggcagttgaaaactgtctgtgttctgggagacaggcaggccgagaaactgctcagtaataagaggtgacagggacaggaacagggacagggacggagcagctgggagcagtgcacctcctctgggagacaggcaggctgagagtctgctcagtaataaggaggtgacagggacagggacagggacagggatggaccagctgggagcagcgcgcctcctcgactggattccagaagaaaggctctacaaaggacgtgaccgccctgcctgggcgcgctgagatgctgacgcatgcacaacggcaatgcccccaagtgtggtggctgcagggctgctggtggagaattccctgcccaggggagccctgtgctgggaggcaccgtgtcctccgtccaggctcgctctcagatggcctagcccagcgaggggcaggagcgacagcaaatgggaaaaggacggcccagtggggatgccgagacactcacatagttttctaaaagtcattgacttctatatgcctcggagttgagaatcaaactggtaaaaatgttaaaagcaactaagttggagtgaaagggttcgagtggatcccacgggaccccagacagcatttcccagactcaagtgaagacgcagacccgggttagagatccttcgtgctacaaatgtggcaacaccttgtttatttagagtaagatgtgttaacatccagcatgacaaaatttgtacaaagttcacaatttaaaaatgaagtatcacagcaacttgtgattccacacatttatagcaaaattaaagtgtcaacaaacccatgccgtgtagtacaaaaataaatcaaacttcagttccacagagagcacaataaatagtttatacaaaattctgtcttaataaatgattacttaaattaacttagaaatgaatatgaacaataagttataataaactctgatgactcacaataatccatatgaaaggtcagcattctaatatgtgacacttttgtgatccctatataatagtcacagataacttttgatttgagattatgtaccaacgttagatgagcagcaggtttgtgcttaaaatccctttccattgtacataggtgataacaataagaatccaaaactgatactatctagtactctactaaaagcattactatattggcaaagaagctgcagacacaacgcggtggggaaatgcatatgctgttatgaacaatgggggccctaaaggcagctggggccctgggccacacggacggcctcaggtgactgcaagcaccttgcttcagctctcaaaacgcattctgagcatggcagctgcaaccaatagcacaacagaaagggggcgctgtacagagaaggttccgcagagccccgaaataattacatcgtcttttcccagctagttattaaagtccttgtggaaaactgtaagcttttgtacagtgaacagtataaagtgccgctgggatatacatatatttatacacatatatatataccgaggttgagtattgtatcagaatattcgtcgtgagatccctgtagtctccctttgcaacattattgatcagccgtgagggctcctctataatccatccaggttcagtgtcacaaggctactgacacgaggaattgcacacctccgtacggatatataggacaaggtaagtgcaaatagtcgactggcacattgtggggacaatgaccctgtaagtcctgttctgctaaaaatattttttttttatttttacaaaacccatcttttttttatttcataacaaaaatttaaagtacgtctgtacttcctgcataacatcaagacatggaaggaagagatgctactaaatggaactcaagtcaacatcagaaaacacaacacgtcgtcaaaggactactcagaagggggaacacagcgctcaaaagtggtcttatgcatacatatagtgcagtcattgggagtaaaacaatcaaatctggaaggtataaacaagtctaagatgatctagtttaaagcaaaaaagtgctgaagtatatttagttacttttaaaatctgattgcattcattcttagaatagtcacaagaaatcaaacaatgaggctctgcaaatgctctatggtcaactggtctccacccaagtgtagaacagaaacgtcgtggtaagagtcctctgaataggaccaaatgctgattcagagtcaaagtcgggcggggggagcaggagggaaactttaccgagctgccttcccaccagatccagcagaaaactcggtccagtaactagaagactcacaaatcatttgcctttatccctcaaatgtaaaataagaaggttcataacaataataggaataatcataattttttaaagtgaaaaggggaaataaatgttcttaaattatcttttagcttaaatcgaaaacacacaaattctgttgataaactacattgcaataacagacagttcagaggggcacgaaactctaggggagatacgagaaggttgttccaaagtttattgaaaatggaaaaggaaatcttcacgttgtccacctctgataagatcctgtcttaactggagtttccatagtcacaaccatgtaacgcttaggagttaatttaaaagtgctgtttaagctgctttgaatcttctgccaagtttccatggcttgatgttgtcttacaataaattacttatttcatttcttacagttaatccatatgccatttccttggaatgcaaaaaacctcatttattgcccccaccatacaccatcctcctaaaacaaacaaacaaaaaagtcacataatatttccaagcattgttcaaaaataaagcatttttgcaacgaattcttgctatgaaacaatatgcacacaaaatgtatttcttaaattccataaagtcctccaacatgaggcaaaatgataacgtctaaaaagcggctgctcagccacaacatgatcattcaaagctgtgggtctgtgtgtgcgtgtgtgtgtttgtgtgtccatttcagttcaaaatactaaaacatttaatcactaaagcattaaaaagaatttacactctatttattttgatcagcttacctcttcagaaatagatatacccccaaatgtgcatacatcagcagctataaacattacatggcagaacactatgtcagcttacatggaaacgtacaaaatgtgggtgtattcaaaaactattctgcaggtactatctttaaagcaagacataaaatcattatgaagtcttgtaagcataacactgtttcaaattcaaacagaaataaatatagaacactttctggtaagttacagcagcaaaaaacaagaggcatcctttttaagcaagagtttcatcactacagcagctgttcagacctgaattcctctcacagcctgctttatattttccagtagggctttattttctggactctgataacgatcttgatttgtatacatttccgtcaaagtagtcacgtaagcatcaaaattttgttcattgattggatcctacgagatattaaatagtagttcatatacaacttttattttcttaatagtatatttacaaaagcataaaatagtatcatagcatagtgcccctggttttatactatttcaaaggccggctcagagcacacttaagtttctggggtcagccccgcccatgtttctagcagttaatggtatggtttcggggtggtaaccacaaacatttgccaaaggctgaagaaccatgaaaataacgataaaaacggcatctactttaggctgtgcgctgtggaggactccacattcctgccttgcgtgctcagtcacttaccatgtgcggcagctggatgttagccaggctgtggatcagagactggctcaggttcgccagctcgtggaggagagactcgttctgctgctcaatcactttgttctcctcttcgatggtcttcaggttgctctccatcgtggtaatctgaaacgcacaagtgtgcgtgacatgtaacaccaggaggacctaggagcgcgtggtcgttgccgggggccacagtctactgggtgcgaagaaggggcctctcgctgaaggagaaaggcttcgggccgggcgccgtggctcacgcctggaatcccagcattttgggaggccaagacaggcaggtcacttgaggtcaggaattcaagaccagcctggccaacgtggttaaaccctgtctctactaaaaatacaaaaattagctgggcgtggtggcgtgcgcctgtaatcccagctactcgggagactgagacatgagaatagcttgaacccgagaggcggaggttgcagtgagctgagatcacaccattgcactccagcctgggtgacagaccgagattccgtctcacaaaaaaaaaaaaaaaaaggaaaagaaaaaggcttccgtggtgatagcttgtcattgaaggacctgctgcctatgctttggattcattgcacttgacaactggggagctgagactgtttccctgcgcgatcctgttctctcagccggcctgatgggactgcagtgtgtagggggcttgatgcgaatacttctcctttctagcctgaataaaattctgccacagctaagtcctccaatgctcatttctgtgtggaggtgtcactgtgtcttcagatggcaccaggctggcactgtgcccacagggtggtcttcctgcatttctctaaggaaaaaggcccaccacggacccttcctcgcatattccagagataatttaagtatcaccaaggtcaaggggcttgagttcagggcctctgcctataaccgcacaggactagcttcacacgcagcaggcggggagctgccctgcccatgggggtgtctgccttgggcacccaagggtgcctctgccgtgcatgatctggggcttcttcctggaagaccgggccgacccgcagagtccagggctggcttgcctggcctgcccgctcctctccttccctgacgtgtcattcctaagtcctctcacgagagtctctcctcctctccctgtcggccctgccttctcctatgttctggccctcccttggctgtactgggtcaaatcccgggttctcccagtcaccagcctcaggcccagaccctctgttagaaaactgaagcacctcagaggcgccctccaggatgaagtggggagggccggccttctccttggaaggaatcgcagcccccaccattcctgcagggacggtcccctgtggagaacacactgaaatcacacagatttatttccatgcacgtcctgggtgaccttctcattcgtgttctttggggttatttatcaaattaatgttcccctcccagccgcccccttgcaggctcaggagtggatgcctgccctcccacgactcctgggtgggcctcgaagggctgcgtgcccggtgcttgtcttccagagcgttctgtagcccttcctgggtggccacgtgcctgcactcacagctggtggcagctgtggctgggaccttactagagatgatgtcagtgtaagcagacgtaggttttctatgacggaatctaatctagaatgaggcgtcatggcccaggtcccgaggtttttaaaaaggtacacgcagggggaaggccagcagcaggatgggcacctctgcagtttccctgagcagagggcggctcctgccctttgcatctggtggctttcctagacggtggctgctacaggcccctcggcccctcctgtctgtgctcagggaaccctgcagaggcctcgccatcgctggccctcagcgggccctcctggatgagcccagcccagctcgcctctggttgagcatctcagaggtgcttctggctattccactatcctagccaggcaaagtgtgggctctttttctggaaaatgggaataatgctccttgcattatgaactcacactgagctgtgcagtgtgtctgcagtgagaagacatttgttattcctggggcctgtgatctggtcttaggggcccagagtaaacggaagtccaactgctcccccggcttagcggagaagcagcctgtggggtgaccaaggcaggggcggcaccctgtctcattgtccccagcaaaattcttggggacacattttagatccattcctccttcaacttatgttctctgctggaaagtctagccccttctgcagaggcagagatatcttcctatgttcaggaatctctgtgagactcaggagttaggctgttccttcccgtgctacccgggtctgtggctgggatgggggtggcggggctcccatgcttataaatgctttgcttttctcaaaatggaacaaatctcattgtgttaaatctgcttagctgtggaacaaaatatgcagtttgaacaaacatcccatcaaagccctggccaaaatgataatctcctgaaccaggctgcttggtgagccccgtccagggtcagagagaatgtctggagacccaaaaccagaaccgacgggtatctgccaggtcttgcagcctcacctccctcaagtgcatcccccgtggcccctgaatctcctgcatctccagcccacacacgaagggccccgggcttcttgcacgtggacacacgtttgcttccctgagccttcctccagggtggcaagaagctgagtgtctcagggtcactgctgcccgttccttactatcctagccagacaaactgtgggctctttttctggaaaatgggagtaatgctccttgcccacaacatcaactcacactgagatgtgaggcatgtttgcagtgagaagacatttgttattcctggggcctctgacccagccttaggggcccagagtaaaggggagccctctcagaacgtcttggagctggccagcacgctgcggcggtcatgggagacagcactgctgagaaaggtgatgtaggggctccgcccaggccctcatacgccaggcctcctccgaggatggggctgagcaggctggggaggggcacagaggccggtgtctcccttccaaacccaacccacagcagccacagtacatggttcctggcactcagaaggcatccctgatcacaggtgcttacgcagggaggggcctgtgtcgcgagtgggtgtgggggcctggctgggagctgggccggccacctcggccgtcatcaatgatgtgcgctggcggacctgagtctgcatttccagaaacatcgagttgcctgtggtaaagcagggagccctctgacgaaggtgggttctgtttttgattgtttaagaaacatcaaaggtttttcaggctgctaggaagcagtgcattcccggatcttcccaagaaagttcctgcatcagcagcagcctgatggccagtctaggcccaaacccgcatttttacagacttgtccacaccctctgtctttccagacctcagcgtttcttagattgcgcagtctctgaccacacctggagtagagaaaggtcaaatctagcctggggcctgacattgaaagctaagactaagctaagaatggcgtttgcattttttagtggtaagaaaaaaaacaaaaacaaaagaataacagcattttgtaacatataagagctattaaattccgactgcagcaccacgtgacgctgtgttgaaacagggtcacactcacacgtgttttgaggctgtcacactgcaacacagctgcgtggtccagaagcctaaaatatttgccatctggtcctttatagaaaatgtttgccaatccctggtctagactaagtaccttgatggcgtgatgtgtttagaaaacatttccggaagaagtgtaaaatgggtgggaatcccaaggcgttagcagtggggtggtggaagggtgtaaccccaaggaaagtgtcctcgtgcagggaggactgcctcctgcccatgcccgtgctgaccagggaggctggatcacagagaggcttagccccagggagaacagccatcttctgaaagtggtgcaggctgtgggattaactgacctgccaatcttagaagtcaagctgcacagggctgttcactctggtccatctgggccctcgcaccaggagctggggggtttcttgtgaatagcctgtcctgaaaacacgagctcccttttatactcaaatacccccatccccacctccctgacaaatgcctgctgtttgggccacggggggcagcatcccagcctcccagccggctccgagccatcctccttctgctcctgctgtttcctgtgcctggagtgctcctttccctcctccacctcccgtgtctgcaggactcccgccgtctctcctcgggctccttgctccaggcccccacggtggggtctcgaactccggctctcagcactcatgtggttcacacaaatgccgcttgcccaggccgtgccctgcacttgagtcccctgctctctcctcctcagcggcagttttgtttttttccggattctgataacaagcaacttctgggtgtcccctggggccgagggcaagcttttcttgtctctgctccgggctctggtgtgaactgagttgaatcggatgagatgcgtctggggaatcgtggagtccagaaccaaggcttgggtgtgtccagcttgggtgcttcagcccttgaagctgaggccacactgaatccagttgaatggggttggggaaacgcagaccccacaggcacctcggccgttctgctggtgctgggccacccccagaggaagcctgcattagagactgggaagggaccggtgtccggacttctttttttttcttttcccgcccatggcgcgatcttggctctctgcaagctccacctcctgggttcacgccattctcctgcctcagcctcccgagtacctgggactacaggcgcccgccaccacgctaggcttttttgtatttttagtagagacggggtttcaccgtgttagccaggatggtctcgatttcctgacctcgtgatctgcccgcctcggcctcccaaagtgctgggattacaggcgtgagccactgtgcccggccaggggcccggacttctgattgcgtttgtgtgaggtgaagaccccgacgcagactcttcttttcaagctgccaagcataagaatggatttttcagccacataggaattgtgttggtcgcactaattggacctcaaatagcatttaaacacattccaaattggaaacctcatcttctcaattaaataaaattgcgtttgtcctaatttgaattcttacaactgaacagtgaaaaatacctttccaagttttagtaagaacactcctgggcttgagaggtaacaagcaaccccttccgcagagagtggcaggagaggcctttcctgcatccggcacaggcgcggcggtctccccccatccggcacaggcgcggcggtctcccccttctccggcacaggcgcggcggtctcccccttctccggcacaggcgcggcggtctcccccttctccggcacaggcgcggcggtctccccccatccggcacaggcgcggcggtctccccccatccggcacaggcgcggcggtctcccccttctccggcacaggcgcggcggtctccctccatccggcacaggcgcggcggtctccctcttctccggcacaggcgcggcggtctccctccatccggcacaggcgcggcggtctccctccatccggcacaggcgcggcggtctccctcttctccggcacaggcgcggcggtctccctccatccggcacaggcgcggcggtctccctccatccggcacaggcgtggcggtcttccccatccggcacaggtgtgaaatttaaaggcttggacggagtttcctttttccttctcttggatttgttctttatcagatttaaatctggacctctccctgtgcaggaccctcatcaccgggctgtaggcctgagcactgaccctaccgttctttcctccgctcccattccagagagaacatcaggccgtgggcacccacttctcagttatctcatggcttgggcttgggacaggcctgcagccctgtgtcatctctggcttgggctctgtgcacaggtctgcatcctcgtgtcagtgtgtcttgaacatgtcatgacgcactgggagaagtctgcctttctcttgggtcagagtggacaagaaaacacggggtctgggccagttccccttcctggccatgctccctgagggtgtgcgggcctgagaggcacgggaaagtcaggaccttctaaaggaaaatgcaaggggcatgaaggctgctgcaggaaggccgaggccatcaggcagggccgctttatgccctggagagctggcctgccccacgttcctcctccatactccccgggcagtggccgaggcacaggcagcaaggagggctcctggctgtgggcgcacattgttttctggtaagttttgctccagatctaacctgtttaaagaacatcaggctctaagctgcctgagtcagcagctgcctgtctctgagctcaggcctggtgctcacagaacaacttctgggctggagctcatcatccgaccctgagagctgcagagctgggggactccggctcagcgcattcccatcccttctagaatagaggaaggtccatccctgggcacatctgggaagtcacctctctcatcagccgagtcagtgagaataaatgtgaactcttcacattcatttttgacatcaggtccaaatagatgctgttaggagcaactactcatctcagagataaaggcacaaaggagccagtgagaacagacacagacctgagtgtttcctgagggggaggccacgcccgtgcaggtgcagagcgtgcctggggttcctactctaagcagcctgcgtaggcacatgcgttgttctttagggctcagatccaggcggcatgacctctaagcctactcagccctcggctgagccccagccccagtacttcatccacagctggcatcagagctgccgtctatccctcatggacagccacggagcagcaggccttcactgcagaaggaggggttttggaaagtgggaagaacccccttcctgaatggcatcctattggaattgggttgccccagtagaccatggactcaacaccctggacagacaagggcattctgcctcatcagagagtgccccaaaaggtgccattcaaaggaggaaataaattaagattttcaggcttgtcaccctcataaacagaatacaacttgatatggtttggctctgtgtccccacccaaatctcacctcgaattataatccctataattcccacctgtgaagggcaggaccaggtggaggtaattaaatcatgggggcgttcccccatgctgtcctcatgatagtgagtgagtctcacaagatctgatggttttatgagtgtctggcatttcctctgcttgcacttctccttcctgccaccttgtgaagaaggtgccttgcttcctctttaccttctgccatgattgtaaatttcctgaggcctccccagccatgtggaactgtgagtccattaaacgcatttcctttataaactacccagtctcaagtatttattagcagtgtgagaacggagtaatactcaagggtgaatttttgatctgtcccaattaaacaatctttgctgacttggtcacctcctactctctcccagaaacagcagctcctgagtgctctggcagccatggagtctcctatacagtccaagatgctgcctccatggcctcggctggtcccgggggtgaggaatgccacaggctgttactccattccccaagcctaacgttcaggtaagtcttaagggaaattccaacctgtgttgggtgagccccagccaggccaatgcgagactctgggaagacctgaacacagcccctggggctaccaggtctgtgagatcaaggcagtgatgccctctggggaagtaggttggcatcaaaacacccaggcagcagccacatggcctggtggggagttcccacccttggcctcatccttggtactcacggggggcctggaaatccctttcggttgcttggtggggccccagccccagaggatgtctccatccttgggaaaactgtgtccagtgggtagaaaccacctgttgagcagagccgttgaccacacccggctgactatgggaaaggccctcaaccttccccagcctcaacctctgcatttacagagcggggataataagggagccctcggagtgtgttaggaggagagcatcatcacgtagatggctggcggtgacaccatcctcatctccatccagttctcggggctcattcccagcaaaccgagcaaccttcatggaggctggtcagcatcccccgagaacctcatcacaccgtggcctgctggggaggggccagaatggagacctcatttctaagaggaagggacacctctgctcaccctgtgggcaatgtgagggtcgggtggtcagcaaataaattccactcccagagtgtacttcggcgggaccctaacacagcaaggtgggggatgccaggcacaaggctcatggtcagacagggtccagcctggcctctgtggcttcggcttggctgaggaagctgcctctccatcttagaagctgtatgtttaagatgaggctgaggacgtttaccctgtgggctgcttgtgggcatggagggggttaggtgaccacagctgctctgccagctgccactgctctctctccatccccaggctctgcagctgcaagtcactggggccacttccccaaatcccagacacccaggagtcctatgtggcaggcactccttgttttaaattctgggaacatcggctgtcgccatacatttaatatagtgattaaataacaggaggacctgaagtatcttggaaggaaaaccttcattgtttgcaggaacaggcgatcctctgaaaatgcctattcacaaatgcactttattaaaaaacacaaacacacatgcagactgaaaacgagagaaccacggcccctgctacagcgaacactgccacggaatggtgtctgcggaagaccaatatcataaggtggaaaaataaaggaaataaaagagcaaataagaggaaacgacagctctcctaaaagctgatttcatgccatgtatctctggtataatggcgcgtgttagagctaaaattgagggcttcaaaaactgttacctgagttctgagtttaatcatatcggcttccatctgggaattggattcatttagctccttgatttcttcatctaactgtttgatttcttcatcattttctatacctgtaataatgaatattagtatgttaaaactgttatatacaaaaatattagagttagaattttgggagctttctttgttccttttatattcgtaattgaatttgcttggaaaatagactcttgaattagaaaggaaaaaatcatcacaatctctgtgtctttctattccctaccaccgccccttccccacctaagttcccctacaaaaaggaacaaacaattgagacgcacagaagactcccaggcactttgagggtcgagctcccagggacagttaacctgggtcttagatgtatcgaggcagaaaccacctggtcctgagtgccgatttgctgagcctggcctgttttctcctgcttttgttctctctctcgactcgctgtctgcatcagtcattctgcaaacaccccaggcttggagccaggctctgcaggtacgttcaccaacaaggccaggtcctcccgccctcactcaggtcaggttctgggtcggaaaatgggcaacagacgtgtaacgacaaatgccgtccagcaaacgctgaggatgacctcaccttacccaccgacaggaagctgtgggaagtgggagagggacatgggggctggccggagggagatggccacaaaagggctctctgaatattcgacatttagcaaataaaaaatctcattctgaatgattaaaaagtatgcactaactaacagaattcccaatttgtaaactctgccagaatgatgacctcggccaggtgtgtacctgaccatctgagtgtccctggtgggtgactgctgccctgccgaggtccctggggcacctggatcagtcctggcatagctgggcacagggcccagatgcccatatttacaaaggccattctggacacttgcttccctggccggctgtgtctggttactggcaacattacactgccaacgccaaagagaaggagattcctctctatttgtgaccacttgacctcacacaattgggtgtacacagaaggagagcaggagtttggcaaacacaatcaccctagaaaattcaggatttgagattgctgttctcattggccacacagcaccacaatggatctttactcaaaactaatggaaaatgtatccaggcctcctaggactcccagtgggtagatgctgttttcaagctttgcagacagaagggcagaaggggtacaatcaaccagaggccgaggcctgagagcaccccaaaaaccctgctgacatcagcagaacagaggtggaggctcctctctaccaagacgttagaaagatgagagtaagagaaagtgatggatcagtgggattgggccttagatgcggcttttagtgaaacgaaaaaaaagttataccctcaagataaaaatacccaatgcaaaaaatcccaattcataaagcaactaaattatgaacgaacgtatcatttcagaagcattccccacaagcttctgttaaactgcaagcatccaaatgcctttagaacacctccatgtgaaggaggccctcagaacactggacgtggtgaagcttcgaccctctacagctgtcacaggcaaatttctcaagcacattcctaggaatcccatctcgcagaggcctttcaaaaaccttggactgggatgcttagtttgaagaattcatgataaatgtcaaactaactggcctatcaggctttgttatctaattgatctgccagatcaggtcaactgttctgacagaagtcagtgtcattttaaatccaaataaaagtcttgatacgggtcccatgacaacctttcatctctaattttgttctgggagtgatggatgggtggatattacttccatagctctgctctgtcctgggggaccaccctcaggcccaagtggtcaccaacagccctttgtgggagcctgggaacgtctcagtcctggggctgcccactgcggctctgtgcagcatgccattcctttgtaagggggaggagggagacagggaaacggtgccaggaagaaccggcaggtcacagagcattcccggcccatgagattctgtaggacgagggtatgtggaagaggagggcctgcaaactgattctgtagagctgtccacagccacattcctgggacatcctgcgagcccccaggcacgtgcgcctcggcgtgaagccccctcagggagaggagagctctgggttgggtgggaattctccttatccctgcagcagggcagtgactggcccaggaagcagtccctggggttgctggggcctctgagctgagcctcactttgtggatggttaggctggaactagggtttttttgttgttgttgtttgtttgttttgagatggagtttgctcttgttgcccaggctggagtgcaatggcgtgaccttggctcactgcaacctccacctctcggattcaaacgattctcctgtctcagcctcctgagtagctgggattatacgtgcctgccactacacccggctaatttttggtatttttagtagagatggggtttcaccatgttggccaggctggtcttgaactcctgacctcaggtgatctgcccacctcagcctcccaaactgctgggattacaggcgtgagccaccgcgcccagccacaactagggttttataatacattccaccagttggcctgcaagctgtcaggagaaactgcctttataaaaaactggcctgagcagggagggcccagccaaaaagcagcatctcagagccagaaaatccacccactggacaccaaagcaaagaagcaaacaaatcctactcaaattagcatagcgtggtcctggaagattttgatttacttcaggatcctggtagctcttgagagaccagtgtcccatggtgaacccagccagcgctggtcactctcactaatggcttggtggaatttccatgcctcctggaatttccttttccttacagctgaatagaaacgtgagttcccacagtttggagctctcaggaatattaagcgaaataagtaggtgaagttcctgacaaagcgcttcatgttttcagggcttgatggaggttagagctcctttccctagcttgctttctgctgtgatagtaaaaggaaagaaaaagcattatcttatttccttctctcctaaacactgcccctgcccccactacccgccaaaaagccactgatggtacaacttcagccaaggtgccaaggtgctaagaggcatacagtgaacttctgcaaaagggttctgaagggagactcactaacagccacgccggctgctcaggcagagctgagtactaatgcgtgatgagatcactccacggataaagaaaataaggtgatccttgttgggcagagacatgagagcaggctcatccctaaacttaaaaaagaaagaaagaaaaatactttagagccagaagggaacctcaaggacatttagaatagctgcttccctttcagacaaatgctcaagagaaagcgctaaaatccagtgccagggtccttcttggccgagtcagtgcctcacagtggattccggtggcttctctgtcccacacagtgtctgggcctcacatggagggaagctgctgcgcactcttgttacactgaaggtataaaaatgaccccaggaaaggctttacactcaggatatgaaagaaaagaaggccgggcatggtggctcacgcctataatcccagcactttgggaggctgaggtgggcagatcgcttgagctcaggagttcaagagcaacacagggggcaacatagtcagacctcatctatagtaaaatatttaaggccaggcatagtggcttacacctgtaatcccagcactttgggaggccgagggaggtggattgcttgagctcaggagtttgagagcagcctgggcaacatggcgaagccccatctctaccaaaaatacaaaaattagctgagtgtgatagtgcacatctgtagtcccagctacacaggaggctgaggtgggaggatcgcttgaccctgggaggcggaggttgcagtaagccaagatggtgctactgctctccagcctgggtgacagagcgagacccagtccaaaaaaagagagggattgtcttttccacatctacagcaagggcaacaggaacacagagcttcagatgcaaagaatggtaccacagcatcaggaattggatgctgtgcctctgtcccctgaagagcatcaggaattggatgctgtgcctctgtcccctgaagagccgcaggaattggatgctgtgcctctgtcccctgatgagcagcaggaaaggtccctggacccttcctggattagctacacagacatggaaatgatgcctgggcacacaactgtgctctgggggtaagaaagaactatctcagtttggtgcaaacagtgtcaggaatcgacagccccaggcatcagcacacacttggacttaggaagacccacttccaccacctgttctcccagtgacctgcagctcctcttttttacccatggacgtgcgtgcattaggatctgcagcaaggggaactgtttgtcctaaaacttagcacaacacgaactgtgtgtctagaaacttgggtgaaatgcagcgacctggctgaaggctgcccagcagcagcagctgggcccagcgggcggacggtggccctggaatgcccgtgtcccggctgctttctggtgggatgacacccagttgttggttcctctagtttagagtcacagaccaactgcttatctttatccctccgagttagcacctgtttttgtgaattaactccttgtgtgcagcagtaataggaatgtctagtgccctcaatgccgactcaggcccaccgatgaagagatggccacctcagggatctgcccaccgccgcccaggtggaccagcccaggtgtgaatggcccctcctctaggattggcagatctgttctctccgtattttctttccttttctgttttgaactggcctacctaacctaaccgccacttccttcattaatggggaacaaaggcacgtggactcggatcaattgtctaaggatttccactttaatccagggttattcgggggtgaaatgccctctaagtattttgaaaagcgcccggcatgcagatggggcttagggaatgttttctttctggcaaggagcactgctccgtaataactagaaagcgaaagttggctatcctggtgtctcaaaagcggggtccttacactggctgcttgggactgcatccacagggagaggttgtgagggtgggtcagggtattctggaaggcagaaactgacaggagcagcctgggagacaggagcagcctgggggacaggatgcctccaggagccccagaccttgaggaccaatgtcaagaagctgatgacctttctggtgaacaatgggccacatgttgaggaatagtttgtactggctgctggcagagggagtcctgcaggtacacacacgtgggacgttcaggcgtctctcatgctgtcctcaggaccaccaataacagtcagatgagaggagacccccgtggctgtggccaggggcttcatgcctgcatgcttgggagctgctcaggtgtggctcactcttggtggatttggggaggaggtgccctttggtaaaggtacagcaggagggtgccaggttctgcccaggttcagctttgtagggtggatctgtgcatcataggtctgggagccttcagcccagggcatccgtgctttgtggtgcttgaagaggtttgcaggctccatttagaaatacaaaattaggggtgcatcttgcaagtgaaagctgagaaggggaggctgggcttctgctgtgaaggggaccagtctgctcaatggctacaggttacagctgatctcattattcccaggagccatgtgctataaagttactgcacacaggctgagagcagaatcactgcttttggaaacaaagggccaagctcctgccaccctctggtcccatttttgtcaatcgatcaataaaaaaccctgttaatatggtttggctgtgtccccacccaaatctcatcttgaattatagttcccataacctccacgtgtcgtgggagggacctggtgggaggtaattgaatcatgggggtggttacctccatgctgttcctgatactgagttctcatgagatctggaggttttattagggcttttcccactttgctctgcacttctctctcctgccgccatgtgaagaaggacacatttgcttccctttgcaccatgattgtaggtttcctgagacctccccagccatgtggagctgtgagttgattaatcctctttcctttataaattacccagtctcgggtatttcttcatagcagtgtgagaatgcacgaatacacctgttttatgtgtgctcccatttaaagacaacctatttaatagatactgtggattccttaacatagaaactcccagccaacagtcacaaccatgactcctgtctgaagggagcttggctagcgtgtgttttctctgtgaggcacatcacagccccctgcccttaggaacaccagacacttcagctgctctgcgagtgcacaggactaactacaaaagcactgagatcattgcctgcgtctacaaattaatttcggcagggaggtgacctcgcaaatagagtccccagatcatgagggtggactgtggatgtttctaagggcttaagtggctctcctctctcctgctcctccagaggcccccagttttcctctgcagaactctctacacacctgtgctggttggtgacaagagagaccctcagaacaaaacagatttgcaggtggaatcaagaaaatcaggcaccagacatgcagagagtgagggcgacaggggagggggtgccatccttgttatctgtggcctggggtggccccaaagctgctcctgggtggagaaaccctggatgagggcctgagggacacaggcagaaatgtgggcacactggggttccagggagtaaatcgtccagtgctggagagaccctcaggacttgggctcatgattccggtgagcagtgaaatcggtgaaggtgggagacggttttgagaaagactgctttttctcaagttgcttcgctttatagatgagagggccagaattatctctgcccctgctttctaagaaaagtgagctgtaactgtcaaaggacacacagctggcatggccgtgcccgctgggccttcctgaccatgggtgccacgagggctggaggggtgctcaccgttgctggcccgctgtttgatggtcagcatctgctctccagaaagctttgccttcttcatcgctgacgtggctctcgggcatcctgacaagctgtggacaagacacaggacggccattagtcaactgtctaatgtcccagccctgcagggaagtggtggtaagcaaggcgtagaatagcattattaggttggttgccagcaaaaggctgtctgaaaatgagaaaaagcaaaaagaccaatgcatacagtatgacagttatgcacacatggggtgcatgtgtgtgcactcatgcatgtggtgagcactgatcatgggtgctcggctggggctgcctcttggcggggggtcttgggagctggggctctgagagcagaggaaatctgcccttcattgtataactttcagagctttttggaacttttgtagagtgataatattgcttaaaaatctttattatggaaagcatcaagctcatagaaaggttgggtttaaaagttaatttcaaatatacaaaagtagagacagcagaataatgaactcaccccaaattcagctgttatctctcaaggctagtcacctgtgcccctcctgcttccccagtctcaaaggtgaaaacataactgcaatctccttatctcacttacaatttttagccagttttctagtatcagcagctattcagtctgttttcaaactttccaggtgtctcttcacttttctcagccactggtttgtcgacgtcaggatgcgtctcagctcttcacagtgtatgtggcagatgtggctggcagcctccggggcaggaaggcacctctgcctccttttctgtcctgttgggtgtttgctgaagatggcgtgtcctgtgtgcggagcgcctcttccatgcagtcccgtgcctcggcttcctcacaactcctcagtctccgaggggccttccctcccttccaggggctcctggacgtgctggtcaactggagtcctcactgtgctaaaggccaggggccatctggcacttaactatgggtgaggtgaaaaacttctatatataacgctttttttttttttttttgagagggtcttgctctgtcacccaggctggagtgcagtggcccgatgtcggctcactgcagcctctgcctcctgggttccagtgattctcccgcctcagcctcccgattacagaattatagcctctgggattacaggtgtgtgccaccacacctggctaatttttgtatttttagtagagacagggtttcaccatattggccaggctggtcttcaactcctgacctcaggtgatctgcccgccttggcctcccaaagtgctaggattacaggcatgagccaccgcaccccgcctataatgttttatatatgtatatgacatatgtgtttattctctctatacataatattgtatttcacctgtatatgaagtgttagatggaccgtgtccgtaagtggtgtgatgatgtgttagtgatatatctagaaacactctttactagtgcaggcagattacatcattattagaaatatctctaatatctgcattaatataattaagctttctaaatattatttttgtaatacattttcttttaaaatttaagaaaacaggaaaattcatagcagaagaacttgatcgtaatacattttcaactggggatattagtggttgtttttggggaaatcctatctttgtataaaaatatttccagtattcttcatccacaccacaggtctaagttgttatttttttgatgtgatgtttgcatctcataattataatagaatattcataaaattctaaataatcattgctgttgcctgactgtgtcccctgaaaactcgtgcactgaaatcctgacccccaccgggatggtgttaggagaaggggcgtatgggaagtgaggaggcctcgtgatgggatccgtgcccttataacagggacccagacagctccttaaccccttctcccatgtgaggacagagtgagaaggcgtcgtccaccaaccagagagcagcagttgccagatgccgaatctgctggtgcctcggtctcggacttccagtctccagaacttggaggaataaatttctggtttctatgctgcccaaggtatggtatttgtttttgcagccctggaacgtctaagacaatcaccagtatttgttgctcataccacaactctgtggctgtgaactgctgtgtttgctgatgatgttcctaggttcagtgggagaaggagcagcggggactttaaccccagcgtcatcagctccagcatcatcagctctggcgtcatcagctctggcgtcatcagctccagcatcatcagctcccgcgtcctatcccatcccagggcaagccgcacgggaagccccaggagcagagaggcctctgggaactgggtggcctgacagggtgggcacggtgggcgccctggcttctcctgcttgccctgactgcatccccaggaatccggacagtccctgagggggtcctggctcgtggttccctttgctgtttttttgttcatttatttgttactagacattggcactgctgcttctgatggatcctctcaccctgcctgctgctgtttacaccggaaatccctgtgctactcaagctgtctttagtgtggggcgtgaacgaacccctcgcgttccggagggaacaggctcctcttcagtcctccctgatggggcctgggcaacaacctggcagtcgtccccactccggggcaccctcctgggtcttctcctgcctccccatcagatcccagcaggacgccctgcaaatccggctggggtgggggctgacacttctgcttccctagcttatccgtaaatctgcttctgaaggcgagctggatattttcatttgtaaaataagaagttctcaaaagatctgttaaggctctcctaaaataggatgcttggatgttaacgccacttttccccttcctgccactggacacactgtggctgtcacacacatcttcctgcaggtgtgtctgcgctttggcccccgcatccaggtagactctgcagtcaggtgactacatctggcaagtcctttgtgagaccaggaggcccactggacctcacaccgcaccccctgatgctctaacgcacataagacgtggaactggctaggaaagacttaggcagtcctgtttgctcacttatgaaatgagaataaaatattgaattgactgtgtttgtgaagtttaatgaaaagaatgtgtattcttgagggcaaggattaaaatgcacttttttgttcactgctctgtatccccatgatgggagagtgctggagatggaataggtgcccagtgacgacttctgaaagcataaaatgtctgaatgcactttgtgatggctcagtgagtggaggcccagggtgagtgtgagtgcacccaggctctggaaggtgcagactgagccctcaaagaggcctgcggcaggattttgcaggacttccaagttaagagaagactcttagccgggcgcggtggttcatgcctgtaatcctagcactttgtgaggccgaggcggacagatcatgaggtcaggagttccagaccagcctggccaacatggtgaaaccctgtctctactaaaaatacaaaaattagctgggcgtggtggcaggtgcctataatcccagctacttgggaggctgaggcaggagaatctcttgaacccgggaggcagaggttgcagtgagccgagatcgcactgctgcactccagcctgggtgacagagcaggactccgtctcaaaaaaaaaaaaaaaaaaaaagactcttgaatgcagctgccgccctgggttaagatgagaggagggctggggtgagggcctcctgcagaggtcctaagactgtgactgtaggacaagggtgacgcctggtcggtccacggtgcgtgtggcccagcccggctcagtatgatcctcacaaatgcagggagcagctcccatctttcccccgctgaacctctctggccttccgccgtctgaacctccgcagccctttcgactttccctgtgtttgcgaatggcattgaggggccaggagctgcaggtgggggggagagagggagggccacaaaggcacgcctcctcctccttgccgtcctcccagcgagcagcctctgctgtttgcgcctgaaccccctcccttctcttcatcacttcagtccaggtctgtgcttctttctccctcagcgaggcccctgggcctcagcctgggtcccatccgttccatcccacagctgagaaatggccccaggggcacagctgtgattgcccccactcccccaggagagcttccagcagcttctctgagagcagctgccgatgctggaatatttcctagagcaggggtccccaaactcccggccgtggcctgtgaggaaccgggccgtacaggtggaggtgggcagtgggcgggcgagcattctcacctgagctccgcctcccgacacgtcagcggcgggattcgattctcccaggagcgcaaacgctactgagaactgcgcctgcgagggggtccgggctgcgggctccttagaagttaatcctggtgatcccaggtggaacggtttcatccagaaaccatcccaccccttttctgtagaaaaattagcttccggccgggcgcggtggctcacgcctgtaatcccagcactttgggaggccgaggcgggcggatcacgcggtcaggagatcgagaccatcctggctaacacggtgaaaccccgtctgtactagaaatacaaaaaattagccgggcgtggtagcgggcgcctgtagtcccagctactcgggaggctgaggcaggagaatggcgcgaacccgggaggcggagcttgcagtgagccgagatcgcgccactgcactccagcctgggcgacagagcgagactccgtccccaaaaaaaaaaaaaaaagaaagaaaaattagcttccatgaaaccggtcccttgtgccaaaaggttgggggccgctgtcctagatggcctttgcgacgggctcttctcacacgtgctgcctcccgctgtccactcacgaattccccaggccagcgatcttctctgccgctaggtgaacgcccctggcactcccacttgagtttgctgtcccgccctgtccccatccaactgacctcccaactctttactgttttgtccacaaagcagggcccggcctgcaccaggaggccctccaggcccaggctctggcccaccacagcgctgccttcctcgaatcccctgcgccctggagcgcagcctcccgggacgtggacatgggcggttcccatccttggttatcttttcctcttctgctggtctgagggtggttcctcggaatgcccaccacattgctatgtgtatcccggtgtccaggagcctttgcagatgggacatgtttagtaaaaatgcacagcatagaaaatggaaacagactgacatcatgtcagtgatttttcctttaggattcggcttttgcagaaactgcccccagcctccacctcactgggggtgcggagctccccagcctctttctcttttatgggtcttgccgcagaatttttaaagatctgctcagttaagttctttagggcaggtctcactttctttttcccacagtgcactaaatgcttgcagaatggtaggtgcaggcctggcggagagcattcacccatgaacgaacagctccttagtggtggggtggagagtggaacctcgtttccctggctctgctccaggcttgcttcttggggattcttgttacctacaacctaggagctccagggagaagtgaagtacaggcttggaagtcagactttctctgctaagtcctgcttctgctgctgacttattctagtgacctttctaagctcgggtgtttcatttgtaaaatgggaatttaaaagcaaacaaaatttcccacctcatagggatattttgaaggttgaatatagagaaaggatattaaaccagaaccatgaaaggcagatgtcaggatagccaggcctgggagaacaggtgaggttccgtcctgtggaatcagctcagtgagctccggccgccacaggcctggctctctggggcacatggttgagagcccgaggtgaggcccctctgcggctgggcttggtgacgcagctcccagagcctggctgtgttggtgcggatgtctctgccaccttcgctgagcagcatcaacaggccccttccccatcctctctgtcgctggggtccctccctgctcccactcgtcatgagggggtgcatttgcttcttcagtggctcttgcctcatgatgctgtcagctctaccccagcagggtcatccccgtgtcctttccaccctctccactcagaatcacggttcctgcctgggaaaccacgggccctagagggatgtctgttgcgtgaataaaataggaaggacagtgtcctgcctctcagttgtcaggaagcaagaggggccgagaggccgagctgctttcccactctgattctgaggagggaagagtgtgggggagcacccccctgggtacacctccatggaatcctaacagccaccccttccccatgccctgcccccagaactcccggcctctccgcaccagacagtcggtcaggccagtgtcccagggctgcctggcccatctctcctttgtcctgtagtttatcttttctagtttagaattattttttgtctcttcttagccatagatggcttttcctgcattcaaacccttagactggggagtggctccaggcatccaggtgagaggcacacggcaccgccccgagaaactccgtggctccctgtgcatcagcacgcttcatcaccaatggaacgccccatggcacagttatctcttttttttcttttaaaaatattttaatagaaactaggtctcaccatgttgcccaggctggtctcgaactcctgatctcaagcgaccctcctgcctcagcctcccaaagtgctaggattacaggtatgaaccaccacattcagcctttttgttgttgttgttaagaaataaaacagaaattttgatggcttaaagtcccatgttaaaaattttgtattatccattactaacacatcacacaagcactttccagctcaggtagtgtttggggacccaaggcaagcgatcattctgagctacgctgtatggattagcgaatgaagcagaagcacttggggaaaccggacaggccccgcggatagcagttgtgtggtgcctggcaattcctggctcaggagcagagctctccgccgggttcccagaagctttgggccccggtgggcacccccagaggagagagggaggagccgctcaagcccccccacgccactcacgatgcttcctccctcctgttttagatccagcagagaaaccagcctaacggggaggaggtgctgcgtgaggagccaaggacattcccagcaaatactttcacagcttaaaagccacagccaaaagcagctgctgaggctacgccaagacgaaggcgcataaaatgaggatggacatggtgcacgttggctgctttgacttgacttcagggaaaccccgtcacccatgttctctcgcttcaggcgcttctttcaaggccactgagtgagcgcacagtgacagctgtggccccccagggggtggccctgtcccgttcctatgccccagtgtatgcacagggcctcactgcccggctgggggcctggggcctgcattgtagggtgagaggtagacgagaggaccccggggtcctgccagttggttccgtcccagggtggacccctgttgtcggcagcacccaggggtccctgcagacgccgtgctccagaggggctgcacacggccaccttgtcctcagctccccatgggtgcctcagctcctgaaatcatgcagtgtggtcagaaggtggctcctgctgggaggtgggcactggggtacttgtccactcttatgtcaaaaaggcccattttctcatgacttgattacaaagttccttattaagtgtatttagtcatatctattagggatctccccatcctggcttctcctaccttgaaaataaaggaacagaactaagttatgtgcggttaattaagtgcatgggagagaaccacccagaggaccgacggctccaggaagcagaggccaccggtgcagggaggcaagtcccccatgggtggggggataggggcgccacacggccggaaactgcagagtccacattcctggacccacactgcggttcagcaccggctttgcccacagtctcacgctgcttctcttcactctcagttaataaaactgcctgctgggaatgacaaataatggtgttatttaaggagcaggagccttcagcaagagtttgggaaactaaattaggaaacaaagacgggcctgaagaatgatgcattctgtccaaacgcggctgtgtcggtgctgccaattccaatccggtgactgcactgccagctcaggtccaatttggaagagaaccctgggagcaggcccagcgcggccctggggggtggtggcggccctggtgcggtgacagtgccatctagcggtggcctgggggcggtgctggtcccgggctctcgggaaagtccacacacctggctcagccaaggaggtcagcccacggctggtcccgggtgtaaattataaagagggtgcttactattttactcacacgttagttctgaacctgagacccagcggcctgttacagaaacgcttctccaattaaagtcaagtgctgctgagtgtaggtttggaagtcaccaagtttcagtgcggggaggttccgggcagcaagtagttaggcggctgctccacccgcttgccccaggccccagacgtctggcaccaggcgtcagcaccagggattccagatgaaggttccagcgaaagctttagaagggcttcaaaccgagctccgggaggccctgacattttttatcaggacatcagctagaagggccttttcctggagaacattacagttggaaataactaaataagtgaaactttcgaagggggatatggttaacaagacacacagattgggaagaaaaataagtaatttgagaggaggtgggagtgtgtgtagaagctttgttgcagctggaaggtgctaggatgagaactcacgacaaagagctgcgggtgggaagagcccagccaggtgctgtctgcgattcagtatcctctgaacatcagctccacacagccaggggcaaacagtttccttcacagtgagtttcactctaataacattttatttattttactattccctattccactgctactattttaatactctaactatataatatgtaatttatatgagacacaatacactccaggtgtacactgttactgtgtattttaatcctattcttgtcactgattgactcatgatgacggagcatctcctcaataagcaaacagggatttggtgcagcagccacagcctgtcctgcatttgccccggtcgccacgagagcagctctcctgtggttcgcttcccggactctggccccagcatatgtgaggaagggcaggagggtgttcttggagccacgtgacatttctgcctctgactgtgtatcagatctgcttccatctcagtgggaagcaatggcatcgtggtcccttctcaagccaagatccagaatttggaggtttttcccctaaaaatattctgtgccaaacagggtgctctcaaaccatggagagagggaagcgtttctagaacagtgacctctgtggcaggtggacgcctcggccacagccacacaggcaggtggtgcagaaagtgcagctgtgggtggccgtgtgaccacccagatggcccccagctcccagctcccagaccaggtccctcccactggggtgcatgtccacctgcctcaggaaacaaaggtccctctcaaagcctgagggatggcagctacccacacagctcattcctgcagcccagggagtccacctgcctcctgcccaagggatggattctggagccactgctattcggcagtgacaatcaaaacactgttaggagaagaaggcctgagaagagacgttttgaagagccacttccataggtcatcaaacgtcctatctctattcactcatcagcaacacttacctcctgtcctcaagcacagtcctaacaggagggtcatgacaatgctaacagcagtggtgagctgctgtaaatgctttacttatcacatgctggcatgctcttcagacttggcccactgctcaaacaatctatgaccatcccattttacagaggagagaatcgagacgcagaacagctaacttgccccagaccatacagtcagaaaaggcagggctgagtttatacccaggccatccagcaccagcctcaccctccactcctcctcctgcagcctctctccatgcacccgtgagtgacagatgctacactcgggccctgccagtgcagttcgggcagaggcccctgtgaatacacatgccctacagggatgcacatggtccgatgatgtgatgctctgcagcattacagagggaggtggagtccgcatgggtatttaaagacagacatttgtttgaagaggacaaggagcagtggaagggccaaagaagcctgagcagcatgtcttcagctttgaatttaggtctgggtgcaaccaaggggcagagaggcagggagctggagggatgggtaagagcttattagggaagatctcaagtgccttacagaggagaatggatttagcttctaggcaatgacaaaggattggaagcatgtaatcctggcaaccacacagtagagtttgcttggtagagagctcactggcagcagcctggaggatgcttgcagagggcagagggcagtgggggggggccagcgaggaagctggcagaggggcctgggggaggaatgagggagtacagcctgaggcagcaatgggttcagaagagagcacccactcaagaggagtaagaagggctggggcttggtcacccattggatggggcttgctgcttttgcattccaaattgatagtttggttgagtatagaatactgagtgtgcaatcattttcctaagagttttgaaggcattgttctatttgattcttgtttccagcattgctgttgagtacatctcttagcttccttttcttttgtctctcactttgtctctgtttgtccctctctttctctgtatccccactccaggttctcaaaatttcatgatgatgaacctctgtgtggttggctatgacagttttatatgtcaacatggagaggacacagcatccagttgtttaatcaaatacttatctaagtgttgctgcgaaggtattttgtagagtgactaacatctaccatcagttggctttttgttgttgttgttgttgttgttgagacagggttttgctgttgttacctaggctggagttcagtggcatgatcatactcactgcagcctccaactcttgggctcaagcaattctcactcctcagcctcccaaatagctatgaccacagccatgtaccaccatgcctggttaatttttaaattttttgtagagatgatgtcttgccatgttgcccaggttggtcttaaactcttgggctcaagtgatcctcctgcgtcctcctccctaaatactgggattacaggtgtgagccaccacacttggcctagctgactttaagtaaggagattattctcaatactctcagtgggccggactcaagcagtcaaaagaccttaagaatataactaaggtttccccgaggaagaagaaattctccctgtggaatggaacttctcctgaacaagagtttctaggctgcctgtctgccctacagattttggacttgtggagccggtcccagatggtgtcagccagttccttgtgatgaacccgtccatatataaatcctactggtcctgcttctcaggtagagccccggacgacatagaaccatttcatgattgcgtggctactcaacgaggcctttatatctgaaaactcaagatctctgccatggggattttccttgttttctttctttgggaattttctttcttccatttgctctactctcgctacttcttcagaaactcctattagttgattactaactctcctgaattctttatttttttttaacaaaatcttttatcttcttttctcatctctttataatttatgggacattacctcaattttacattttaactttcaaagtaaactttttatttattttttaaaatagatattcgtgttctctgaatgtttcttgggttatgaatacaatatattttaatgttctttctgttcttttctgtctgatgacaaattataggtttttaaaaagattgctcctctttccagaaatgtttctgcttcctctgagcttcttttgccccctggtaaggctggtttgtttgcttggtttctgccatgttgtttactgcttgccttcagtggccggagtccttggctgttcacgcatacatcccagacattggtgcctggaggccctttatcttgaatctgttggttctagagaagaggcccctgctctgtctggagtggcggggagtggagaaggcagaggagcaggaggagccgctggattcccggagccacacgggaccaaggccttggggcctgtccatctcacttgacgttcccatcttcagtacaacggctcatcctgtttccagctcttcctagcactagctccagagcttctgttctagcttatccttctgccggggagaaggaggcctgtggcagggcatccgggagtcgaacccctcttagacaattcaactactcctctgttttccgaccaactctgaatccccactctaggtcccagcctcttttctatggaggttctgcatgctcttcactcctctttttctgggttctttcttcactctttctctccacccccatcctctccctccccaacagctcctctgcagggagctgaggcctgagccatgtgtgcttgggctgggcggctcccagtgctttgtggatgggatggtctgcacttcccttccttatttagttatttagttgcattatatttgtgggtttataagaggagagtgggtcattttagtagtgttttaagatttagtggagatatatgtgatttcagtctgcagagcttggctaggattcccaatagagatgcctaataaacccagtattgaggaacacacgtgcacctttctgcaaggtgtctgccatctttgtgtgggttgggtctgtttcctggagagcgcagggtgtgtccactgtcagcccctcttccccagggatgctcctgcgtgctcagcaggcacttggctgccacaggatggcgagggctggccctgggaccacatggatctgagggtggaggcagaagtgtggcctacagcctgtgtccttcgagagggtccccttccttcctccagggacaggatggctgttgtggtagcaaactcaccctgaggtggtctccgagtgtcaggggctgaggtgcaggacccggatatctgggtccctggcagtcagaagccaccgcctcatggctgctgctgtgtccacggtgaaaccctcctctcctgtgaaggagccactgcctcaccagggctgctgtgtccacagtgaaaccctcctctcctggagggtttctctttctcaggagcagctgcttgctgctgaggactgagtgtaatcctagcagaagggaaatgtttagttttgtttctccttttgcttgcctctcaggagcctcggttgttaacgttatcactgctgtggcttggctgtgtctcctgaagggatatgttgatggcctggcccctacacctgtgaaagggaccttattgcacctcgttttctttttaacatgtgaaccataactcttctgcaaatgtgagcttttgccctaagctcctcaaatggcatcgacacgtgggaggaaaagatcctcaatgaggagacacctgtcctgctgcacagccctgtggcagcttggcctccccaggcagacccagcaggggcacccagctggtggtgctggctgttatagtcgtggtggttgtggtagtgagggctgttgctgctgttgtcagagctgtggctgtgaggctgttgttgctgtggttgtggctgcaaccttcattgtcatagatatagctgtggcagctgtagttgtagccttctctccacttggggcactcaggtccaccctatctggctcagggcttcggctccggggtcctggaggagggagcaggcagtgggctggagtgggtgtggttgacgctggagggcagcctctgagcagctcccccaggacggaagcgaaggctgcaggcggggcttgggtcaggctcctgggagaagcagtgacgaggctgggtgcctgcaggaagaccctcagctggctgcatgttcagccctgcaggtgggtcgtgctcctgggaggagcagcgatgaggctgagtgcctgtaggaagacccgtggctggccgcatgttcagccctgcaggtgggtcaggctcctggcacgagcagcgatgaggctgggtccctgtaggaagatccgtggctggaggcgtgttcagccctgcactgccagtggtggcggccctcgtcccgtgtggtcaaatttacatttatatttactgaaatctaacaatttttaaaagttctctgtcacaggagccaaacttcaagagctgagtagtctcaggtgtccagtgaccattacgtggcacagtgttggcctgggcctcgccgtccctggcacgacccatgggatgaggccgcgcctccccccccagcggggccgccgggcagaggtgatgtgggatgctcagtgactttttagggaacgtgccaagccctctccatgggggttggggaacgtttttagtttggattctaaacagagagtgattcttgctatggaacaaatttaaataatagctaataaagcagactagacttactaaacatattcctatgcttaggagcctgcattaagcattttagatacatgaccccaaccaattcttccaacaatctgtaatgtagattcagtttggtattttctccacgtctctctagggttaggtaattttgtgcccagcagagcagggcggtgctctgtcctctgggaaatactgccttcctggaatgttccctccaacccagagtgctgagaaggctggcaggatagaggccagaacatgtctgacgtcagcgccagcctggacggagagctcggatcccagagaaggctgagcacagggaggagaggggcatgggcctctgcatttgagctgctctcgtcctgaagtttgtgccctgggccctgtgagaactcaggggccagcctgtgacaccccggccaggccatgcgagggtggcgccgggacgccgccctctgcggctcctttggggagcactgaccagcactcagggatggatccgtgcagcgagttgtcgagaggagagagtggaggaggactccgcagtatcccggctgatgcatattgagtcatccagaggagagagagggggaggactccgcagtatcccggctgatgcataatttgttcttcttatgcattttaccaccattttggctagcatttggtgcttcaaggaacagctgttagaagcgaaaatcagagaaaaaggcatttgcgtttcaaaggcttcgctttgtggatgacacatcccagagataggaggaactcctggcagcagccatagatttggaaggatgcatccccatcaggtagcggtggaggaatctccagggaggagacagagaagggagaggacaggagggagaggagtaaggggtttggatgcctgtgggtcctcagagagtggcctgagagccagactttctccctttcccctgagagcaacatggagctggggaaagagacctcagacacgccactcccctgccttcctgatggcgacagacacagagaggcctcagggctgggagccgggaaggtggaggagctgcccatgaggctggtgctttggcagggaaaggggccccccaggagctgccacctgccccaaaggtgcacctgggatgaagatgggggggaggcaccacagcgacctagttatggcgagcaagctctcaccatacagtagaggaggagacagaaattagttcagttacagaaaacagatacattggtagaatttacatgttataacataattccattaaaaagttggcatactcctgaaaacctacttactcttcccttaagaatcaagtaatattatgtttattagaaattatttggagaaatcaaaagattggaattacagtcttagcttcacactaattatgagaacgtcaaagttttttgtttgtttaattgagattaattcacatatgggaacccgcttttaaaagatcaggttccccatctctttattggatataagaatgatcctatttgtttgtactgttaattttttgtttgtatattggttttccctataaaattataacaggctaagtttcttgggacagagactgtcttgaaatttttatttctctgaagatcctagcgcagtggctggatagtccccttccagtgggcagaatgctaaggtggccccaaagtctccccgtgtgcacctgccgtgcgtgggcctctgtccttgagtgtggatggtcctgtgaacacagtatagtcattgcccccatgatggggtgacatcctatgagaccccagcccagctgccaagcagtgaggccaccggctgtgtggccaggacctgggggcctcatccgcggaggacgactctgcccaacgtccagcaggacagtcgggcctgacagctgcaagctcaggagctgagttctgccaggaacccgcatgagctgtgagttggactgtgagctccaggggggacgccacctgcagaggacccccttaggccagcctgggcttccaccatgggaaaactgagctaatgacagggcctgggtttaagctgctttgtttgtgccactttggagaacaaactagaagaccggcacggtgctcgggcatgggacacagttcggcttcctgcgctggcgcagagggccctgctgaagctcagtgctttcattcagcatctgctgaatgcttgccaggtcctggggagggctggggggcgggcgaatgtgggagtgcttcaggagggaatcttcctgcaaaaacaaagcagggtcgcgctccaccctggtcagcgctgggccagaacactgggttgtttcaggcagaggaggttgaccagatgtcacctctccctgctgctattcacagggccctttgggattcacagttcgagacagatgttgaatctgactctttccctcccaattgcttcccgtcaaacactaaaagatggagattaaaggaaaagaagcaaagggtctgaggtgcttttaggacgcagcaccgggtaccgggtcagtgcagggccggcgtcggggaaagcggagggctccccttggagggtgtctgggcctgaggcagagcagggagctgactccaaaggtcagagaagtcaagtccctgaaggcttccttgtaaagtggttcagtaaggccagttttccacaggagtggcgtgggggcagggggagcatggggtgggggtcgggaatgtaattctcagaagtgaggttcctcatgagagcaggtggtggggtggggtggggctcactgactgagtcctgctttctccagagcagatgcaggaggaggcgcatcctggcgaggatctcactttagcaatccccacccctgctggtgccccagacccctccccatcctgcagggctctggatgggtcaacctgcctggcctccaggactagagatcacggcctggacacagcgcagcaacatttcctctcttttccctgaggtggtgacctggccagatgactgaagggctgatagtgaggggctgccagcccagaatgggggcatggggcttcgtaggagctggggcacggcagggttcagccctggatggaaatgctctctgtctccctcccttgtgctgcatttactcctgggctggggccaccctcccttccacctcctgcagatcacagagggacccagagctcaggagaactttcttcctgtgttataaaacaaggtatgccattgaaacatgcctgggtcaaacagaaagctcccaccgggcctggaggagcccctggcaatgtggtcctcattcccgccaccctctgcctagaaggggatctcagagagttgaggggacctctctggttgggaaaaggggagcatccagggagcgccaggagagtcctggaggaacattctgaggtgacacggccccagggctctgtctacggcagggatcagcattgctgacacacaaaatatttattccctgatgatgtggaatttggaatcatcatcagagacttcagtgcagagcaactggaacctcctgagtgtgccctgtctatatatctggtctctggacagggtggccagtccttgtccatgacagggagagcgaggacccctcccctccacacaattggcagacgaggaactaccctcctggggatccagaggcagggcgcccccctagagaggacagctggggagggtcccctcactgtacttcccccacacctccagacaccagctagtgatctgtcctgagatcaaaaccagaatcctagtagatgagctgcatgcttgctgtggacgccctgcgccctgagagtcttgtcctggatcgcacgggtgtgtccacaaatgagacccagcagccctggagcagccccagcgtctctccctactggcaatgcatccgggagcgtggcttgccctccgagtcagttccctcatctctaaaacaggaccacacagatctcagggcgcgttggttgaatgtttacctgtgttgtgtaaaaactatggctactcagcaccacagagaggcaagagagcatgcaggcgtcctgtttgggatcatgggagaccatattcccagcttcctggtactaggtgacactggggggcctgttttacttatggaattcccagcttccctaatggtaggtgacatcttggggcaggatttacttatggaattcccagcttcccagtgttaggtgacactgtggggtggtttttacagatggaatgagaaagaggtaaggtgtgctcctccagatccagaccctaaacacctccctcttgggatcctccacgttctcttcctctctctgttatggaataaaaacaaccgtatgaaagtgtgtcgaaggtgccagagcccttctccctgttgcctgtccagcactgtgatgtgtgtagacctcagctctgctcaaatagtttgaagtgtgtttgtcatggccgtcagcctattctcgctaatcttccattaaatgagatgactgatttaaaaaatagctcacatagtaagtactcaatatggtgatttatttttgcaacaattcccttgagatatatcaagcaagacaaacattctataaaaggttatgttctcatttataatggactagagaggaaccaaaaaataaatagaacaattcacatgttccagacagaaaaggttttaagagggcctagggaaggactttaaaaaaatgtatggtggacgagactcttaagatatgagttacttctaaaaatacttgtttttcagagttagaactttaagtttggagactcttcttaaatttcactgaagtggagtgagaactgaagtggtggcaaaaaaggatgctcagggcactgcacatgagagagaagtctcaacagctgcagaggaacctccacttccctccctcttctgccccatcctccctgcatctactggctgcccagcgcttggtgaggatctcccatgaagatggcgttgggcctctcacctctgggggtgctgaggactgggcagagcactccctggttccttctcccccaactttacctcctgacttcttttgctggactagaatctctcaccttccaaccttcccatacacctgtgaactgaccctcccatacacctgtgaactgaccctcccatacacctgtgaactgaccctcccatacacctgtgaactgaccctcccatacacctgtgaactgaccctcccatacacctgtgaactgaccctcccatacacctgtgaactgaccctcccatacacctgtgaactgaccctcccatacacctgtgaactgaccctcccatacacctgtgaactgaccctcccatacacctgtgaactgaccctcccatacacctgtgaactgaccctcccatgcacctgtgaactgaccctcccatgcacctgtgaattgaccctcccatgcacctgtgaactgaccctcccatacacctgtgaactgaccctcccatacacctgtgaactgaccctcccatacacctgtgaattgaccctcccatacacctgtgaattgaccctcccatacacctgtgaattgaccttcccatacacctgtgaattgaccctcccatacacctgtgaattgaccttcccatacacctgtgaattgaccttcccatacacctgtgaattgaccctcccatacacctgtgaattgcacctgtctcctggcaggccctaggttcctcacatctgcacccagcgaacacatggctgcttcctgtttcaacacagacttaaatctcctcttataaaatgtattgagtcaatggtgcaggaaaacttttcttaggagctgtgtgtgcagcgccgagcgaggtgccccagatgtgcaggaaggaacaaaggtccccacgcacagacattgcaatggagcatgacagatgtagcagctacttagtatcgggtagaaagagaagggacagtgtctgcagagaggaggctggggcagtttcaccaagatcatcacagggatcggagtcagggagagatgagatagtggaaaggagtcactcacggggggtcaggcagcctggacctgagccctggctccgtcactcacaggaccccaggcaggaagttctcttctctttgcctcaatgtcctgatctttaaaacagggataattacagagcccatttcttcaggctgctgtgaggattaagaaggttggtatgcggaggtgcttagagctctgtctggcccataataagtcctgaacagcctccactgacattgtctggaagataaggaggcatcacatggcagatggggagatggaggaaagggtgttctcggcaccccgaagggctcacagggagatggaggaaagggtgttctcggcacccggaagggctcacagggagatgggggaaagggtattctcggcacctggaagggctcacagggagatgtgggaaagggtgctcttggcaccccaaagggctcacaggtgtgaaacaccatggggatgaggcagcttgggatggctaggaggagatgctcccagagacaggaggaaggccaggcctggggaactgtggagggtggcaggagtccttccctcaggagcctcttccctgggcctaggggaactgtggagtgtgccttctcgctctgtcctcgcctgctggctggctgcggcctccctcacaggatcctccaaattccacagccccttggtggctggtggcctggagctgctccctctgcacctcccgcatgcacctgcatgtcaatggggctggagtaaggctcccacgctgctgtcttccccacatcctgacagctgagtgttggggacaaaagtgtgcccttccctccagtggccaacacgtggtctccaattccctgtgtgtccttggcatggccgtgattcccttggaatcccctctcctgaaggtgtcccagacaccaccacaccctgcaaccccactcgggtgcccgacgcgtgtgtgaatgactcccatgaagtccttgtccagatggagcagatggagctctgctccgaggacccctggctccccccagatggagctctgctctgaggacccccagctccccagtgcagttacagccacatttgtccagcttgtctgtggcttcctgacctccaccaagatctgtctccacctggtactcctgctgccttctgtatctttaaaccatttcttcctcctggtttctcctcttcagataaattccagacccacatttctctctgcctgtgaggtcctgcccacttctgcgcctttccagctactgccaacgtcgttcctcccctctcgtctggtctgcatttctagaaccattagtcatgtcctctacaaccccctgaactttccatctgactctcgtcctatctcagtctggttttggtgcctgatcttttccctaaactctccacaaagtgcctcagttgtattcccacggccaatgccccaaatgagcccagcatcgttttgaactctccgccacaccggcctctcgccactttcccagtattgtgtgtgttcttttctctggaagcttctgcacatcatggcgcctggctcccctaatgccaccatgcaactctgtcttcatcacggcctctccgcctccacctgtcacaaaacgtgtgtgtctcccaggggtgtctttgctgatgctcttccccctggacccctgagtcccggggtgaacctgcagggtcaagtgtgacctgagtgctgctgatttccgattcctacgcggctctcctcagacacttcccgaggcccgttaccagctgcttggtggatattcccccttcaaagtcccacagaatctcaagttcacgtatttaaaatgaaataaccatctttccccacttttatggtgtgagtatttgtgtccctcgaggttcctgtgttgaagccctaacccctgggtgtgtttggagctggggcctctaagggaataattcatgtaaatgggcttgtaagggtggggtcctgatctgatgggatcagagtccttatgagaggagatgccagcgagcctgctctctccctgccttgtgaggacacagtgagaaggcccctgtctgccaaccaggaagagaggcctccccagaaaccagatcagctggaacctgatctcagacttccagcccagggacaggggatagaggtcagttgctcaagccacctggcctagggtattctgttgtgacggctgagcagactaagatacccatggcgttcaaggcttcattctttccttgtgttcccaactgccagcattgccacccgtgcagctgctggggctggggccacctctcctgccgggattcacccacaaggccctgctcattctgtttcctaaacagtcctctaatctgtccttcctttcatgttggaggtctagccctcatcatgcctcgcttaggtctgcaggaacggctcaacgtgtctgcctgcccgtccattccagctctcctccgcggccaccaaggtggtgcattcaaagcccggactccaagagtcacttaaagccctcaatgtaaccttcctccctgtggtgagctgtgccttttttcaaaattcagctcctgtcttggctcctgaagggccctggcctgttcaccccatctggactagacatttctcctctgtgttgctgatcgctggcctggcaccatgttgcagcatctgtaatctccttcaccccagtccacagcattctctaaaagatggtctcttctctcctctaaagagcaggccacggtactcaactttgtaaaccagacctggacggagatcatcggtgctggtggaggcatgtctgtctgtgtcggccgaatgagatgaatgaatgacacgtctgtcggcggcttagggggagggtgagctgcaggttgagctctcctcgggcacagaccccaagggtctcaagttcctaggaagcctcctcagatttctctgagtgtaaagccagtgtcccccacagtgtgtgccagtggcattgcatctgtcccgtggttggccttgccccagtgcccgcatccgaggctcttatgtgagtctgttccctcactgtgaggttctgggctcggggagtgagtgttaggtcttactcaccatcaccaccctaggctctgctgcgtctgctatgtggcttggccttagcacctgtccagaacgcttgctgggggtctgcatgggcctcatggtccctggtcatggcctggtactgtcctcagtctgtgttcaccgggactgaggacaccttcctgtcctgagctgtccgctctgctgcttcctcatgtatacaatcaacattttctacctgacttctgtcgttgtagaattctccctgactcctccgtcctgggcttctccatgtgcctccagttctccccctcctttctgggagggattggcctttacacctgacctgagggtctcatgatagctgcttttacaatcacaacatggcatcttccccaaaggtcatggcaccacgtatgtgtgtgcccaggagccgggatggggccttgacttttcatcttagacactgcttttctagaaagaccttgccaaccctaaagataaaatgttttctatttctcttacatcagttctgcttttttcagacacgactcagctcagggagcaggatcggggaaaggagccctcctgcctaaccctcaacgcagaaagagcagcggctgcgccaggactccccatgaagtgaagtggaaacgatttcacagcaaatggggtggatggccaggggctcctgtcaggtctgagacccggggccgggagtgggctgggcatgtgagcagggccccaaaccatgggcattggttcctgcttcctctactgtttctattttggcacctgcttgaaagcagttcttcatcatctggctagattgtcacagtttggggtaaaagagaaataaaacaggcaacttctatttcaatctgttcttgctgctgcttctaaccgctgctttgtttgcgcagtgggtgggatgcacaggggccctccaaactccaatcttgacgtgcccgcgggggctttgtgggaggctcctgctaaccaggtttgggaaaaccaccaggcagtcctggcagtctgggcaaggccagggcttccaaggaaagagaaatgtctaagacttcctaatgagtgtatttctgtgcgcttagctgtgttcttgctgggtattcatattattacactttcagaaaataatattctgcctatctattaaaattgatgaaggcttgctcaacagagaaaaaccatagtcaacacatgatggaatattattcagtctcaaaagggaaggaagcttggatacgtgctacaaccttgaggacatggggctccatgaaataggacggtcacaaaaaagcaaaccccatgggattctacttataggaggtccctagaagcatcagattcacagaggcagaaagcacagtgtgggtgccaggggctaggcagctgaggaagggcgagtcagtgttgaatggagacagtgtttcaatggagacggaagaattggagagatcagttccacaacagtgtgaatacaggtactcctccacataccacggggatggatacaggtactcctccacataccacggggatggatacaggtactcctccacataccacggagatggatacaggtactcctccacataccatggggatggatacaggtacttctccacataccacggggatggatacaggtactcctccacataacacggggatggatacaggtactcctccacataccacggggatggatacaggtactcctccacataccacggggatggatacaggtgctcctccacataccacggggatggatacaggtgctcctccatataccacggggatggatacaggtgctcctccacataccatggggatggatacaggtactcctccacataccatggggtcagcatccccataaagccatcttaagttgaaaataccatatcttgaaaatattttaagtcaaaaattcatttaatacttgtactgactcaatatcatagcttagcctagcccaccttcaatgcactcagaacacttacatcagcctacagctgggcagagtcaacttacacaaggcctagttacacaaaagtgttgaatatctcatgtaatttattgaatactctatgaaagtgaaaaagaatggttgcatggatactcaaagcaccatttctaccaagtgtgtattgctcttgcaccactgtaagatcgaaaaattgtaagttgaggaccatctgtatacctaacactactgaaccatacacctgaagatgggtgagatggtaaattccatgccatatgttaatattttaccacaactacaaaaacaaacagaacagaacagaacccaggtccggtgtgctcaggcctggactgcccctttccccttatgccactactccgggttttcctttgctgcacaaacagggctgctggtcaccgggcaaacacgcccagagccctgtgacacacagggaggtcccctttcctccttggaggtcgccgaagccagcagttcagagagttctgatggtgccttttagtaaaacggaggaatatcaacatttccgtgtagctcagccagcccatggcagggctccagcaggagccgcccctggcatgctgacatttcaatctctgcatacacgtgaatactgatacccggggctggagcctggggcctttcccatcaagctgtggccctgcaggctaggtggagcacaggcagctggagtcatttccatcatgcctggacttctgtgggccctccagggacctgggatcctgaaagaggaggctgctgagccctggggcaagggtgggtggcaaccaggtgggagggaagtgagaggcatacagctttccagagaagggagcttctagcattgcaaattctccgagtaacatgggcctgtaagctgtgattttactcactgacgtggcctgtggcccaagattccaacagcctgcacccagtattcttgcaccccaatattcatcagcctgtaccccaagattccatcagcctgcccccaatactccatcagcctgcccccccaagattccatcaacgtgcactccaagattccatcaatgtgcaccccaagattccatcaatctgccaagagtccatcagcctgaaccccaagattccatcaacctgcccccaagattccatcagcctgcactccaacattccatcagcctgtgcccccaaattcgaccagcctgcaccccaaaattccatcagcctgcacccaatattccatcagcctgcgctccaatattccatcagcctgtgccccaaaattctatcagcccgcccccaatattccatcagcctgtaccccaagatcccatcagcttgcatcacaaaattccatcagcctggccccaatatttcatcagcctgtaccccaagattccatcagcctgcaccccaagatcccatcagcctgcatcccaaaattccatcagcctgcatcccaaaattccatcagcctgtaccccaagattccatcagcctgcaccccaagatcccatcagcctgcaccccaatattccatcagcctgtgcccccaagtttccatcagcttgtcaaggccagagcatgcatttcaatatactctccactctgtgccagggaccctggggaagaggctcccttttggagaaaagaaacagggaagggtggaaattgaggtgaggctggcaagagagtagacagaggtgtgtgggtgagggtctagcagcagaaatttgtgcctggcatttgggaaggggcgtcatggggcggggtcctgcttcccacctcagtggctcctaagctctaagccctcccccatggaaaaaggggcaggacagagatcttggtggagggctgtcctctgaccctaacatacaatgcaaccagaggctggggagtgggagggaacagcattcatctggcacctggtatttgctgcttaaatcaaaggggcaaactctcagcaggaggaaagctaaagcaccaggctccgcagaggcagctctgaaccagtgccgtccctggagtgcagaaatgctcacgtgagaggacgaaattgttttcgtttgtgtcaggttagcgaaacatacaaacccttactcataggtcaaatgggcagggtttttacaaaatttttaaacattttattaatggtgaaaggtttgggaaagtagacacttttttggagggcattttggcatgatctgtcaaaattttaaagctagcattcttgtttccaggaatagagcctgaagatctgcttgcacaaggacatggagttgtgtgcacaaggacgttcacgcggagttctttgtaacaatcaaacctggacaggacaccaggtggcacgtgcaggaacaggctcaatggggagggtgaggcggctctgtgacaccctgggcttctgtgcacctaacaaggaacgccctgtctgctgggccctgggtgatcctggtgagcagctgaggcccctgtcctcatgctgggttctgggagacactgagatccatgtgtataaataggggtgcttttcagttccagagaagacgggaactgcctgcctttgagaagggattaggtcggggaaaggacattcaatttctctctctcttttttttttttgtcttttgtttgtttgtttgtttttaatgagacagagtgttgctctgtcacccaggctggagtgcagtggtgcaatcttggctcactgcaacctccgccccctgggttcaagtgattatcctgcctcagcctcccgagtagctgggattacaggcgcgtgcaccaccacgcccagctaatttttgtatttttagcagagatggggtttcaccatgttggccaggctggtctcaaactcctgacctcaggtgatctgcccacctcggcctctcaaagtgctgggattacaggtgtgagccactgtgcccggccaatttttctctttaaacccatttacattgtttgaattttctacctgagcaggaatttctttaataattaaaaaaaatcttccttaacatttaagggtcagagtcacctattactgaacatgccattattcctgtaatctgcatacccctttgttcattctgtgtttgagatggatttgaggcgcaggtgtgattttcgtagaaagtggcatatagggcagcagaaaggaaaccattgtaaatctccccaaagggtatggccttcacatcgtacatgtgatgtgtgtatcttcccctccacctcctcaaggaagctgagggacgctgagtgtaatgggtgccgtcagccttggagacgggtcccatcccaggtcttcactccccgcagagggaccgactgcacaatctgactgcacagaacgggcctctcctaagataatctaactgcatgtatttctttttaaatgaagcaaacaaaaatgaatgaggttgatggggttttttgggaatgttctcatgcatctttggtgcaggcattcaccaggagccaccgtgccaaatgccatcctctttcccccaatgacgcctgcctgtgaatttcgggtgaaataagtaactacatctaaagaccctcatgtgcatgtcttaaatgaaaatctatatcttactgtggattctagtttcaaaaacggaaaactgctgtggtcatctatagatggggctgagggaggctgggctccctaatgtaagtttaagatgtttcaacactgtccccaaacccttgaattttgttaggttggtacgatagttttcagccttttctttctaaacacaggtgacgggagaagctggcacctgctgccgtcataaccagccgtgccagtcggctctcggcggcaccatcccagccagggtcccgcagacgcggccactcacctgcggtgtgtgaggaagctgccgctgacgtggcctgagccgtcgcatcctggcgtggggcaggacatgccttccgtcttgaccgacttccaggagaactgggagccattcaggtacccgtctttctgcctcttggccgccaaggggcacccggaggcgctgcgatgggacgcgtacttcccagtgatgtggccctggccgtcgcacccggggaccggacacctgtaggcaggcagaggtgacacactttattgtctggccaccgtcgcctggtggcttctgtaacaaagtcagaataacccggcatgaagaagaaaaaaacaaccatgccctcctggctgggcaaaaggaaaagaaaaaagagaaagaaagaaaagtcactaaaagacaccacctagtggaacactgaactgtttcccctgcgcagaaggcctgacccattgcagatggaaggattttctggaacaaagtgtatgtgcctggtgggactgatgggttcagcacacaaaagaccacgcaggcacatgcagctacacaagcgtgtgtttaaaagataccactttgggacagaaccatggcttttcaggtggaaaaaatgcaacgtcaataagatgtcgtggcattatttttaaagaggctgtttcgtgcttttctcaagagctagaagacatttatttgtctggccgtatcttctggaggccttaaaatgcccttccagctagagaagatcctaagctgcagagacgtctcatgaagtctcctggaatcgggctgacacagggacacgggacaggtgtgttcctgggaacttgtgaatggcaggaccaagacacacaccagggcagcaaaggcgcctgaaggaggcagggcctggcctaagcgctcctcatgtgtcctgagcagtgagtttgcctgcattgtttttattaacagaaaagtttgcattcctcagaatttgcattacctatttattttgacaaatcttaatttatttgaataatttatgctttaattcatttttattttgttttaattaaaacttttttctggggatgtgaagtgaggcttactgtgtgggtttttggggcccaggcatggctggcgtgggatggggacaaacacccccttgggcagcccagcggtagtcacaggctccaagctcagtgtccactgcagccccaagccctgccttagagcaaggcagggtataactaaactatttttataagccagaataccagtgaaacatccgcttgtgatgttgtatttagtaccttcaggagcattcaccaatctgccattcccaagaattcagctgcttttcccaccaagaggagagggaaggcttgtttttggggatttgggttacatggaacctcagattgatggatatcagcttattgctggacagcccatgtaacttttcagccaatcagcagatgtgctttggtttgggtctaagttatctgaccttgcatttgtggaaatctcaaagaatggccactaagacccgctgtctctttttcttgttgacatatacttgctttgcttgaatgcctcgtccccacatggcagccctgctatggttctcagccccactggtgctcatacctgatgggttcttgatcttctttatcttctttgctctgtgctatcctgataccacttttctttgctcttgggcaacctgaaaggctaaataagaaacacatttcagaaagcaccccacaccgttgatttcagtgagctttctttctttttttttttttttttgagacagagtctcactctgtcacccaggctgaagtgcagtggtgtgatctcggctcactgcaagctccgcctcccgggttcacgccattctcctgcctcagcctcccaagtagctgggactacaggcggccaccaccacgcctggctaatttttttgtattttttagtagagacggggtttcaccgtgttagccaggatggtctcgatctcctgacctcgtgatttgcccacctcggcctctttttttttttttttttttgagacagagtcttgctctgtcgcccaggctggagtgcagtggtgcgatctcagctcactgcaagctccacctcctgggttcacaccattctcctgcctcagcctcccaagtagctgggactataggcgcccgccaccacgcccggctaattttttgtattttttagtagagacggggtttcatcgtgttagccaggatggtctcgatctcctgacctcgtaatccgccccagtgagctttcttaaccgacgaggctgtgacttgattctctccaaaacctgtgcttctgggcacaaagtcaaaattcaggaggagagttctttccctgtgtcctctccaaggctctaggcaccgtcagtcccctttcaagaaagttgggagactggggtgggctaggatgctgtgaacgggagagaaactggtccaccgggagggagcagaagcagtcgggagtcaccaggaaagacgctgggggaggttttgttgacagagagcgcgggagcgagcgcacacggatgcgtgcatgtcgggggtgaacatggcagaaaaaagcagcctcccagccccattcttgggtactctgtctctcacagcagcttcccaagcacttccatctcaggttcgtgtcttgggagacagtgatgggctagtgacttattccaggcttcgggttgtgcctgcagacgggagagtgggagctggacacgcctattttatttaattttcaacctcttgggtacagaggctttggacatgtttgtaaagggaattttttcagctggaacagaaacatacacacacatacacatcacataaaataatacataaaacaaatgggatttttggaaaagaattgaagaaccagaaattgggcaatctcctgccatgctattgggtcttgtggaaatcgcgggcccggcgctggcacacgggtgggtccaggtgggaggccactcttctccctggctttcctgagctcggggatagttttcttggtcagttctgattcttggaaacacgcagattcccaggaggaagtgctcactcccctaaagggaggctccatcctgcctcccaggccttggccatcctcctccctgttcaggtgggggcagcacctcagcacaggcgggtgtgggaaggttcgggaaggttcgggtttcgtgtctgggcagaaaggaggttgtcagggccccacagcgccttcactcccaggcccctgctgccccacctcctggagccagcggggaatcctcctgctccttcccctgtctcgctcttcacaggaagaggaaagaggcggcgaggcgagggcacctgagctcgctgcctgctggggcctttcttctccccgccctcttaaaggagggaatctggaaagaggggcccgcctgtgcttcccccgacctttccttcctcccttggcctcctccgcccccgccccaccctctggctcctgacctgcctgcaggtcgctggggctctgaggccggcgtgggttgacctcacgtccacccctgcaccccactgaccgctgcacaactgcgcggatgccccaaaattagactcatcgtccacgtcaccaacccaaagccccagtccagcagaccgggtgcgtccttgctgagttttgcttccctcaggttccgttgatgtcacacccaaggcctctcctcgtctgtccagcttccgcttccaggcgcttccgcttccaggcgcttccgcttccaggcgcttccgcttccaggcgcttccgcttccaggcgcttccgcttccaggcgcgcggtgctagtaccggcccccgggctgggaacacctccaggccagcgctttagcatcatccgaggctctccgcttcctcagggggacccgagttcttccacgcgactcgtaggccccgccatcctcgctgggctctccctgcaacccttgccgccatccttcgggctggccgatgtccctgccttgtctgtggctcgttcccagctgcgtggcctctgcatcctgcaagaagcctgggcctggctgtcctcacagtgcggccgctgcaggctcacacggttctctcctctacaggctcctctgagaggcgatgcctgggagtgtaaaccatgcgagtgttcctctgcggttccccaattcctagcccgacgccttgcacagagcgggtcattcaatgcatgaatgaagaaaagaggaaccaaggggggaattacggtatcctacccagggagagttactacggtatcctacccagggagaattactatgatgtcctacccagggagaattacggtgtccttcctagggagaattacgatatcctacccagggagaattaaagtgtcttacccagggagaattacggagtcctacccagggagagttactgcggtatcctacccagggagaattactatggtgtccttcctagggagaattacggtatcctacccagggagaattaaagtgtcttacccagggagaattacggagtcctacccaggatcccatctccccagatgtaggattgctgtgggggaagccgagcccctgactccaccacagaggccgagctcctgtaggccctgccccctgccctgtccctgagtcactccctgtggacttgggagccagggacagctctgggccaccatggaggcctgggctgggggcaaaactaaaccaaacagaacaaatctgcaacaagatttggctccgacaatgcggtggcctccaggaagccttggccttggcacagggctgctctagactcctagaatgcctgctctggggctcaggagctctcatctgaaagccatgtctgttggtgagaagaggccctgtggtctcttctggggcactagcccagggcacctgtgagaagcctgtgcttggaggggtgtggtctttacctgcccccactcacttggtgggcagctcggcacctgtgccccacggggtcctctcttccacacgccgtagcccagggcctctgttccatccctagcacagcaggacctagcttccccttcagcactgaacacccccaggagtccagggccccccgcagcaccctgttctcactgtagcatcttaatgcatggctggaacctttatactgcttacttcttgctacttttcatgcttgatgaaaacaagggaacgtttccctacccaccaactaagcactagaactctaggagcaatggaattagaacttgttcagtatttaaaacttccctttttggcttataacataggatggaaagccagtacttgctatggaccccagagtggagattctctacagaatgactatttgtgagaaggatctgagcggccacttccaggtattgcgccaagggagagaaggaagaggcgatgctatgtataggctgtgcagacctggcccgagtgtctgtgcttcggcttccttgtctgtattttggggcagaaatacctgcatcatcggctgtgaaaactggaagtgataacatgatacatacaatgctgggcacagagaaggagctctgtgattttagatcctgactttcacctttatctgcacttgtgatcccttctttagggcccagatttgaacctaacaaaaagtcgctccccctcgtcttctccttccaaattttagaaacataggggttcatttgcaggcccttcccgagccctggagggaggggagcaatccctcctttcctgggcattggagctacagctccatgctctgctcagggctcacatccacagttcatttcttaggatttggatccatcttcctttttttttttttttttgagacagagtctctcgctctgctgcccaggctggagtgcaggggcatgaccttggctcgctgaagcctccgcctcccagattcaaacgattctcctgcctcggcctcctgagtagctgggattacagacttgcactactacacctggataatttttgtatttttagtagagatgacgtttcatcatgttagctgatctcgaactcctggcctcaagcgatctgcctgcctcagacttccacagtgctgggattacaggcgtgagctaccaccgcacccagccaccatcttccatttttaaaagtgtcgttttcttttcgtgaatgagttggaacagctcatctgctggtgactctggaagctgtttttctcctctcaccttcctcctttgctcacctgaatatatcataagaatcccaaagttaatgtgtttagacagaatctaaggcccactcctcctggtgggcttctttataccggatgatgatgtcccccggctgcttgctgcatcccaggccctccctctttagcgcctgccttcttccccaggggcccctcccactcctggccctgctggtcacggccccattgctgctctcctcacctgcaccagctcttctctcggctgccactgtcaccatccaagtgcgcttttgacacctgccgtctctcagcagcccgctgtctaggctaaaagctaagcctgcacttgggtgaatacccgttttccagcaaataaaattttacccccttatactgaattcaacgggactcctaaagcaagttccgtttgtagctgctcccataggcttagacctgaaactgttgccaaactgaattattcactgtcaaatgtgcattgatgttggtgttataagacgttctgtaatactggtcctttgcttggaatatccttctctgcatgacctcctagagaccctcaccatccctcatgcagtggctcagcgtcgcctcctctctcctgggctccaacccaccctgccttgtcagaattcagacatgacttactcattatctttaggctttgataagtacatacatatttgaaaagtatctttcaggtcagattcccaccctagtgccatcccgacctggaggcctcaaggccactgccctgaggtgcgccctcctggaacccatctcagtttcccttaattgtgcaggaatgcgtgagagtgcgccaggctggttagcttttatgtctttcctcataattacctgtacctcgaggctaggaacaccttagttatcactgttccttagcctcggggacagactacgtactcaaataggtatttactaatttactaggtttctggaattccacgctggcatttgggattatgtttaaatgattaataatttcctagacagaaactgttttccacaattcacaggggcttgtcatatgtccacatctttatctggaactttgtaaacgatggaaacgctgtaagggagagctctgtgttctctgggggagggaaaggctgggggtgagcacacggacagagcatacggacagctccagcgagaaagggccaacaacaggtgagtgcaggattatgagaaactggaggatttgggatcccgggagacatgtggtcaagggcagtgtacctcgtggcccccaggccaaagtggtgctagggtgggtgtccggcccggagcccaggggcagagcacagacctcactgaccctctggcgaaacagctctatgccccgcatgagaatggatcctgtgaccctccggaccctctgactaaacagctttgcaccctgtgtgagggcagatactgacagggttggacaagcaccaccttacaaggttcccaaggccccctggtgaggagccacctctccggattttggcagcgggacctgagactctccaaggcagacttgctcctggctcttctgcatgacatcaagcctgtttcttcactgtcttcttcaggacctggtgatgtctccatttcacagcaggtaaggcctttgggatccctgttgaaagtccccacagcacactggagtggcataggtagacactgtctggccgtttgactgccatgctggaggcttcgattttgcgcattattgtaaaagagcagagtggaagtgctccaggtgagcacaggcgctgacaagacgggcagctgagcatctctgtgcccgcgcatcttcatttgcagtcaggataccaataatctcataggatggtgagattatagatgtaaaatactcactgtaatttctggtacatagcaggtgcccagtgaatgttcttttgtgattagaggccattcgggaaccgtagaggccacagggtgttctagtgggagtcggattcctggagcatcatcatttgtggaaaatgtggacttgacttctgcattggaacaactccagggcccttggagctcttgctgcttgcctgatcctatgaaaaacgcatgtgggacggctgcgcagagagaatgaggagcacccctgggcaggcctgtctggcgggacctggagactacaggtgaaggagaaggcctgggggtcggagaaaagagcaaagggagactacaggtgaagaagtgggcctggggggtcggaaaaaagagcaaaggggtctggaaaacaggattttgaggacacacttaagaaacagtctgttagtttgaaaacaagagtataaagaggagccccatggatgactgtgaatgacatggaagcctttgtaggcatttggtcaacagggcctctgttcactgaggacggagagtcggcaaagcagcggatagaggattgtttgatagaacatcacagccaataaacatttgttgaaatggacttagggacgttttagatgctatgtggaggccagaaaacaccaccgctaagaggcaggtacaaccccaccttctctaggtggtttaggcacacctacttcctccagggccatcctaggctcatggggctgccaggaggtgggactcggagtcagacgacatgggctccagttgcagctctgctactgaatctcctggcccctcagtttcctcaaattcaaaagttaatgaaatcgctaattctcagcgcatctgtggagatggtggaggacagctcctcacccagtttcccagaatgggcccaggagaaggctggggcttggcctcagttttctctcagatgggagctgggaatgctctgcaactgcagacagaattggagtgtgtgcctttgtcctgggagcaggagggagaattctacagacaccacggaagcgcgaggcatttgtcctgggagcaggaggaagaattccagacaccacggaagcgcgaggcgtttgtcctgggagcaggagggagaattccagacaccacaggtgcgcgaggcggatctgtgctctgaacaggttcaggatcattgtttggtgacttcccctctcacaacagcccacagtacaggaggaggatgccttgaacccacacaactaccttgaattgtggcataactgagggaaaaagaaggccagtgaatcatcgtctaagtggcgtttgcctataggtaacattatcttcctgttcctgggaaacagacaatagaagattaacatgaaaagaagttcctcctacttgcatttctggccaccaagagccaacagacctttaagagtttccttgtttgcttgttggcttctgtctgtctgcagcagctcatttacacagaactgcacttgttttgctggggcctccatcttcctttagcgggggctttatgtaaggactgtcacgtggaggcaacacttctgctgagcaacgtgcccagccccgcttagatgtctatactagggaagctgttactagaacaagtaacgtcacaaggtgctccaccttcagtacgctaaaaccccgagagggctctgtctaggtctcagatttgtcaaacacaaatcacacttactttccaactccattgacttaaccctgggatcatttactccaggcatagatggtagcttaaatttgagcttagattttaatcatgggtttgtgctatattaagacttaacagtctaagatatatgtaaaatgaataaaatgtttaacccacatgaggactaaatttacatgatgccaactcccaccaaaaaaaaaaaaaaatcagaaaaacagacatttggacacaaagtgaccaggaagtgttcaccttacggggtgctgacattacgccatgccggaagctctggccacgtgagaggaccaagacatcgcttttctaagatgaaataaacaccagcatggaatgttcttgtctttgtatatttaattggagttttacaaatttttttttaatctaaaccagtgatttaattctggcaatcttgttggacggcgcgactcactcgtgttctaccaaatgtggtggctgtttctgtgctgcctggtgaagccacatcaatgtcataagccctctgctgccctgggtctgtggcagtggtccccccaggggacactcagcagtgactgcaggcatctttggttgtcacgaaggggtggatgctcctggcatctggtgggtgaggcccaggggtgccgcacaggtcccacggtgcggaggacggcccccacggcaaacagccatctgcccccacttgccagcactgcagaggctgaggaatctgggtgaagagcttgcaacgttggcacggagtctggagaatcctcccacaagttgcatgcttcatttttctttggtggcattcacaatgtgtgcttttcatagacacgtgctgtttaaacatagctctcaaatggctgggatgtgagcacaggagcgagttaccttcagtgagattttaatgacaaaacaatcatcctgtgagttctgtttctaatccaaaacgccagccagtcaggtgagggtcccccactctgactgttgggatctggtcactcagggacagatagcaggtttcactcagctactctgtacagacaaccgtgctctagggggcggggtggtgaggggggggccattatccactgctgacagtgtctttaactctcctagcttcctttatctccctctctccttcccttccctcgctcccttccctcctgcccctccctccttccctttccttccccttcccttcccttcccctccccctcccccttccttccttccttccttccttccttccttccttccttccttccttccttccttccttccttccttccctgtcttttctctctttcttttttattgcaagcagtatgttaaaagcaggaggcctcatctgcgtctggactgcgtactttataagctaaaatttagagagctgaaagggagcagctaccttacaacttcgtttatttgatagatgcagcactgtttcccatacagggagacttcactttaaatcggtcttatttcagaaacattcttgtctttacctcagcattggctgttggtacatctaaacatgacttcaccattcacagcatgtagtggattcgcctttgtgtggacgatatgttcacaaaggttttcttcttgaccaaaactttagttgagctcctctgggtcctttactagaatgcacccgaccttggcttccctctctgtgcttgtaggatccagtttgagcaagaatcctgctaactcagtttaagaacaattccccaccatcagtgtcggagcatttggatatcctaccaccctggccggccatcagcaatgacagcaatgatcccatcaagtccgtctggccagaaatcccttctccttggtgcttcccgtggggaattttccatccactgaccccaatctgctccttggttgtaaatccccacttgtcctcattagggtttgagctgagtccagtctccccgactacaggagctcattgcatggcgcctggacctcttgccctgcccaccccgcttgaatagtctggtgtaccatctttaacaagtggtaaattttttctcgaatagtaccacaatttctttccattctcggctaaatagtgcctgtcctaaattccatgttaatccagtagttactgaatgtcaagtggtatagaatttttgttatctcacatgatgaaatctctatattatattttagacagtaccttctttttgggagagacagtgcctagactttgtaacattaagtgcttcttaatgttacattctgcttagaataactgtacagctttgtggtccaatcttaatatttaagagaccaactctcagtggcattagaatgtgtgtctcttgatggcttttctcagggatcttatagtagatactgttcttttgcctttactcttccaatttagaaagaagtgcagctggataggtggaatgtttctcagtggggccacttgcactgcatgtgagatgtcctgagaggagccagtggccctggaaaaggaaggtttgctttctaagagaagctccaatgaggacgtcactgctttatggcgctaagagtctctagatccttaattttgcccatggtgtcaaacttcgcaaggcttggagcctgacgtgagtgatattcctgccatttcagtgagaaagagcattttggagagaagagtagcatctctacatacctccgatgagaagcataattgccggtgatatgtccagaaccatcacagccaggcgtggggcacctacaataaaaaatgcaaattgtgttaaaatggaaagaaataaagttccctgaacaattaacttttttttaatccaaaaagcaaactaactctattgcttcacttcctacttgaaagaggctgagtggagccggaagctccctcatggagctggaagtcaccatgaccacacacacaccttccagagcaccgggagcttcgtggctgctccgctccccacagtctctggagcagatgccgcacttttggtccctaggctgctcattctagaacctgtattccctcctaacagcccgcctttcctcccctcattcttaaagctcagcagagccagcaaccacagggcttgttactgcaccagcccacgtgggaagcaaggctcacacatgaacagacatgccctggggtctgagagaatggttttagtctgaactcagaccccagcactgcaaaggcaccccttccacagactggccagggctgcggccagcctgggtggtcccagggagcagtgagggtatcgacccgcatctggaccatgggaatgcaggccgactgtctttccgatgaccactgtgcactcaggcaggtttgatagaccttaaaatagttgttactcttgagcgacatgaagaacataaatcagttcagatccaccaggtcagtcagtggagaggctctgaacagttcatggggacatacactcatctgctgaagcctaccgaggcaaccccatcccgtttcttaattaaggtcttgctatttctctaatcagagactttttttaagaaaaagagctttataattatattgccctccatataacttcttaactatgctgtctcaagaataatgagatcaacttcttaactatgctgtctcaagaataatgagatcacaccgcaaacacattttcactttgagctatttcagttgcatttgcgcccaccatgaatgtaaaaattaagaaaaaattccctttatttccattacatttgtaattctccaaaaatgacaaggagaaagcaacttagtgagcaatattacacctagtaggaagcatcaaagcatactccatgccccttcccacctcagtgagtacccgaattcttgtcaagatcaagaatcacaatttaaaaatattttaatacatgtctactgctcctagagatttcaatttgctttccactcagaaagtcactatggatagggtactgggggctgagaccaggacggcaaagtgcttgcttacaggtgggctttctcaagatcagaggagaatggcagggattagagtgggaacacatgacattggccgaattttaagtgtatgaatgtcacattttgatacttggatgtgtaaatggttttcagtactctcctttagtcctaagaaagggaacagaactctagatctcagggtatagaagtggatgttttccacatcatattagaggaaaagtctaatttatgacctgctcccggggagaatgagagggtcactgagtgaagaagcagtaaagggttcttctgtgtgctcccatcactgctcttcagcctaaggggaactggggattttaaaagaggagtttggggcagaacagtgatgaggtatttcaaacagcgtctgcatatcatgagcaacaactccaaatccaattgttagacctgatttttgttcaagtaacagctgttcacatatacttaaagtttgatcgtaagactattcagtcagttgctaagtaattattgtctaaaaaataaatgactgaacttaactagctggtttttcaaatgacaccttatgtgggtaaactccaaacccatatgcttacataggaagacatttgaaagcaacaaaaatcattctatccaagagaagctaatcgtggtgcatgtatctgtattaaaaatgtatcaagaaacaaatttttcctaccagccaccaatacatacttggtattactttttgcttaagaaaagaaaaagattcttaaactttctaattcaagtacatagtgcatgtttatttaaaatttattcattttaatatggctaaacatttttgagatgttcttttttgttggggcagaaggaagttgactcttctgctcaaatttaaagtgagatattatagccaaataattcagtgaaaatcatatttttactacctataaaagtttttgtggtagtttttatgtgtttaaatgtcatttatgaaagtataatccattgtttgataagaaaataggtgttttaaccagcacctgtggcaacttaatgtcctgtcaaatacttttattgcttggtttatgtgtccttcttgttataggagaatatgcctttttaaaaagcttattaatagcactttcccaatttatatcttaaaaatccaaagaacactggattaataaaatttgggagggtagaataaaataattgatgactcttgctgcatttctcgggtgggatggggctgttggagaacctgaactactttgaaaacattaggtctcagtataaatacaactcacaactgctaacttggagggtggcgggggaacactgtgagttttgttttgtttattgattagtctttaaagtagggctttttttgagattactgggccatcattaaatgtgattatgtaaagagattaatgatacatatggagggctctacccaagtccgctaaataagcactactcaggtgcagactgcaagctcaaatgtatctgtgttatgagattaacggaaaatagcaagtgtgctgctgaagtctacaccaatggggttagatgagtgctatgcccttaattttaaaatcaaattaggtttcagtaaaaaaagtttttaaaatgtcctttttcatcatgaaaacaaacaaaactatattgatttagctcatttttagagctttcactgtactgaggaagaaaaaaatcattggaaggaggcttttctctcttaaaaggattgttctcatttccaggatttcgagttgggcgggtggggcgttcatcccaggcgtgccacttgctagccgcgtgaatgaatgtggggaagctgtttggcccgagaaggctcacagtcctcctgggcctgacgtcgtctccttctcttgagacgcctctccacccgcctgcataggttcctgtgaacgccacagttcaggctgccctcaacgtcctcactagcgcccagagcagagacatgctggaaacactggctgtgtctccctgagataaccagcccccggttttcgggggtggtaattcagcttttccgtctttaggtggtgcttctagaccacataaggcagcccagaatggcttttcaagggttcctccttccaaccgctcttggtatccatttttatgttactgttcaagaatttaaggctctttaaaaactcatagatttacatacaaatttcctagctttaagaaatctcaacattaaaaaaatacaatgttctgaagtcgatggatggggaagtgactgttcatctaacaaaagggatcttcgcctctcaaacggagtcagctccaggatcctcgaccacgggcgtggcgtgaaatcgatttacaaacacgcgatttgtatctgcccatctaggagcattgccttttccacgaaggaagcccaggtgggacaatcagcatcccccgtggatagaatcagatggcagcctgtgctgcacagcttgggtttggaaatggcagaagagattgactgggtttccatggaaacggcctctcagctccctttcagggaggctgcggctctcagcgctgcagcactcaggctgctggggagcagagtggggttggaaagagcaccactcacctagcgccccgcctgctttcctgacagttaccacgaacaataacagcaaggctattttaagttcctgtagatggttaaggtgtaaacttgcattaaataaaacgcttggttatatatacatatgtatatattttcttttctattccaaagatactattgctaaaaacaactggagaaagaagatgatgaacaaataatcttgaaacccacacgagctgccccacggatattttcaagacaaaaatagtcctgatcttgcttcatctctggtcatgggtttgcctgagattaagaatttaagagaaataaaaaataaaaaaaaaggaagaagaattgaagaaaaaataacttttggttgtacatattaagagaaaataacttttggttgtacatattactatctggttgaaaaaatgtgtcttgtatagacatttacgagtggtgatggaaaaatcataataaaatattttaagcagtatttacattacagccaacgtgcagaattcaggcgaattctaaaaaaacaaaacaaaacaaaacaaaaccacccaagcaacaacaagaaaacaaaaagtaaaagacagggacgctcagaagcatttggaactctgactttaaggcaagagcccttgtcaggtagaaacatctgttcctgttgcttttgcagatctgaggcatctgaggaacccttggacttgaccccttgtcccctttgtgctcctggccttgtctttactattcaccaccaaagaaacaatctctgtgagcctgtgtaagaagcggcattgaccacacgtccatggaggtcataagatgtgtcggctaacataaaagaagagctcgaaatctaggcattagaatacatcatcataaaaaaatcatattgttttccattggtgcacatcacgcagctgggacgctcaccaactggcttttcagatgccctctgatgtgtccttcccaggacataaacccattgctgtgcggattccctcccatttacaaaaccataacctgaagcagggtggtgtacatgaaacagctgtgtctaccgactgaggctgtattgtagccagttattcatacgaatgtcttgaaagtgctccctctagggtctatcatcccatcctctctctttcaaaaggaaatagtatggaaattaaataaatgcttgcagttctactaagcaaggcattgaaagcacgacatgctcttcaggatagggctgcctctagttaaatggatgctcacagtacagcacattttactgcctaaacccactttacatcaatgctgttagaaaacaaggcagagactcctggagacagaggccaggaaagagcccacagcacagacattcattgtccaggggtcaggacaagctgccacatgcttttgttagacacacgtgttgaacacccagagtcagtgaggacaacctcccaccatcacctgcagagcaagtgcacgcggaggctcagaggccacaggcctgggaggcagggcctgggagtcctcccagcctgactcagtgtttcacaggagcatgaacacgaggcaagacccagccagtcatcagggcctgggagtcctcccagcgtgactcagcatcttacaggagcatgactgcgggccaagacccagtgggtccaccatcatctatctccaaatcagtctaaagggagaactacctggaagagacgcacaatctctcatcttgattgagttaactacttatttattttttttaaaagtcttctaaatgaaggctaaaaggactcccagaatgtttcagctctgtctggattaatgatctctgaggctgccctcatctaattgagtcattcctcaaaggctccccggattttgagctcagcagctaaaatgtacagaacaacattgaatatttggagtaataatgcaaatgtcagatggagagactttgagttcttctaagaatttctcagaaagcccctttcatgtgtcttttttcattcctttgtttcatggtagctctatcatggagacttaagtagtaaaacacaaaatatgaaaaaatagatttttttctttatcccccgaattaaaacaaaataacaaaaatgtataatcaggccttacctataggagaaaaacatatttgtaaatcagaatgattctggccacgtgaataagcctttgccccacttacatggaaatttcaattttaaaacttgtttttcacctaaacagatctggttctaaaaatatgtattgctccgaagcaccagagacatggtaaaaaaaattttttaaaatacatattactatttttttttttttaatttgagacagagtctcactctgttgcccaggctggagtacagtggtgcaatctcggctcactgcaacctcctcctcccaggttcaagtgattctcctgtctcagccttcccagcagctgggattacgggcatgcaccaccatacccagctaatcttttgtatttttgtagagacaggggtttcgccatgtgggccaggctggtctcaaactcctgacctcaagtaatctgcccgccttggcctcccaaagtgctgggattatgggcgtaagccaccacacacagcctaaatatattttttaattttgattcttgttgtcatataaatgggaaacaataaagaaatgtagagaaaggcaaaataaagacatttcaaataggagaaaaaggctcgatacccatttttagtctgcactgctgcaactttctttccaaacagaaagagaccaggctacttaggagtaagcagttcagagctgatcctctgcatccgactgctccacatcctcagattcaaccaatgaaagatcaaaaatattcagagaaaaatgataaaaaacaataaaaataatacaaattttaaaaatacgctataacaactccatcaatagcctttactttgtattaagaattgtatgtaatccagagaaagttaaaatgcatgagaggatgtgtgcagctggtagcagggacaggagcccccttggatttggtatcctcaggggtcctggaaccaaccccccagggatgctgggaaacaactatcctgtatcacttctggccaatttcttaaagagatttcctaaaattcacggaaaggcaattcttgtaaatcactctgcagtttgtaagacattcagtgattttgtcttcttttggaattccatgtgaagtatgcgtattttgcactttctcccacgctaatacagcagtgcaagatcccgcatggggcgttgatattttccaagccaccttttgctaccttctcccgggtggagtctctgctgcctcccccataggcacctcagcctccctgcccggtgccctctccgaattccctttcccaaagcctctcattaggaaagggtgcggcggcatgcctgctacttggaagtaccagatactgcaagagtgctgcacacacaccctgacagcctgggggagggtgctcttgtcactaagcttcagccactctgggtctcccgggaggctttgtccctgagattcttagagggtctcccattcggcttggtttcctgaaagtcaggtgagggttttttacaaaatgatgtctaggatattccagtattaggaaaacctacacatttcaaagtgtgaagtagacttgcctatatttgtggcatttaggtggaatgcttgctttctgatatatgtaacctgtaaacaaaaaacacctttctttcttttggttcccagcacttttctttttaaattacactagaaaataacaaaaaatacatgggaaataattttaaaagtacccttatcataattttttaaaaatttctttttcatgacgcagatgagattttggaatgggctaggccccaggttgctcagaacgtgcaagggtcatcatgcaaatgaaacaccaaagttctggttgtagggccttgtggctgagagtgtgcaagaactgtgaagttatggctggcaaaatagcaactgggcgagtgaagaagcattattagttgtatgatgcccaataactgtagtaaccagaacacacctaagtttatctggatgacatgcagatggtatcacccgctgacagcaggaatattggccaggggatttacaccgtggcttgcggctccagtgcctatattagcactgggtcagcctctcacctgcaccacgtcccatccagccgccctgccccctggccctggtgccctgataccctggaggacgcacgcatgctgccccagcgttggggacagcgcgccggatgagaggggctctgggaaaggggacccgggccgcgctggtgacaggtctgtctccactcctgggcttgttttctggggattctctcgctgcggtttggctgtttggggagcacccaggggctgccacggcagcgtcactgtccatgctgcatgcagtttgtctgtttcccgaccatgcagcctaggactcttcacttatccctctgtgttgatcatgctgccctcgttgccaacactgcgaaccgctgcagggccgaaaggcgccccaagtacatccagcaataggctcctgtccagtgcggcagaacgtacctagcacatcctgacgtcccattcacttaacgggatgtgtccatgggaactgctgccagagcacatgcacgtccagcagcagtggagcggctaagcaagaggctggggccgccggagccagtattggggttggactcggaggacccatgcaaaaaaaaaatacaaaaggtgactggtgcagctgacgcaaggcaacagaaacgccaccccagcctctcgccctcgcgtggaagagtgagtttcatccagggcctgacgcattcaaaccacacgctcgggatgcaggtggggcccccaattccacatgcaaagggacctcactcagggctgggatgctggggcctggggtcgcaagagaggtactcaccttgagttgattacacggagccctaaggcagctaatgccatttacatgtagtaaaaacatgttttaaaatacattttatgcagcttgttgcagggaattcctttcgggcggtgggatccgggatgagatgtgtaagactgagcatctctaccttactctcaacacggccattattagatggtctggagatgctttcacaaacagtcctttgtccttatcactctcagaggcaaggactgtttgtcccttagggtaaggaacccgctgtgggatgaggagtcattcatcctggagggttaatggtgggggctgggagcggttctttgcaagggctactgcctcgacagcaccaattttccaacaccaagaacccactggattgcctgtgagactaagacggaggatccagcaccaccacggcgaccacgctcatggccagcaccaccactgctcacctcacacacacacacacttgtgcacacacactcactcctagccccagagggcacagagggaagcggcgacaatggccaaaaactcaacacagctcagatattgttttttaaatctgaggaccccgaggccctgaggaactgaaagagccattctgtggggtcagacacagactcctgtgtgtgcctggaggggtcctgagggcagcgacttcttccactgctgaactggggcatggggacggccacttcctatctccctccgggagggtttagactccttttcagttacataagggaggttcagagaattcaaaagcagatcagtttccaaaagctggtagacttcagcttgccttaggaaaggcaggtcttccaggacaggagaaaggaaggatttctagagccacctagacaggaggggatgtacatgtttttcctcttcagcagaaatgttgatcctcatcctttacattcgtgttatttttgtgctattttttcttgtttgcctggtttgtgaatctttttttttttttgtagcccttaacttctctcatagggaaaagatttgtattctaatcggggtttgggggggtgttaaagacgctgtgctctgcctgcagcctgtgtaatcctagatctgcctgcagcctgtgtaatcctggatcttcctacagcctgtgtaatcgtggatcctcctacggcctgtgtaatcctggatctgcctgcagcctatgtaatcctggatctgtgtgcagcctgtgtaatcctggatactcctccagcctgtgtaatcctggatctgcctgcagactgtgtaatcctagatctgcctgcagcctgtgtaatcctggatccgcctgcagcctgtgtaatcctagatctgcctgcagcctgtgtaatcctggatcctcctacagcctgtgtaatcctggatcctcctgcagcctgtgtaatcctggatctgcctgcagcctgtgtaatcctggatctgcctgcagcctgtgtaatcctggaattcgctgagatttttcacactcgggggttacctgatgttttctctttcttcctcccaaattctgcctcgtgcccctatcctcttgtttataagtatgattttaaaacttttttggggtttattttctcctctttcagcctcttattttattaaaaatggaacatattcttcctttctaccacggaatctgccttttccctgatttcaaaccttgtttcatttgtcaaatttacaaattatttcacagacttaatttttcaagaggtttttaaaaaaaaatcaaaaaatctttattttgcaggcaaggaaacagatgtaaagagttaagtacctttaaggtcaaaaaggagcaacaaagctgagattacaggaaccatctcttaccttctggtgcgttttgactgcactaaactcttcttgccggttcccttgttatcaataatgcccacccctaaatctagaatctataatgtgatctatggggtgagttcatttgtttttaaagctcaagggctcattcgttcctctttgtgctttttattgatcagttcacatggactttccaggtcatataaaattgagaagattgaagaagattctaggaaagaaaataaaatgtatctagacttctgtgtcaggaagtagccatccatagcagttgctaaaaattacactgtcctctgcttctcatgtcttccctctggttacaaagagggccaaagagggcagagagagaggttggagcacctgctgcaaacgctgcagggatgtggccgtctcatattctggctctggaatcagtgacgtgtgttccctggggaaagacgagaattggctgagtggacaggggagagggaaaatcaagaaggagagaggtgagtagggaagatgggagaagaaggagaaaggaggaggagaggagaggaggagctgctgcaggtgcattacaaatacaccacagatcctggagactctggtgtccaacaggaggctcacaacgctggaatgatccaggaggccagggatacagggctggcccagatggacactgggaatggtagcgtgtccagatgtgagatgctgggcaccccatggagatggtggtagctttggggctcaatccctgctctgaactcttggagagaaaaacagggcctgcttccttgaggctctcgactttctattgggtgccttaaccaaagatccctaactcaggagaactgagtgtggagtgtgctgttttcacggatcctgtggcctttgggactataagccaaggtgctgccagcaggcttagtccacgctggccacctgcaggagaagcacaggccctttcccatctggaatctgtttcaagagtaagttagggaaagtaggctggatgaaaaaaatgaagatgtgcttacaagagcaaaacaacaagaaaactgcaatccacccaagggtgagaagactgagctcagatgtgttgagattccgacattcatccccacagacttcctttcacatgacgccacagcagtgtgacagccacgcttgcagagtactgtcccgcgccagcccgacccccggaaggatagaaacggcatgtcccactccaggcccaaaccccggaaggatagaaatggcatgtcccgctccagcccgaccccaggagggatagaaacggtatgtgccgattgtattccgacagtggtggcgacagtggaaggacttgaaccatgtcacttgagaaacaaaaaaggggggggcatttggggatatttggggggatagttagctcagagaagaggagggaaacaaatgactcctttaaaatagatgggaagtagatgttataaggcagaaagaaatcttgttctgaacattcataaatgtcttgggactccctctcgggaggagcctctaaccatggttgacggaggaaagaacggctgccttgggtggtggagctcaccctcaggagaggagctcaaggaccgctggggtctgctgagaagtgcaggagcatcacaaggtggctggatgggcgcctgccactggccttcatgccccccagggctgcggctgcaggttttcttcacagcctgacatggcccaggtggatggtgacaggccgggctgtgccttccctctgggaaacaaagatgcctcttcagggaattccaggaggcttccacggctcttaggggacaggatgctcaggggagggcaactctagtgtgagggccatgtggtttgaggtcctccccaacacgcagaaagaaagcccccagcagacctggcaggtccggggccttctggaaacccctgcctaggggctgcaccctccacggagtctccacagccctccctgccatgggtgcatccagtctccagcaggccctccacagtcttgccgctccctccctgccagctccggccttcccagcttcagctaggcatgtgccgacttcgtgtctgcagccctgtctgtcctattggctcccgttcaacatggggccccacagaaagtttgctggacactccccaggggagagctggccctgtcccccagtcgccgtccccaggctgagctcccgctttgcctcctgcgcagagctgtctctgtgttcaggcatctcgtttattcagggtctgggagggcagggctgagcccggatgggaggcacgggtgcccctccacacatgaagctcccctccacaacatctctgccctcaatgtctcccagaacagaaggaggtgtgggaggttcttggcccctgcttgaagcctcctcagcagccacttcggggcagccttcatgctctacaggttctgaggagccagccacatgccaggctcgcagagctggtgaaggatggtggctgctgccagaggggttggcctgttccaagtgtctttcctggctctcagctgggagctggggctcagcctggcttagttgtgcccgattgctgagcttccactctatttaggctctggcttttcctgtcatcaggcttctgccagaggatgctgctctatgggccccagggtgctgtccccaccaggtgctcttgtggggaggcgggggaagggcgcccgtgtgggtgtcagcgtgctaaccctccaggctaccgcatctgccccgggtactgagtccctgggcgtctgtgtggagagctgggctgggggctggtggactcagcgcctgctttggggaaggtgcagacaaaggtgggacctgcactggatgtgagagggggctgacggggctgagggacaccccctccagcccagctgcttgcacacctggccagcagccctgctcctgcggccgtgcggggttcctgtgggctttgaggctgaggcactcaggggtgtggccaaagagccccggagtcagagagccagaccgggtttggcctgaggctctgccattcccttggtgtggcgtgtgttcagaacaagtccctgaacctttctgagccttagtttctgcatctgtaaaataggaaaaataatgcccatccgcatcgttaggatccttgtgaggactaaagaactaaataaagtgcagagaattttagctccccctccttgttttttttcttttttttttaagcagctaggccaggttacagaggtcccggatctcctggaggctggcagccttcttttgcgtggtggtgcaggtgatcacatagggactagtgcactttcacaggttagcaagaaggcctgtgagctctgcaggggtaagaagagccagcacttagtacatgctcagtacacaaggcgcgtggtgggttagacgaccccatgagaagagccagcagcactgtgtttacaacatcttcctccacacgctgcctgctcacttgctgttcccatcagtcccctgagcaagaggctactgctgccaaccctgtttcagatgaaataggcacaggcattcaggaatttgcccatggcaaggagtgggctttgaacccaagctgtcccacctcagaggcactgggtttagcctccgagctacagtgtccaagggctgtctgtgacagtgctgcagcaggggcggactgaaaggtgcgaaaggaagttgcctgcgatggagcagctcgaagcatccaggaggcggcctggagatgccttgtgggaagaagtacaggccagatggaagcaggtaggtcaagccgaggtggagaccatggccaaggggatcttttttataaaaaaggaagatcacttaaaacagaggtcagagctaggcagagtcaggaccatggggtgttgtgagtggacaaaggatcaaggctccacagacacctctggccccgtcgcctgctgcccacagcttccataggtgtggatcatgatggccttacgaagatgagagagagagaggcagtcagagaggtgggggaggagagagaaggaggcaggcagagagagagagtgggagagagagagagaggcagagagagagagggaggagaggtgggaggagagaggcaggcagagagagaaggggagagagagagttgggaggagagagagaggcaaggagagagggagagggaaggggagagagagagaggcaggcagagagagagggagagggagggggagagagagaggcagagggagagggagggagagagagagacagagagagagggagagggagggagagagagaggcagagagagagggagagggagggagagagagaggcagagagggagggagagagagaggcagagagagagggagggggagagaggcagagagagagagggagggggagagagagaggcagagaaggggggagagagagagggagggggagagagagaggccgtcagagagggagggcagagagagatgggcagagaaagagagagggaaagggtgagagacagaggcaggcagagagtgagagggtggggaaaggcagggagagagaaacagaaagagagagagagggaggagagagagagagagagagagtaaagcaggcagctagagagggatgggggagagagggagaggggcagccagggagagagggttgggggagagagggagggaggaagggagagagagagaaagagagacggagggagagagacagagtcttgctcacagcaagcacagagtgcagcagtgccagggaagcagcttcagccccaggaagtcactgagtggagaaaagggtgtggggtgagggcgcctgtcagggagaccttgggcgaaggtgtggatgaaggggggccttgctggaaatgaaccgagggtcacccttgctgggaagtaaaccgagggtcgcacacaggactcaggctatgagcatctttcagaggccccattgtcttggctctcaccccggtgccccacagcgcccttgcctcctgcctatcccatgtctcgtccctggaggttgggttcagacgtctggcaggttttcctgcactactaatcaccaacttgaatccaaagtcctcaacttcagtctcaagggtgttccttgcctctggctggggagaggaagctcatctgtcagaggaggattaggagaaagtcaagtcagtgaatggcagatgccaagagtggtcctggcagccacgtccacaggtttctgggggtgggggacctcggggcgctctctggctctcctccagagaggatggaggctgcatatgcctctgtctgcaattccccctcatggcagtctggatgcaatgaaagtttgccgattagatatagatatgctcattaatgtgaatatgtagatgaaggtcattgttcacacattaccttcattacattagctattctccattaatttgtttccccaaaactgttccaaataaaagaacatcttatggcgggagggtggggctgctgactgtggcaaatttcatgttagaaatatctatctttatttagtaaaccttcaatgggaagcaactttggctctatgcttttctttcttttttttttgacagagtcctgctctgtcaccaggctggagtgcagtggcgtgatcttggctcactgctacctccgcctcctgggttcaggtgattcccctgcctcagcctcccaagtagctgggactacaggcgtgcaccaccatgcccaatttttgcatttttagtaaagatggggtttcaccaggttggccaggctggttttgaactcctgacctcaggtgatctgcccgccttggcctcccaaagtgctgggattacaggtgtgagccaccgcgcccggccttggctctgatgtttaagaaaatcatttaaaaatgtgtctgtctcagagtgtattttcatagaacctgcacttgcataatatcaaaaatgtgcttcttaggcaaagaatctccttttaaaaatgatctgttgttatgtaagctataaagaaagaataggaatgattttctagaagaggaaggaaggaaggaaggaagaaacccttgataattgggaaggatcttagaggatgagaggcttgcagtggtttttaattttcctgtcttatcagcactggcaaggagcaggtctccagagccccctctccccggccccgaaggcagggcaggcgtccccagccagggaggaaggctctttgaaggcttaggaagggaagggggtccattcctcaggctgccttctctgtgccccccttctctggcactcgtgggcctgccctggggctgagaggcaggggggatgcagacgagcgttgctatggagacacggttgctaggctccctcctcccccctcctccctgcggtgcaggctggttctaccgtgtgcaggaaacctgagagcctggatcagctccttgactgcagcgctgccaggcaccgaggagggaggggagatgccctcaggtgtggtggccatgggagtgggctcccgggagaggggaaggcctctcagtgacaccaggttcagcttaaccagccctcagcagagataaggatatacagcccaggaacctttggaacacacaccagctgtcactgagcttccgcaggccatgggtgctagagcttcagccaggactgcctcctggcatggccaccagggcatggtctgtgcctcaccggtccatgcacagtcaaaacagaaaccagaatcacgtgttagctgcaatcctcttttccacgtgccactgtacctccaccagagacaaagcacacagtcccggacttatcctcttttccacgtgccactgtacctccaccagagacaaagcacacagtcctggacctgggttgtgttgtccaactgccctggacatttcatctaagaaagtggttcagggacgatggcgcagccggttgggaagggcactgagttgggggtctcatgagacctggcactccaagtcctccccagtagccagctgcattccctggaggctccttgtcctgtgcacggtgccggtgcacgcatgtgcgtgagcctgtgtgtgtgcctgcatgtggtcggtgtaacagagatgggactccgtgccctacacacttcacaggctccaagatgatgagaacgccctggtttcggggagaagcatttagttctaaggtggaaggaatggtgatgaggcaggcaggacttcatgctgccgtttctctctgttctggtctgtggtatctagtgattacctacggtttgccagacacagtatcaggcacttacaggctaactcatctaagttagtcctcatcttagacttggaagatgattattatcattatcccagtttcagaaagaagttgaggtttgaagaaaaccaagtactaagttcaggtttcccagcaagtggcaagccaggagctcccaaggctgtttgaatctggggccagtgtctgctcactataccacacagatctccaatttccataccaggaaacaagctagtcacctaataagtgctttaaattcaaacgacattaaaaataaacagccttcatccattgcattgaaaaattgaccatttgtaaggttgatgagccatcagggttgtcagacgatttttcagagccgagaagtcgaactcagagggcattcttctcctctacctgttgcatgatgtcagttctgatggtgactcatgaagatgctgactctagtaatgagaatttctgcattgaaactattcattgaaatcatttcacggtgcagagaaagcttgttgctttggcagaaatccaaagtgcacccaagctgcatggatttggggaggagtcctcaagctctctgtcccattacgctgatctgaaggctcagtccaggacttctagcctgcttggtgctgggggataggtctttccctggcattctccttcctcagctccctccctgttctgtgtggctatggaaaggtcatgaatgactctgccccagagagcagcagcctggaaacttctcaaacacacagcaggacaggatagggttgaggtggccatagagggtcggtctgctggcactaggagcttgtggaaatggcccagtcttgcctcagtgaccaggggtctcttttcagttggtgattttgggccaaagacctcatttggaaagaattttcctcttctcctgtagacaagacctggccaggcaagtccatcgtgaactctgaatcatgctgttgtaggcagaactccaaaagggacattttacacgatctgtgttttctctttatgtgatttgtcagagcctatggcacactgaaaaatgttaatcaacattgtttgctactccagttacggaagattgggttgaaatcttgtctctgtgaaaagcagcattacaattttaatggaagtacaatattcatttctgaaagttactgctaaagtgtcctacgtgtggaagcaggttgcagtgtgtggagacccagctctgcgagctgcccactgggcatctggaccatccgtttctcactggtcttctgctttacccgccctgccctaggctggggctgtgtgctggtgcacgggatccacgaacaattttaaatggatcacaaattccccgcagagggagaggaaagggacaggaaatgcaggtgagacagaagaagctgaggaggggcagctgggtctgagagtcggtctaatccgtggcccttcctggtttccagagtctgctaacacagaaagtcatgattctgatggattgaaaatcaagtgactttacatgtctaaagtaaaacctctactcttaggcaactaatttaacccttgaagtgctacggaaatctctgtgtgccaagatcacgtgtctccgtgcgctgatggaggggactctgtgggaagatttgcctccagacctggctggaagccgccgctgctggagaattccgggagggcccctcctatctctgctcctcagttccctggcctggagaaccgggataccaattcatgccctgcagccgcagtcctctgcagagagctggacacagcgtgcccctgtgggaccccacatgagtccagtgaagccggagggcagagggtattgttgctttttctagataagaaaactgaagctcagaaagttgaattgacttgcagaagcccaggtggctagaggggtgaagggtctggatcgagggtccctgtgcccctcccctcatctcacagggcagatgcccggcccagctgctccccaggctctcaggccacctcagtcctcagcctcttcagggcctggcacaataagaatggcttaaacaagtatgtgttgaaaaaattcttgtgtgggtcaaatgataacacaacattctgaaagaagtgaagagtttgcaagtataagatgccactagcatggataagagagctcaggattcaaaccaaaattgttatcactgatagtaagaggtgaccatccaagctgaagctgcaacagaggtcatcgctgagacatgaaactcggaagcgccacatggattctggaggaggcgcattgtatgagctgcattattcgtagagacaatggagcacctcgcattgtacttgatgggtaactgatcaaggtgatgctggtgcagccgcatgaaggtggagctagtgtgtacctggggaagtggaagtctaatcttctgtaaaagaggctgccccaagaagcctggggactggtctggcttggaatctacatgaacgggaaacagaagggaggagatttctggatgtctccatcattgtctcggagagctatgttccgacccccagtcatccaccagggcatgaaaagtgcctccgtttccatcacgttctcaccctcacacacatgtcatccaacgaaaggtagaactgaagccagaattaaggcagtttgaaaaataaagaaatgacagagaataagacgaccaaaatatgccagctaggaaaatggtttagaatttggaaagtggtgaggacagggagaaggcagcggtgtggactagatcagccatgggcttgtgggctggtcaacatttttatttgatgattttcagcctgatctacaagtctgaatatttttaaattgtaccatattagaataaggcaaagatatattcgaaaaatggaattcttttatctttgaaatattttgatcttggttgttggaatttcaagtataagaagttttatttcattccttgctggaagtgggataaattttagtttgttaattatctttgtcctcttttttctgacatgccctccctcctccacagagtctcaaaactccaggccattcatgggctggttcttacctgtcttttctgggatttaattcttttctgtaataaatgcttatacagcttattttgggcaccaccaggtgctattctaagcacgttacaaacatgagcccatttaattttataatcatgacctctcaggtaggggccagcatgatcctcactgtgtagatggggaaaacagaggttaagcaacttgctgaggatcacacagcctgtgggtggccaagccagggagtgaagccagcagtctggctttgaaggctgtgctcataatcactgccccagctcctgcctcctgccttggcctttgcagaggggccatagaaatcacaggtgctgctgacgggtggagagagggtccgctctccagggtcatggcctcacagcatgttttgagaccctcccaggttttcaaatgtttccaggcctttaaggaaactttatcaatgcaatttaaatattcagactatattttaaaatatatacatttttacagaaaatagtggatctcaaatataataaaattaaaaacaaatgttaaactatttttattttacctaaaatcttactccatttgatatccctgggaattaaaagctaaaggcagacatttttcaatgacaaaaactcttgtcatgatatgagaaaaaaatgagaaatacttagagagatgccagcgcctccgaggctgtacatggagaggccacaagtcactgccatgttatttgatagtaagagctgattgaacccaaactcagtcaggcacatggcattgtaattgctacagatgccctcctgaaatgccagcattaataagaatgactgagatttttgcttcaattaaattcactgatgatttgttcagcatctggcaggcatcaggcaccattctgggtgcacagaaagccccaatcccagactcagggtgctggcctgctggggagcgctcagagagctctgaccctcacctgtgagcttcagctgaaaacatgacagatttaacataaaacaaacaaaggaataagaatagaaaaactcgacaaatagatcttgacttcctgagagtagacaagttctaaagagtagaatacactcaaagctatttggcctgaaaattcagcacctgatgagttctgatggctcagtgtcttccatctaatgaccaccacccagatggagaggggtggagagggatggtcaaagataccggactctatgagggatggtcaaagatactggattctatgggacagggcacgaagaaagtgacaggaaatctacagtcgggggaaggacagggagagggcaaggagagggcagccaggacacagatccaggggtttgcgtgccggcctgagatgaatgcccatgttctcagcaacccaatattcttctcctttccctccacaaacaacccaggtgtggaaaacaggaaacgctcttttttttttttcccccaagatgaattttaaatgtaggaggtgaatatgagtttcaaaggaaagatacaagtcatttctccacaagaagcctcaggttccccatctgtgaaatgggcacggaaggtcacctgctttgtgaagacaagctaatgtaacagggggaaaagtgctgtgttttccttattttattaagtgttttcacgttggttaagattgtcaaactctgctgactttctttagcactggccagacttatctctcagctgcaccctgggatcctctcccctgctgtggggagggccgtggacgggccatgtgggctcagggcatgatggggggcagccaggcgtacctaatgggcaatgatgtggcttccaccaacctgtggtccagcggctgggccggatgtccttcctccatcacctgctcccccgtctgaggccctgctgcaggtgatgatgtcggacacagggtggcagagccagagggagccacgtccctctgcccgtgccgtttgccacctccatgtgatgctgcaacctgatcccacttgcaggcaactccagcagccagtcttacagctgtcctcatggaaaggtgacatgctggcctcagccatcctcctgccccatttccacctagggcaacgggattttcaggctcgcgtgaacttctgacaatcttgccagcccctcccctcactaaggaagagcccggagcttggacaggcagcctcctttctgaggtcacctggcggcccgtctgctggcccatccgtggtcctccctccagagtccttgcgttcctcacagagctgtttggtgcagataagtatattctcatttattcattagcttttttacttaaaggcctggattttaaacaatgggcaacatgtgctgaggggcgccatcagggagaggctcaaatctggaagcctggcgtcctaccccaaggcttctatgttccggcgcaggcggaagatactgactgagcatagagctgccggggtgagtgcgatcgctgcggggaaaggtcacagtgacatcctgaggcgggaaactggacctttagagagtcgcacattgtgctggtgttgggcctgggtgaacagcctggatttcagaaaacagggaggccaaggaagtccatttcaagagagtgtgcctgccttgccaagggccaagagggaagggcgtgacgtggtccttgcaccaagagacatgcatacattttaaatggttgctttaagaatacagaaatatacattttcagattccttacgctctcttcaagccttgtggtgaaatacttcgcacatctctgaatgtgtcccatccttcctgttcaaggcaaaatcaaagcagttctctgaggagaaggcgagtgcctcagtttccctcccggcctcactgccgttctgtctctgtccccaagcactgggccaggaggcaaccagactttactaagggtggatgtccggggatcgatgagcggaagcagatcgtgtttgataatcagattattgccaggaaagaaatctcctctagaagaccttcattccgattctttcttgacctagtgatgccacacctaagcctcggcctgctttgttcaagggtccagtgaggaagaattaactcgctgctccctctcccaccccagggctctgcactcttagtgcagctgtgctggtgaacttctctacccttgaaagtgggcccctatctctctgttcatgtgttacaggaaaaacgcattatttaatcttatttaaataatccccagtagttatatcttaacaaagatgtacacttcgggtttctggagtacagttctgtccacgtgcacatctgcggtgaggttgagggctgcagtgatattgaaagtctctttggccgcctgattcccgggtattttcagtgatgtgcaggggaatgctgtactctcaggtgagtagcacatttggagaagaaatctttgtgatggaatttccaaattttgtagttattttaattcccagaaaatcggattctgtgggcccctctcgctgggggtggcaacagactcagggcgtgggcctgagccccagagtctgggagagtgagaaggggtgggtcttggcatcctcgtctgtcaacacctactgcctggtgatgcgtccacgcgtggccttcgtgccatccgtgcccaggactccgagtccagcctgagaacaggcccccagagcacccccacacatgcacgacatccctctcctccactctccacacagctcctgcagggaccctgacccccccgtccatctggggctcctgagcccgcgcctacccctcaccccggcaacctttccccatggcccgtggccagagtggacctctgggtgactctcctggatgctgttcgcccacactgagtccccgcagctgaccctatgcgtgccgccattgaaacctcagcacctgctgcctcccatcccagccctgcaccccactgccagggctccggactggcctctaactgcaagacatcggggagatttgagaagcaacgtctcactcaggacagaactaaagtcctgccaagaccagtgacctcaggtgatctgatgcctatgcagctctgctgctctagaactttctccctgcccctcctctgctggcatcccgatgtcttctaagcatgctgggactatgtgtccgccgtctccccaaatgtcagaccaggggaggacgcagacatggcttgctcaccctgctggagactcaagctgagtctccttatgaccagggtcccacgggaggaccacagctcagagaacaccacacagtcagtccgtggttctgtaggataaattataaccctgcagcagaaaaacccactccgcaaagcccttcagcatctaagctctgcctatcatcaccctagctctggggagacccccgtggttgcagctgcataggtgaggaaggagccctcatggagaacacaggcttcagaatgcctggattcctggtgctggagacttttatcacttgttggctatgatggaagctgcaaaaacacattttccccgaaatatgatgcagcgattaaaaataagatatatgacttatatgctaagcagaaaagcaggtttcaatcacattgtgattgcacaaaaatgcaaacatatctgtgagagtggtgagtttatacatattttttcttttttccaagtcttttctttctcaattttttgagcttatattaggtttatgtccaaaaagtcattgaaaaacttccttgctcgactgatattttctcccctttgctaagaggatgcatttgtgccagaagcaggtgcttttatatatcaggtagattttttatccttgttcagtaagagtgcatgatgaacgccatcagcacttggccaagggagagggacatgaacggtgagagctgaggaatgggacctggctgctcgcacgcctgtgctgggacaggcaggggttccgggcgcggccatggctgtgagcagttctgctgaactctgcttgctctcagttggctctgagaccaaaaattgcctaaaataggtcacctgtttgtatcctaaattgtagaaaaaaaaaatgcatgataatgacatcttcctaattcaacatgaaaactaactgggaccagggaagtgctggggtccccctccgtggactaagcttttctctgcaggtagtgctaattaatgcatcagcaagcttgggagagaaatatcgaagatacaggtggaaacaggcttccaagaacttgaaggccccaattattagccatgtatgtgttaattacgtcgggtttatttagtcactgaaggaggtggcctgtggccctctctttgataacacctgattaactaaatgtgaatttctgcccatgcttgaaagtaatcaagttgcatggtttttcacaatagtgtaactgagtctttccagtaacttctattgagtgctgccccagtgctcgtcccaaacagtgaggtttgcactcatctcaccgtgcagcttgcaggtattccattctgaaaatggtaacactgacatttacttcacatttaatctgtctacaaactgcattaaacaaaaaaagataccagtatattaataaaaaattattaaactgtttgtcagtggcttagtagtataagccagatgcttaaaaaatataaactgttcagtttcagaaatggaatattcctacacgtttgttagaatgtaattctaattagaattaagataatttctcttgttctttgtgtagtaaaaaccacacaaagaacaatataaaataagtgtaaggttctcttgggcactgtccagtgtgtacacctgcttggtgtatgtgggcatttaagtttgaattaatgaagatgaaatacgatcaagaatgcacttccttagccacggcagcctcattcaagcagcttgtgactttcatgtgggacagcacagaacaggcaacttcatcccagaaagctccatcgggcatttcaggctctcatttccataaccaagtcacattttattttaattattagaaagctttttcttaaaaacatcaggtaagtgtgggatgtccaacctctttacattcttataatattctcaatttctctttggaggtagacgagatgtctccatctctcattcatgaatagaaacatgtaatcacctgtagaacctagggacttttaaaatgtcattaaatggaattgactagtgtcagaaacaaacctctttctgtaaaaatgcaaaaaaacaatacaagagaagagaagagaagtaatttccctgagtcaccacccctggaaggccacagatcacatgtaagagagagcacagcaataggttgaaattgcagacgtggctgtgagctttcctgcttccccggcccctgtgcacccaacggcccttgagttccttcaaagcctttcactcaagaaagcgcctgggagagaacgagtctctcctgaaatggccaggaaatcccaaatccttgtcaatcatttcccaaagggagcatctactttatttccaatttcattcattttgctccagggaactataaattagtgaagtgtttactagattaaaacctcagatgtacaattaaaggacaacataacctcctcattctgactagactctcccatcacagagtgctggcttctcatccttcttgctgcccagagtcagatgtgggggcccatgaagtccaagaaagctcacttctcagagccactccagaggagcccagaattcctccaaattagaagaggccaaatttaattaggtgtgaaatatgaagagacctcaaacaatgtaacatgtctcatgaaaggaaatgtgtccatctttgaaacctagaccaaaaaataacaaaaaatgtgtgtgtgcaaagtaataatatatatttatagtttagtaatatatgtgtatatatattttaaataactttaaaacttcagtacttacaattataaggacaataaattcttccttctgttcatgtgtgacaggaatactgtatatattaaaaagtcatccggaagttaaaaaatcaatgtatttaaaaatttttgaaataggttgtataagatgcattattttacatttgatttgatgacatgatttttgtttgaaagtatgcaatacaattcagtagtttctgatgtttgtattaaatgtttcataattttgaaatgaaagaatggaatgctaagaaacatttcattaaaaatcttcctcatgattttcttctgaatttaaaatgttccaaaatttgtcacaataaaaaccaaaaacatcacaaagccagcttcagtgaacagttaggaatttaccttaattccctgggagagtcgagctccctacctctgagttcaatcaagccaccatccttgaaaactgccttttagatggcttaaggcaaacagatcaatttggtcaagaagccggtaaatatggcaaattaaagataaaataaaatgtcagtagaagccaccctctcttcagcaaacaatatgctgacgctgccaaagtgtaggctgcaaaggtaaaaacattcttggcctgagcaatgaatgaggtaaggtaagatggagaaagctctttttatttttacttttcgagacagactctcactctgtcacacaggctggagtgcagtggcgcgatctcggctcactgcgacctctgcctcccgggttccagtgattcttgtgcctcagcctcctgagtagctagaacacttttaaatgagactttattttcttaactgactgtagatggggcagtcaggtctacatgcagcatgtttcatttagttttcagaagaatgaataatgaaatataaatgaaaaatggaaaagtttcattttgtggggatttttgtacacagttgttgtcagtggtaacaggtattgaatgtcaggtgtgtgcttgctaccagtactgtcccgcttcacagggaaggaaactgaggcacagggagattgacagtgatctccaatgactggaaaacccatggtctgcgttttcttttgcacaaagaacctctccatgaaaagcagagcatcttggccactggcctctgatcctgccacctcttgcctccttgtattacccaagtctgagtttttactcagtgaattttaatattttcttcatcaaaaccaagacaatggcgaggcataaacagacggacctgcactgcgtttcaaatattgctggagaactttaggaatgtttcatcaagccctttaaaaagctgaacactaaaggttctcgatgtggtggttgttttgtttttggctggcttgtgcgtcagtatagttagttaaaagaagtcagattcagcccaaaccccaatgcctgggtccctcccttaataatccaggtctcaggcttactgtgagaggaggaggaggcaggaagaaagattcgcagcagggaccctccccacttgtagcctcttccactgggcctagggaggctcctgctgctgggctcgccctgacagtggacttgagaaacagaaggaaagaccgaggcatttctggctcatcttccctcaacaagaaactccgtgaaccaagacctgggtggtttattgttggtttgcaggttcgtgtgtgtgtgtgtgtgtgtgtgtgtgtgtgtgtgtgtgtgtgtgtctgaagtcattttgaaacattcttgttttagaagttttactgtattatgcttaattgtatttcctatattttaatttctcctactcattatgataaaataaaactccaataggctgtattttgtaggattttttttgtaaatgccgtagtgcaaactttataaaccatttgcagatgtgaaaatgtaaatggtagcactgggtccctggaggagcaagttgaaaatgcattcagctgattgtgaggagtgggcgtgtcagctttccaccagggatgtggcacagtgctggggaggtggccaccactgggcgggtctcagctcagctccctgtgcgggtcacagggaaactgcacaaggccaagtgtggaaataaaaataaattctctgtgtgtgtgtgcatgtgtatggctgtagtcatcgctaaatgtaaacctttaattctcaatcacaaagcagcacactgaaggtggtgttattaatgattgaggagcaggcatgaagcgtggggaagattctgagctcgggctttgccctgattttgaggagcaggcatgaagcgtgggaaagcttctgagacaggctttgtccttgcagtcgattgtctctacatctcaactgggcagtccaaccacctgttcctcagttctcacatccgtaaaatgggtctaagcaccccttccccgctttcctcacgaaggtgacagtctgtgcagaagcattttgtccattgtcaggcaccctacaagcctgcagtatttcagcacaagcgggtaccaccacagatctggggaaggctctggggcaggagctcaatccccgtgccctgggccgtgcttgctggagccccagtggacgctatgcacgggagtgacccacacccgagaaaccccaggccatcacctcttctcccccgagacattcccattcacgcgcatggctgatcacgtgcacccgggtgctctcgggtgagccaagtcagctgccgaatggttcaattctttataacagaaacaagggtgctacaggagcaagcttcgaagtgggagatcacacattagctctcctcccaatgtggaggctgaaatcacacagctttctgtcctaaaagagctgaatttacacagaggtcaactcattcccctgataaggaaatacggcctcctggtaaagaaaccagaccccagccgagggcagttgtaattcacagagttctgtggattgactattgtaaactgtgaaagcaaaagattaccgaaatgaggattattcctaagaacttggtgagcagtcaaagcggatgaccttcctgcacccgaacaatggaagctgtggggtgagcaaagctcacatctccctccaggagagcctggtaaataatctccctgtgcctgcattaagtttacagtggagaatctaagcctcgggatggtctagaaataagtagccttagcaaaaagcaacatcttgacctacattcaaaatgttaattctttgatttatgatgtattttaaaatgcatgtaaccaggttaaaaagatgtgttagatgtggctaaaattcctgtatgctcaagctgaaaatgcctaggatacaagcctagggactactgcgcgtacgggaccatcgcaaggccaagggaccaaaagtacaatctgctcactgccgtgatgactcagtccaggctgagacatcaggaaaactaacaagtgtcccaaggttctttttcctacaaggagttacactaatgtcgggactcgtggtattataagataaaggcatggataataaggaggaatcttaatttggccaaccgaagcatcaatggaagcctatttgttggctcctcttaagagccaattctctgtgatcgaaatgagtttgtatttggctcacattggtcatacctacaccatgcccatgtcaacaacggcacacatatctggaagcagaaaaacataattcctggctgggagaatatggttccttaagaaaatgaaaaagaaaaagaaaaggctgaccagctctgataggttttgcaagctctttcctgctgtttctttcagggaatcctagcaaatgaaatgtcacgagaagaaacttttctgagaatcagagctcatggtgggcagagttctcaccccccaaaactctaatttgcacaaatgtattctttttcgctttttggcctgtggtctcagtgaacgtcacagccaggcagggctcacggtgaccctgtgaggtcgactcctagaaagggcatacaaggtgacggtgaactccacctcaaagcatcgacgcgcaaaagtctgccaggcacagaggctttcggaactgggtgtccctcctccgtctgcctcctcgaagtgtcccttttaccctgggggcttcctccctgacttctgagcctctgaactatgtcttcgacacaccagatgggctagggagcaaagaaagcaacagtcccagagttggagtaagattcaggtgcacgttaaattttaatccagtttcagtttacatattatacataattagacaatgaagtgatggattttcttttcaaaacgtcccatgtttgctgctttgggtaagaccaggcaaagtgttatctcaggaagtttaagagcttagaggatccaagagcgagagtttatctggaaaatttgttttgtccatgatcaagaatgtcctgttaaaggccaaatatcacaattcagtgttggaagtgacaagaagaaaatttccagaaagttccatttgttagctgacatgtattgtagagaataattttgggggtaattggggcccactttctactatgtgtttatgaacgattagagactgttacaggacacagtgaatggcttaatatcacgatgttaatcagggacgatgctgctgcaggacaaattaaccaaacccttgaaaatatacacaaagaatataaaaaaggactcatgcgggaattattctaaagaaagttgttgcgagtcatgaggggctcagtccatgctcctgggcttgagagacccactcaacagatcttgctgacccagatccaacaagtaacagataaaaggggtcaccaattacaaggttaaagcaaagaaattataacatgtggttataccatgaagcaacatttggtcattgaaacattagtgtttttatagaagatgcttgattgaaattcttagttttgaagatccattcatagaaagggacaatttaagaaattcagtcaagttcagatttcccagaaaggctctatcagaataggattgactttttgcaaagataggtttagacacatgtgtggcttttcgatcaaccaaaattagcaaaaggccatccacctcctgtaagatacagtctcccctccaggacaagacaggaaggaggggctgcccatgcgcaccctgccctggaaggcatgaagagctaaccggctccctcggaaaatgctaaaggtggggaccgtcacaccatcttgcaagatgaagtaagagaagaagaaagtgccgatgctggagaaacagcaagttggctcggaatttcaaatcaacataagccgccaagcccaacgtgaagggatgcaagccaaagaaaacgaatccctgcagtctctgaccagttagaggcaacactagaagcaacttttacagaggctgttttcctgtctacagctggcctgttggaactggagatgtgccaatctttggcaaagtgtccctcatcaagaaattcaaaggaatgctgccatgttctgatgtattggccaagttccaagtggagttagtcatgttttgaccatgagggaaatgtggtttcgagccatacaaaagacgcctgaacaaagtgggttgaactgctcttgctaatgctgtccgttttgagatcctaaatctacttttccatgaggcactgttttggatgaggctacagactttacagccgttaggtaagaggaagccctccaggcgtttacattccatgaagaaagttccaagggtcttgtggcgaaagagctagttcaggaagtcactgaacataagcaggtgatctagggccctagggccttggacagggatcctgtaaaagatgacatgggtgtgaaatagaagcctacactttgcaatagtcctggtctatcgtcagggtcctcggatgccgaggtggggtgggatgattgggaaagagatcaaatgtgggttgaaaagcagcattatctttgcctggataacgctttttccaaacaaaaggaaaaccaagcaatttgacataatgatatggcctgtccgataatttaaatcgattatctggggactcctggctctcatctcgctgtgagcatctcccaggtctcaccctctttccctgtgtgcacctgcacgtatgctctccccggattgcggaggctttgagactccccctgtgacttctacccacttcttccaaacctgtctggacctacatctagagatgtctatgtgaaggaggaaaatctcagtgttgcagtataaatgtaggtatttcaccaatttgccagatttatgcttaaaaattataggcatagagaagagggaggtaaaactctagaatgatgtgtgtctggttgaattccatgactctccggatccccgaaccgtgagttgtcactgtcctaaagagtattcatgactaagaccacagtgtatttaagaaattagctattatgatggtagattttgtcataagtgctatttaagtatccatattgtaaatactgctatgaatttcttttaaaaattaaattttgattatttacagtcattttctaaaaatttgagtaactgtaaaatttcccttccatatgcatgcatatctgaagagaaaacacccatgctttaggatatcccagataggaaggatatgatatgaacaagctggaggtatgtcaggggaaaaggcagaatgggttgtgtggaaaagtggctgaaattccgaggattcaatcccatgtctacatcaaggcactggggtgcacaggccatgttttttaacagacatttttctttgcaaatgacatatcatttttttttgtgaactactgagtgcatggatttttaaaagagaattattgtcattaaatcttacttgagttcttgggagctggtggccagcatacttcgaatgcttttgtccgccagggggcagccagacagactgtaagacaggccgggacaggcaggtcagtcaactgcgaagcgcgtaactcccaaacaaacacaacataaaaaccgaaattaaagagtttaatgcagaaaagcaatgggcaagtgctgtatattgaatttttttttgtgtaattaattctgaatcggttcgaatataaatttaagaaaatatttcttaataagcaattgtttaaaaataagataaaacatttgtgctctttggcttaaatgcttaagaagaattttacaaatttaggtcgtttatttgaaaataaaagacattatacaacacataaattagcatgcttttgaaggtcaacatatagcacttaaagggttgacacagaattcaacatttttactttgacagcattgttgaggtaagctgaaaacaataaattgaaaagacagaatccaccatgagaaaaatgaagtcacaccttctgtgtgaggcgtaattaccagtcacatgaccactcccatcacaccctggagttggacatctgccaccaaacaaaaacaaaaacagccaaaatagtaagtatgtttaaaaaaaaaaaaaacttttaaaaaagtttcattgtttccagtttagctgcaatgtctgcaaggggatttaagcaccctgaagaaaagcggcaaaatgcacgggttaaatgaaaatgacgcccccatccgacagagcgtcactgggaacaggcaagtgcacggttagctgctcactctactgacccagcagtcggaaacatttatatgctgcgaatgtcgcatgctcaaacggcaaggcatatacagatccagttttaaaaaatcagccaaagaatgggaagattaagaagattcataatttcacctcacagcatgcttacgttattaagtcctttttgctctccttgcactgagggtacttgggtttgggacttgggatggtcacctccccgggataccgtctttcttctagagcctcctggaatgggtccaagtcttctggctgtgggcaaaacacagcttcagagccacacggatgatcacatggcacacagactgagggaggtggttcgtggctctggggtggcctctacatcttacacctctttctgctgtacctttaagatccttttggtcctgataacgcccctactgaaaatgcatattgaacttttcttccactgctctaaactcctaaaatgatggtcacctgtcagtggtcagggcccttattcaatattcacctggctgtgctcatcacatggacacacacacggtctggtagccagagactacatttaacttggtcttcctcatccagcattcagcacacacctgtgggtggctgctttatccaacacttgcctgcaaagattcaacactggaactacagtgtcttagggctgagctttcccccaccattggtcagtattttacaagcacatgctttaagattcaaggtaatggagaccaatttagaggaatgtaactgtaaatttccttttcccttgtgtgttcaactgcagtaacgtagatgtttctacaggtggcaatgctcagcagacactttcctaagtgtagatacatgggaaggtttgtcttccatgatgatccaggatgaaaacacttctgtcattttaggagggcttactttcaattaaaatgaatttggagattcaaccaccatgccttatttggtagtaatgattcaacactgcgggagaaaaaaatacttagaaatttagcttgccactctgatttggttctttttcacaatgcctggatattgaaatcaatttgaagaatgcagataataggcttataagcaggtgccctctctgccaatttctacatggggctaatatttcttttttttccatttccttgtttctgtaagacactagtgcttcgatggtggtctctctattgtactaaaaacacatttcatttttcagtgaagaaagaagatgtcataagactttaaagtcggtacataaagaaaacatttttctttatttcttttcaaagcctaaagggcattatatctattttaataacctgaatttgaacactgtagctacttcaaaagtatgttcttgacatagatgttttagtaatactgtcataaacaaagacttaggtgatggtactaaaatagtttattcaaggctaaactcttttgagtacttaggtttcttagagaagggacactgtccttagtttcgaagggctagttaattaatagcacatagttaaccatttaactatctaagactcctattagaattctctacctgcaaggaaaatcctgtattgtttcaacaggacacccagaaaaatgaactcaggtgctatttatacgttttcttagagtaatcatttgtaacaaaacatatttgttagaaaataaactttatcatttacaagagtcaatactttgtttcactctaatcaatgttagtcgcaaatctcttctgggtcaacaaaaactgttttctaagtcctcctcagctaaaggtcatatttaaagagaaaatatattttctcataacgtatgtgcaaatggcttttctttcagctggggccccatttttaagtctggcagtcaacacaggctcaatgaaaaggacatacagtaatgtctttggactcgtcctcgtctatcctccggggtttcattttggtgtagtctacgggcaagtcccagcagtcgccctcgcccagctggaaacaccggttgttcatcactgcctgctgctggggggacatgggctccagaggggtcaggatggggcagcagctgtcccgcggcctctgcttgttcatgctgaggtccagggtcccgttctcatccacctccatgtcagggttctgtcggtagaaagacatagtgactgtgcttggcccggcatcttgtgacaccacgagtccttcctcccagattacagtcctgccgtcagccagtgtagcgttcaacacagaatccctcgctgctgtttccttggcctaaactcccaaggcggacaggccttgtctggtggtacattcctgctatcccacgcttagctgcaaaattggttggagaatccaggcatccatcccgccatccctctctccctccctccctccatttccctatttatctactgtctatcctctctctctccttcctttttgtcctattgtatctctgatttagagtttgttcagaagaaaattacaaagtgcttaattttaattttattaccgttgcaaatacctaagagataaaaattttgtgtgtatgcatgtgtgcatatacatgtatgtgcatgtgtgtgtgtgtataaacacacatatatcagcttaaaaattctcttttttattgatgctaatagttcaagaattagggaggaggataacaaaagaattagaaggatgaaggaaggaaagagaataaactaaaatttaccttgtaatacaattttttttttttttttgagggacagagtcttgctctggtatccaggctggagtgcagtggcacgacctgggctcactgcaacctccacctcccaggttcaagcaattctcctgtctcagcttcccaagtagctgggactgcaggtttgcaccaccatgcccaactaatttttgtattttttagtagagatggggtttcactatatgttggccaggctggtctcaaactcctgacctcaagtgatccagccgcctcagcccctcaaagtgctgagattacaggtgtgagccactgcgcctggctgtaataagaacttttataatgaagataattttccactttacgaaagaagatctgcagttgtagctaaaaatacctttactacagtgattaccgtctgatctctagatttcagcaaacctgcaatttagtctactggcttaaaaaaaaaccccaaagaggtacagggtgaggctctttcattttttaaatgatgctttgaaatgcatcaataattctgcagcacttgcctctcaggaagagagtcagaagaatggacacatggacagaaagttaaaaaaaaaaaatcagaatacccctaacaatcctgcatgtttttccccaaagagtgacactctccttagcaaaatttgatttcagagctggtctgaaagctgctgcctcctcaagggtctagcagctctctcctctggatgcaacagcagaaggaagatgcttggaatgagacctccatccccggagctgttaccttgataaattatacagtatcattctgcctgaactctctttgtcaaagtgtactctgatttgaagctttgatactaatttaagctttataatgttggatttattctctcagtcttagtttaattttaagaaagtgcaacaaaatttggaaggggtctctgccttttattttattttttttgtggttgccacagaatctcttccatgctaaccttgcatttttgcaaccttgatcaccatgaaaactgcatgcacctgactcttctccaatatctaggactaaatatactgatagaagaaaaaaacatttgcaaaacgtaagattactgacctttcttcattcataccaactacaaatatttacaagaaccactgtcagtgtggtccactcaggtacatggccaggcagcgctacacagtggagagccctttgtttatcaggagaggaggtgaacatgtccgctgctcagcgtctcctctgagaacacaatctgaccgctccctggcaccgcctggttctccccagccgcctggtggcctcggcgaggcagctgtctcccaggtctgtgctgcatcttaaacgctctctctcctgcccagcataagcactggttcaattgataagaaaattaaaaatagacactcttcctatgcctttcatagcactatagcatccatgaaaatgtggaactgacgagtgctggctgtaaatacacggctgatcccttggtgtgaagtctgatttttacttcctttccctgctacccaggagtccataggcagatccctgcatttcacgtgacaatggtgctagcagaacttcctgtcaaagttcaaggagacccacgcttcgttttgcatgctctgtgcggtcactggagaccacaggaggcccacgtggtgtcctttgtttacagaaatgcttctggatcctggagagaaggatccattcacgcacgttcatctacaagatctgacccttgcctctgatttagaaaatggatgcgctttggacaatggtgtgttcaggctgcgttaagggaagctgcactaattgttcacagtggcgagaatggtttaggagatcacggcgtttgccccatacagctgccccgaaagcgccgcgtgtctcggtggctgggtccgcggcccggcctcccccacccgccaggtggctccacctgcccaggcgcgcgtacccgcgtggcgcacaggtcctgcggcttggtgctcaggttctgcggcatctcgcggcagcgcgtggacaggttgaggatggcggtggccgccatgtgggccgcctccatgtcgtgcgtgtagtcgaagctgctcttgctgcacgtgctgctggcgctgctgcccccgccgcagctcaggttgctgctgctgctgggcgcgtagctgctggtgctgctgctgctggggctggggtccttgcagtaccgcttcgctggggagacagggacagggatgactcaggccccggccgcagggcacacggcagacagcacacggcagggcctgcccgccccggcctcagccacacacagccgcgtgggacggccctcagggtgctggggcttacgcgtaaagaaaacaaacaacaggcaaacgaaaacaaaacaaaactttccggctcctttcttttttcttcttttttcctttttcctttttttttttttttttgccctggaggataattcatcgacctgttggagaggctgcacctcacacccagcacaggcggtcacctggtccctcgaaagacagacacacggctggctagcttttaggagccgcagggtgtagggaagtgactgggaattccagcccagtcaaatcccagtcgaggccctaagcgtgagtggggctcctccgcagcacatgagggctcgtgagcacttttggtgacccaacctggatccgcggtcccttatctgtcaagaggtgggctgttcctttcagccagaggggccccggcagccaccttctgggcctgtggggaccacgtgctttgggaggtggatttctggctgggcatgcagaccagatagggtgagtccaacatccttttttttctagaattctgatacaggccatgggagtgaaacggggaaatgcacatagagaataagctcaggataaatgtcgaaacacctgagtggccacttggtggtggcagacacgcggggcacgtgtgcagctgcctctttcatagccacggcctctctgttccctgcactgaccctcactgacacgattcccactgcccagtaatcctttctgagccaccacactcactaacagccaaaccagcactgaggggcaagggttatttgttagagctatttaaatctcctttagtacatgacaatgtttcagtccaggatttatccgatgggtccttctttactaattgttatccctgccagttaatgtcacaggacttcatttgtgcatggccagacatttctcttggaatccagcagagtgaagagttactcagaggtggacctggtctctcccatgtcctaaatccctccgtcagtgagcccctccctttaggaagcaccttcttccccaagagatccccgcctgcttccctgggaccgttgtgagtgtagctgggagaacttggtgataggctagagacactctagcccgggttctcctggtgcttagggctgccctagtcctaatcggcaaagctccaagctgcctaattctgatggaaactatggttttgtctgttgctacaaggaaagggagacctcgcagttggtcatggctcctgcggtgtcttctgtgccatcggcagcagctctgaacctggagccaggcttccccagggactccttcccacagaggaagaagagaacaaagctaagtgaagcaaaaagctttctcacattgctgatacggtcattatgagcaatgctaagaaattgccctggatttggatacaaagggaaaaaagaaggagtcctcattgacaaggtttggtttgggactgaaggctctcaggacatggggaagaggtgtgttattggtgattctgtaatgcacaggcctctgcagaggaagactgaggacagtgcccaggctgggagttggccaggctgtcttcgtctcagcctctgccaaaagctacagagaattccccaagcaagtaaccgctttacacccagattcctgtgcatgagccagaggctcaaatccgcacccacaaaacccatgaaatacaatagtaatctgttgatattatgactgtgttttgctaatctgaatgagcaaagccactcagagtgggcccatggctggtggggcacagctgtccctgagaagcgtgtctgagtgtccctcagtgtgcccctcccttctctctactttgggatgcccctcctctagggagcccagcagtgcagggcggggtgggcagtggctgctggtctgagcaaggcccacaccagggcctttgagagagaccaccgtggggctgcaaaggagtcaaccagagggagacagcagaggctgtaagggcacccccacgggccctgtgcagtgcacaccttgatccaccctaagcaaccgtcacaaaccagtttgcagtttgtgatactttggatatgaactaaaggttgtgattttacataatttacaattttgttaagaaatagtagaataattgtaggagaaatgaaataataatatggggttttgtttttactagtgagggctagccactggtttaggaaaaaaaaaaacattgcccacataaattaaaaaaaataacacttttgttttgaaatgagggaatttcaattcctaaaaaaaattaaaggaataacacaagttaatgcaacaaacaacggcagctgacataggtcggctggcaaccttgcactcagcgttggtgagggcgatgctcaggagtgtgggtgtggaggtgtggcaggagctcccgctgacgcccagagacttctcgtcatgagcccctctcacagtgactcctgctacactgtgctcacagcatcctccaacaggattgcatctagacttccaccaccctgtaagatgctaccacatgcctgcttcacagatgtggagactgaggctgcccaacgtccacaaagagcctcgactgccatcaacgatgtgtttgtctgggagagttcagtatcttatcaattagaaaatgctaccccagcatctctatacaccaataacatccaggctcaccatcaatcaagcaggcaatcccattcacagtagccacaaagaaaaggaaatacctaggagcacagctcaccaaggaggtgaacaatgtccacaaggagagctacaaaacactgctgaaagaaatcagagacgacacaaataaatggaaaaatgtctcatgttcatgaattggaagaatcaatattgttaaaatggccatactgcccaaagcaatctgcagattcaattctattcctatcaaactaccaacgtaattctttacagagttagaaaaacaatgattctaaaatttctatgaaatcaaaaaagagcccaaatagccaaagcaatcctaagcaaaatgaacaaagccagaggttacactctacctgacttcaaagtacacgataaggctacagtaaccaaaatagcttggtactggtgtaaaagcagacacacagaccaatggaacacaataggaaactcagaaataaagccacgcacctacaaccatctgatctttgataaggccaatgagaacaagcagtggggaaatggtactgggataatggctgagctatttgtagaagaatgaaactagacccatacttttgccatatacaaaaattaacaagatggattaaagatgtaaatgtaagatgtcaaactataaaaatctgagaagaaaacctaggaaatacccttttcaacactggccttggcaaatattttttttgactaggtctccaaaagcaattgcaacaaaaacaaaaatagacaagagggacctaattaaacaaaagagcttctgcacagcaaaagaaactatcaacggagcagacagataacctacagaataggagaagatattcacaaactatgtcagatgacaaatgcctaatatctgacatctataaggaacaaatacttcaacaaacaaaccacaaataaccccattaaaaatgggcaaagaacatgaacagacacttctcaaaagaagacatacaagtggccaacagccatgtgataaaatgctcaacatcactaatcaccagagaactgcaaatcaaaaccacagtgagacagcatctcataccagtctgaatggctattattaaaaagccaaaaacagcagatgctggagaggctgtggagaaaagagaacacttatacattcttggtggaaatgcaaattagttcagctactggacagtagtttgaagttttcccaaagcacttaaaacagagctaccattagacccagcagtcctgttactgagatttacccaaatgaaaatagatcgttgtaccagaaagacacatgcactcgtatgctcatcaccatgctcttcacaatagcagaggcacagaatcaacctaggcgcccatcagtggtggattagataaagaaaatgcggtacatagacactctgtgatactatgcagccataaaaacaataaagtctaaagtcatgtcatttgcagtaacatggatggtgctggaggccacaaacctaaatgaattaatgcagggacagaaaactttgtaccacatgttcttacttgtaagtgggagctaaacatagagcacacagggacataaacatgggaacaatcgacactgtggacactagagaggggagtgggttggagaaatacctcttgggtactgtgttcactacctgggtgcaatatgcccgtgtaatgaacatgcacaggtaccctctgtatctaaaataaaagttgaaacaaaaaagaaaaatgctacctctatgtgacaacattttacttgaaagaatttttaactaaaacgactctctgcatttcttcctctcatcttacttgaatcaccttaaattatcctgaagttataaaatgtagatgtgacgatgcattgactttcccagatatttaattcataagatgctacaactagatgacgccaagtggatggtaccgaattttagtcggtgactgaactgtcaagagtcttttgatgtgcctatcaactcactgcactcaaatgggcaactaagacagtatctactttcacatgcatcctttactgaatataaaaatgtcatttaaaagttttaattaaaacaaaaataaaaataagagggcctacagttaaaattgctcaggaaaggaaggtcattggtcctaataattatccctatttgtaaaatgtcagcacagcccttcatgccagtatcttttggaccacaatcagcattgctcggctcagtgccctgacagcagggggcgctgcagagcaggggcttcaaattgagggtgctctgttccccctcttccagcacagaggatgcttggtctgatgagagcagtttcacaatgacagaatgcactttctttttcttttcgcaaacaaaactttttttttttttgtttgtttgtttgttttgagatggagtctcactctgtcacccaggctggagtgcagtggcatgatctcaactcattgcaatctctgcctctcaggctcacgtgattctcttgcctcagcctcctaagtagctgggattacaggcgcccacgaccatgcccggctaatttttgtatttttagtagagacagggtttcaccatgttggccaggctgatctcaaactcctgacttcaggtgatctgcctgccttggcctcccaaagtcctgggattacaggcataagccaccacgccggcccagagctattttttgatcaaattttttttcagtccatcagcagacaagaatgtgttaatgttcttccaggcgcccagaacatcactgtatgttacgagcaatgcagcagctttaactctagatgccagagctgccttcaaacaggagcagccgctggatcttaaaccatcctaaaaatacctcttcaactattccatttcctctactgcaggaaaaaaggaaaagcacacaggatttgtgtgattaaatacagctgttgatgtaataataataaacaaaacaaaaaaatacaaaaccttccaggtaggaccttttcattcacctactctgcttgtgaaattcttactaaatgtacatgccttgttctagaaatgcctattgccttatgtattcaccttttcttgcagagaatagataaacatgtctccacaatatgaatttccatgaaaaccagacaaatgcaatcacaagatgtccatcatggagatgtctccactagctgggacccagtgatctttagacctaacttgattcaggtcctaatctgtggcactgagtctcatagtctttacacacgtccaactagtgtttcaagtaagttgaaatacggacgtctaatcttacatgggaaagaatggagctttctagcctgtgggatgacatctccaaggcacacggtctacttgctagagttgagctgatgtccaaagggcgtcgaggtccaggtttcaggctctcttttcctcagtgtccttggcacagctactgcctgcctggcctgccctggccctagagggtggagcgaatctgcagacccggcctgtgacctagcaggagcttgcggcccgtgggaagacaggccgtcttggcaggtggtacccaagaggtgacacagccatgctgcagggcagagtgtggcaccgagctccatggacgcaggcagctggagagtggtaggaagggccgcggactgcctgcaggaggagaaaacttcaccagggagcggcctctgctcaggtagagaggccatggggaagtcgggcaggtggagggaagaagggagctctgcaggcgggcgtggtggggctggagacagagggccagggaggtgcactccagaggagtcatgaaggagagaatgagctgagtctgcagctgcccaggcagtcaggggagttgtctgtgtggccaggagggcagggagcaaagaagaggaagtgccaagatgataggaaggtctgagcgctggagaatttggaagctgggaataatcaaaaggagaacatgggcagagcccatttgggggctggtaacctgacaggattaggcccccaagggtggggtgtgttgcctggagacacagcaaaggtggagatataataggccaggggttggcaactttttctggagaggattttgtagcaaatgtttcggctttgggaactgcgcgattgtttttgtggccacttggctctgccctgcactgtgggagcaaccgcagcctgcccgccaagccctgagggcagccaggtgccaacggcaccctatgcatggcatggaaacagaatttcacacagcttttatagatcagaaaatattatttgtcaattgtgcttttctgcaattctttaaaaatgtcaaagccattcttagctcaccatgcaaaacagggtgggtgggctgtggcttggagttcccgggagagggcagggcccagacacccaagtggatgctcagtcctcctcccctcagcccctctgtcagcctgcgtggatttctatttcctatagacaacgtgaagccccttcctcagcagcccccgcagctttccctgttcttccttctcacgggtctccgtcctggcctccagaccactggctgtgctcaccatcctgtgtgtttccctacttttgcatgatttctgctcaaactctacgatcttacctaaagtttgccactttggtaaagcacacgctaatcctgcaggcagagggactcctcacttcactgggcagcagtgtgtgtttcactatcttgtgtatcctgagggaaggcatgatagactgacagatggataggcagacacacagacagacacatagacagacacagattgacagatggacagcaagcactggtgtgctgtgtctggaaggatgcagctggtgaagtgaagattttgtgagtggtttgatcacagctggtgtgatttaagagatgattctccaaggctgtagggaaggtcctatgttttatttcattctgtatctccatggccctgacctttggttgctaagatctgtacttttctcccttacgacaggcccatttctctgcctctttttaggaacaatgactcaattctttgtgcacctgaagcaagtgttggcaaagatacattgaagagtaactgtagacagcagtcactctgcagtcagaatctcctacctggtccccaggagtggggccagatctccttggattacaccccatcaacaacctaccagccagtcttgtcctagtgggcactttccaggaggctttttttttttcttgaagatggagtctcgctctgttgcccaggctggagtgcagtggcatgatctccacttactgcaagctccgcctcccgggttcatgccattctcctgcctcagcctcctgagcagctgggactacaggcacccgccaccacgcctggctaattttttgtatttttagtagagacggggtttcaccgtgttagccaggatggtcttgatctcctgacctcgtgatccgcccacctcggcctcccaaagtgctgggattacaggcgtgagccccctcgcccggccaggaggcttttaaaatctgtcagatgagtctagtgaaatggaagcagagtgtcactaaaagcccagacttcacgcccacacaatacatccgtgtaacacttgcgcctctaaaatttgtacacaaataagtggagggccggctcattttctcactgcactgtggcgagaggctgcatttcctttgctctgttttcctgaagccctaacattcagctttcagcctgtctgctcaatagatgcttgtttctagggggtcggctgcaaagcatggctcagctttagtgtccacaggagggcctctgccgggaatgcgatgatcaatgccagtaactaacatgtgatggcgccacagagtgcgtcctcacacccatcctgtctcggctgatcttcactgcagcctcgcaaggtcagcagaggacactcttgcttcctctctgctccagaagaaacccatggcactaggctaacttgtccagtagcatccggctcctaagaatgacaccgaaaatctgctcagtggatttgacttcgggtgccctaaaggcaccgtgacctggagacggctctgctggtcatgacttcacccagaagccccctttccttctcaggctggagtctgaccttaacaatgaagctgaagaaagaaatcagcccacacggaacaagaacaacaaaaaaacaggtgcgtaaacatgaacatctagtgaaagaatggatcaaatcccggtagaacgtcaatgaattggaaatcatataagcagccttcaattaggagaacttaatttcttttgatccttcacttgtagatgaacaaatgagatgacaagaaacctgaaattattacaaaacaaacaacaaaacaaaccaacagaactatttctgttatacgctacagtcactccttttatccatttatgtctgtttctgaccaatatatgatacctccaagaaatactaaatttcattcactatacaaataaattattattaaggcaagaaataccatagcttagaaagatgtgcagcaattcctgtagaataataaaaatggtttctgaagtccccaagcattcagtttaaatattgtgtgtgtatgtgtactgtgattttaactaagtacctttttctttgtttttgatacagagtcttgctctgtccaccaggctggagagcagcagcacaatatgagcagctgggattataggcatgagccaccatgcccggctaatttttgtatttttagtagaaacagggttttgccatgttggccaggctggtcttgaactcttgacaccaagtgatccgcctgcctcagcctcccaaagtgctgggattacaggcatgaaccactgcagccagccccaagtatctttttcaaagaaaagcttgatgaccttttttaaaaaactatttccttcccctgtgctagagagcatcatgataagacttctaaatcatcagaacatttacaccccaagtcccaattggtaaaacttggcaattacgtctatacagcctagaatttaaagcagacacatggttagataaataaataaaattaaataaatacagtcttcccctctaatgaaaagctacttaccaactagctttgtagtgaaatggtaactagttcatactctaggtagtggttcaaataagcattggtcaaaataaactacccctttcccatgaagcccgtggcactgtgtttgttgcatgagctctattttgttggtgccacagctgccacaagccagcaggggacgaagctacggctctgccggcagcaccccaggctgggccttgttttgccccatcgtccccagtcacagggggactccggtgccggtcttctgtgaagaggcgacaaggaggccaccagctctggctacccggcaatcactggcgaacttctcaagggtgccgtagtgtcgtgcagggagcaccccagggattctgattttattggtcatgagggcaggttgggcatgagaattaagaaaaaaaatctccccagatggttctcatgtgcgtgcaaggctgagaacaccaaggagatgggtgcagagctcctcaaagctcccgggagcccagggctgcctgctctcccctgcactgtctgtctcagaggcatttatttaaaggaagcgtataacataagggcactgtcttcccagtaccacaaaagacaataagccagtccatagcttctccctctccacattccacgagcagccgagtgcgctgtctcggaattattgaggggaaaccatctccttccttcccctgaagttttgctcacctacagctgtgtggacctgaggggctttcagctcctgggctgtgctatgaaagtcctgttcttttggtacccattgagtgaccaccaccgctcaactaatttgtaggacattgatatacacaacaacaacatcatcaatggcaacgtgtctctcatgtataagagtgtgcacctcctaccatcatcatatcctttgggggatatatccctggtttgcaccttgggagctatggctcgcttgccataagtatggttgtcgtaactgttgtattcaaacgaggtcttggaatatttctcgagctccttggccaggttggaacgcggcgtagttgtggggacattgtttctgtagccatactgaggaatctccagctgcttcacaaagcacattggcctggaagtaaacaagaaaacaaacaacagcttgctttcctgtggctttgtacacgacgagcttcacattaaaactagaatatcttacttttttaaatgtgttaaacaatcagaaccttgcactaaaactacaacttttttattttctgaataaaagacaaaatgtcttttaattatatagcatcaaataaactgcctaacagtcaacttcggcaataaaaaaggacaagaaataaaatctttaaatatgtccttttttccctctttcctgtaagaggtctggtggcttggtgatgacatgagatatgaggatggggacaattccagtcctgaaatttctttgcaacggttacaaagagttgccgaattatacacaaagatgttgcctcgataaaaaatcccccttaaaaagtaagatgaggtaaagaaatactcttagggacatagactgagacagaaccagatcaaaatgtacctaactggacaatgaggtaggctaggtggtaatgtaccttgtcaagtactagaatatgcattcaacgtttttatctagtagtcatttcttaatgtctttggaataaaatatttaaaaggaaggacactgggtcattgctcactcatagacaccatgtcgtgtgtgtgtgtgtgtgtgtgtgcgcgtgcgcgcgtgtgtgtgtccacctcttcatcggtctagctcataagaggagtttttagactttatacttgaaataactttagacttgcagaaaagttgtacagaggttttctttacaccctgacaccaaattccaccaatgtgaccatcttcataaccgtcagacaagagcaaaaccaggcgactaacattagtatggagttctttcctaaaccagaggctgtatttggatctgaccagtttctccacagatgtcctttttctgacacagccatgcagggtcccacagtgcactaagggtcctgcgttctgtcctccccctcgacagctcctcagtctcaccgggctcaaggcttcatggattggacactgaagagctggtcaggttttgtagaatcagatacagacacattcttttttttgttgttgttgttgtgatggagtctcggtctggtggtctgggctggagtgcagtggcatgatctcagctcactgccacccccacctcctgggttcaagcgattctcctgcctcagcctcccgagtagctgggactacaggcgtgcaccaccacacctggctaatttttttgcattttcagtggagacagggtttcaccatgttggccaggctggtctcaaactcctgacctcaagttatccacccaccttggcctcccaaagtcctgggattataggcttgagccaccacgcctggccatagatgcactgttaatcgtaacatcctacagtctcatctgccatctttgtatttttctcaagtgattctcctgcctcagcctcccaggcagctgggattacatcacgaaccaccacgcctggctaattttttttttttttgagacagagtctcgctctgtcccccaggctggagtgcagtggtgcgatctcggctcactgcaagctctgcctcccgggtttacaccattctcctgcctcagcctctcgagtagctgggactacaggcacctgccactgtgcccagctaatttttttttgtatttttagtagagacggggtttcaccatgttagccatgatggtctcgatctcctgacctcgtgatccacccaccgcctggctaagttttgtatttttagtagagacagggttttgccaagttggccaggctggtcttgaacccttggcatcaagtgatcctttttcaaaaaaatacttacagaccttttcacatcagcatcattttacacactataaagctaacaaaatattgaattttaaaagcagagagtttcttgttgaatttttatcattctaaattatataaaatgtattccaaataaagacccaaccaagcaggaaaaaacaaaaggtggtgaattcatgtattagtgttaggttcatagtcagcttaggaaggacagtaattttttttttttttaagacggaattttgctctgttgccaggctggagtgcaatggcatggtctcggctcaatgcaacctccacctccagggttcaagtgattctcctgccttagcctcctgagtagctgggattacagtctcccgccaccatgcccagctaatttttctatttttagtggagacagggtttcaccatgttggccaggctggtctccaactcctgacctcaggtgatccacccgcctcggcctctcaaagtgctgggattacaggcgccagcaaccacacctggaggaagacagtaatttttgagtaagatcctatttcttgattactagtatcagtaagatctgcaaatattgcctgtacctctagcacaaatgtgaaattttagcagatatatgaaattataatatcagcaggtacaaacgtgtactgtttaggaaggaaactctttggcaactgatgtgcaaacaatattttgattgttctccctggggatggaaatctgaggggttttgatttgttcctttcctaacttattttccacaagtattcttgtgtgtctgaataaatatattttctcttgagtccttgctctcttcctaaaggtgatgcacacaggcacaccaaaatcatctatacttgccttacaggtaacaggtttaaaactattgtcttgcttttttatgattattttcatgattatattttgcttttttatgattcactgaaaaaatatttagaagacacaaaagctattttttaaaaaatcgcctacagatcttctagagacaaaaacttttaaggttttggtgtattttttatgattaacttaatgcattttatatttactttaaatagttagaatcttacacttttacatattttatgcttccattttacatgagatttaatttccctttttgtttctcaggctttaaaaacagttcttaatagcagaatgatattgaaatcaatgaatattatactatttaactattttccaactttttcattttgttgctgttataaattctgacttaataggcatccatgtagataatgtctttttactctgattatttcataaatttatattggttttggtgcagttacaaagttttgataactgaattttttaagaaaagaaagtcagattttagactgatagccatatctatacttttatagcagtattggatatatatccaattatatatatgtaaattggatattggttaaatatccaatttatttaccaaatcaccaatacatgtattgcgatttcattaatttagccgatttacttcttgtcaaatcaataaaatcatgtaataattgactgtctattgtccttgagacattttcccagataatatgatggtacataaatgaataaacctgtaggccttgctttaaaagatgctggggcaggctgggcatggtggctcatgcctgtaatcccaacactttgagaggctgagccaggaggatcacttgagcccaggagtttgagacccaccagagcaatatagggagaccctgtctctccaaaataataataataataataaataaataaaaaataataaaaaaaatattagccaggtgtggtggtgcatgcccattgtcccagctactcaggtggttgaggcgggaggattgcttgagcccaggacatcaaggctacagtgagccataattgtgccactgtactccagcctgggtgacagagtgagaccctgtctctaaaaattttttttttaattaaaaaaaaaaaacaaaagaccatgggtgatgtgatcatatttcaagggtccaaatgctatgagaattctggagaagagagaacactccaggctatggaattcagttatgtttgaatggagaaagggatgtttgaagtaagttttacagaatgggttgatttttaaggttaagatctgtgcggggagtgggagggggcggtgtggtaagaaaacattccaggaaaagaaactcagcatccaaaggtgaggaggcaaaaaagccaggagaaccctcagggaatagcaagagactggcaggcagcctgggaccagatcagcccaagggcaatctgtttattcccctggcggggaaggccaaaggctgggagaagcataatccccaagccttaaaaagatcaggaccagatcagagggaggtaggaggggaggagaggcttcagctagagggccatacgccacaccctgacagaggctgcaagtctgggactgggaaggaggctatagacttggccaggattggaagcacctacttaagtctcaggctcttgttcattgaacgatttatttaaagactttttgaatcgtaactagttaaatgactgtaggtttaacttcattctcttttcttccttcctgtctcttccttttccactgaaagagcacccctacatggagaccctgtggggaatacagacatgctgggacagggacttgtcctccagctgtcacacccagcatgccaggtaagccccatggaggcggaaagcccgcaggagtctcacgcagggccagtgcagggcccagcacccagcgcctccctgaacaaccaggaatggctgtggttggtcagtgtgcattgctgggctggcccgagacctcgcactgcagtgagactagcgtctctttcttcttgttaaaagccctgtcctggcctggttcccattccagccagaggcacagaggagaacggctgcagctgcacagtagttactcccagcctctgctcggttggcatttggtggggttttctttgcaccaatccagaaacagggatgctgcatatgaagccacaggagcagcacagaaggcttcaggccggaacatcggagtggaggctgtgtttgaacaaagtggtattcacaattacatgcatgcctggtctccagctgccatgagcttctccctgaaatccccactctgtgctggcccccgagagcagggcagcctgtaggtgggcagtcgtaggtggtcagtgcagcccccgggagcagggaagcccaaaggtgggcagttgtaggtgggcagagcagtccccgggagcagggcagcccgaaggtgggcagtgcagtcacctggtgactccaagaaaggccagatactagagttcttccagcttcttgggggtctggccaaagtaggctgaagaaaattcataaaagccctcagcaacaaatttctccctaccaactttcaaattctcctttgaccaataacgattccttgctggattacgcagccccgcgggttggtctgttttattgggtgggggtggttttcatgttgccaataattagctgtgggctgatggggagagggagggtggcctatgagttgttcagtgtttggtcttgccatatggaaggtgggtgcatttccctgaaagggtggcttcctgagatgggtgctctgggggcacttcaggccaggaccccaaatgcagaaaactctagatgtagctgtgccacaatttattgaggagttatctcttgatagtagggtcatagatggctttgttttcttatttttgcttaaataaatatttataattttctgtaaagattttaacttttctattcagggaggaagggagtttaattactacgttagaagcttcttgggatgttatgaaataatactcaagaacaaaaaggatattcatattgtttgcccagtgatttgctccaagagatttatcctaaataaataatttacttttttatttttttgagacaggttcttgctctgtcatctaggctagagtatggtggtgcaatcacacagctcacagcagccttgacctcctgggctcaaatcaatcctcccacctcagccttctgagtagccaaagaaataacagaagcaaagtgctgtatatatgaaagaaatgtgtattattgccctctctttaatagtaaaagcaggaaacagcctgaatgcctcaaagctagaacctagttttggcactgaggggtacatctgaacagtagaatatacgtagctgtgaagatgacaattaagatgattacatagagacaaggacgcgtgtttctgctgtgatgttgtgtgaaaaggcaggatatgtgacaattgtcatagttttcatgtagatgaggatttcaaacaacacgtaagaatgaaagctgtatagaagggctgagtgaatggggagcttatcctcccaaaacttcaataaaacagtggtttcagccggatgatctgcgacattgtaacactgattgacccactgtaacattcgggtcagtcatttaacctccgcactctggattttctcacttgccaaacggaggtgacaacacctactcccacctacacctcagggcattgggcgtaacaggagggagctctgccggttttgcacgcgagagcttccacacgtgtgcacagggtgctcatacccctggcatcgtcagaaacatcagcaccagccttagttggtgtgaggccctatcctgcaaaatatgacaaaattaccttggacatctcagtaattttcaaagcttccctttcatctagcactcagactcatgaaataccaggtccagaaacaaaaccagaaatgatttcctccaattctctcatgtaaattgtcacagcgaatccgcagacaccaggggaagaatgacacccttgccctcacacagcctggcctggagtgaggggtcctggccccggcttccagcacagccccgccctccagtccctgcccctgctgctgtagggacatgccctgagcgggtgtccccagcgctccgaggtgtggggcagactatggatagagctcacggatggtgcactcctgctgggtacctgagcacgcggtccgaggcctggctggacttggacacgtcgcagctctggtgcttttcctgtgccttggccagtttctctgctgcagcgatcgggcatccggagaggctgcaatcacagaaagcgggttgaatggtcccgcctcaaacaccttcacagcacactaatcctcccttagcaccaagaccctgatgcaggtggagctggtgagggaggggtagtttcccaaacctggcacaggcagtcctgatgggtggactgggagagggggaggtagtcatgtttccaggtgcatgctttctgctggtctccagcagagaatgctggcggcagtgctatgtgtgaggtgtattcaatccttcccaatgagagcatcccagctcccatgcattcgggaggacatagctggtgaaaactgtagacagattccatttctggagatgaagaattaacagcttgggtaggatgagttttgaagccccagaatggcaatgaattgactgttaccagaagatggagctccaagctgatttcctaaatgctattgactgtggcgtctggggggcctgtctgactttagccctttggtgttctccacaagcagggaaatgaaagtggagaggaaagcagaatgatttctaggactgcaataaaatgttttgtggagccaaatagttcaggcttagtctagacggaggagacagcagctgggctcttttgtgtgcaagctcactttatgtgaaatcaccgtgtctgctctgtgggtgtctacatacgtatctgctcatatgcacagacgctcaccccatatatgtgtcatatcccaaaaatacgcctgtgctgaggtttgacggaggccctgacgctgcggatgctgcatcgaacagcacacagcacgcacctctccaacctatcgatcatttcctgcttctgcagattaaacacctgaatgtctctggagggcacagtggtcatttgtttcattataaatgtaacacaaaggaccaggtttgccagtcagacaagcaaaaattagagtgaagcttgtaacagtttccttcttttagatacaattttacgtgaactcataaaaccatagactgtaagacaaactttaaaagaatcactttttggcctctgggaaaaaaaaagttatcagataagaacgcaatattatgggcagctgagtagttcttatcaagtctgcacaggacaggaaaagagaactcagatctttcacaaacaaaagagtggttctgagtccattggttagcaggagtccagaatctatttccctggcaccccagcctcccacagaccaccccccaacctgctaaacatctgcaggttttctgaagacgtccatacttgtgacctggggtttccatagaattccaagggcagccaagccaagctacacactgtacaggcgtgctgcattccaggccacgtcctgtccaatgaacactaggacagccctgtcttcacctcggaggacagcgaaggcttggtctccttccttccagccattgtaaatggtcatggtttccactcctgatactataccctgctatgataaggtgggtggggcaactaaaaccatccagtttgcaccacaagggcgtggagtgctttcactcccgtgcattatatggaggtgcccgcacttggggagcacggtggggagcaccatatggagcgtggtaggccccccaggaaggagaaggcatggagagcagccggtgctccctcccacaccagtgacccacgcgtggcttaccttcggtgggagttcctgttgctgttgacatgcccgcgccccgtgcagcccggagtggggcacttgaggacactttcatgcatggcaaggacttgacagggagaggcaaagagaacagccagtgttaaaacagaggcacggttagggcacatgaaaatgcagtcatttaacaaaggccaggtcgctcatgatagacagtcctacaaacgtttgtgatgggcatggccaggaaaacacacatgggaggagaaagaaggttgactggaccctacggaccctacacgaaaggccagagaaagaaggttgactggaccctacagaccctacatgaaaggccagagaaagaaggttgacgggactctatgctaagggcctcacacagcagaggcgctggagccaggagctggggagttcagagaacacagaactgactctttcctgatgggctaggggagcgagggcctcacagatattacccatgcacaagcatggagtattgattagccatagaacaacacagaggctggggattttaaaaacatgcctgtgctttggaaacacacagcattatgaacgtgtggtgggtagatgaatacagaaccacaaaccttaattttaaataaaatgaattaaataatcactcttcctttaggaatcaagtgctttattattctttaaataggatgagctagaagagtaagcgtctgcgtttttaccctgtgaaattaacaagcgggagaggcctcttgcatggacaccttttgtggtgcaaggatgctactggctggtcggcaggggagagctgcttgaattttcccagcagtggtgttggacctgaattatttgtgtcttccttcttttctggtccttcatgaacgctctactactctgggttctgggggaaggttagcagggacgaagggacccccacacggaccctgtctgcatcatgctctgctcctctgagcccgctgtctccaaactccaggggaatggggtggtggctttccctgacagcaaggtttacctgaggccaggtgaacatggaaggtctattcaaaacagatctgcctactctagttatgtaattgtatttttgacacttttcctccttctctagaacaacctctctctttcccctgcagtctgctgggcactgaatcccacatccacatggtgttgctgttatctgagtccacaccctgtcttcttactgctgggcagtcccttcagcagagtttgctttggtattagctttatcgctcccacagttcctggcttgtcctggatgtggtaggtcctagtaagtgctgtcagaaaaatgaatgatcaaagtgagtccacctttggttcatcttgtgctggcacctggctggagggggtcacaggagggttcctttctgagaggatccaagcacagttccctgcccccttcctccctgtcccagaggaagaagtgctgctcctccctacagggaggcctctccaggaagcatgtgcgtggtcctccttcctgcaggatgtcgatctacctacttcgttcattctttcttctttatcatttgtccaccaccgtgtgacaacagcacacgaatgcttctcttcacactgctcccctctgacatgtacctgcacctttcctttccttttatggtaaacttttcacatgcagtcttccctggggatggcacacgggggtcactctgacctgaggtccagatggcaagtgcactttacgcctctctcctgctgtgtgggaatgcacactcccagcctcgcccctgaatcctcctgaggtggagtgtgcttgctatccttggtctacactctgctgctacttcatccatctcaatcacatttctcaaacttctgcagcatgtgcagctcctatccctctctcctcttctcacatctgtctctcggcgtcaacaagaggcttttactcaagaaacccttccgggcgtggtggctcacacctgtaattccagcactttgggaggctgaggcgggcggatcacaaggtcaggagttcgagaccagcctcaccaatatggtgaaaccccgtctctactaaaaatacaaaaattagccagccgtggtggcatgcacctgtaatcccagctactcaggaggctgaagcaggagcatcacttgatcccacggggcggaggttgcagtgagccgagattacgccattgcactccagcctgggcgacagagcgagactctgtctaaaaaaaaaacaaaaacgaaaacaaaaacaaaaaaaccctgtgacccctgcagttcttcctctcagacacacggggctttatcagaaacaccttcctctcctggttttctgtttctctgattttcctccacctgctcctgtttctgtgcgtcatcttaccatacattcatggccaaacttcccatgtatggaccctccttcattcctgctttatgcctcctccctaagcaattccaccatcagtttccacgaatgctactccaaggacggtatccaggtagccacctctgcacctgacctccccaggcctccagagccaccttcccaaaccctgcagaatatcatgcagctcctccaactcaagtgggaagaatacaagtcccggttctccaccaaatgtggccctgctgctcagctttctgtacagattatcggccctggcgtccttaagttcaccgaggctataatccctggcatcctcttggtctcccctcttctcttactcctcacgtgtgctgccctccacagcctgcccgcctatctctggatgtttcgtgaatctgccccagcttttccattcccacaaccactgtcttttccatgccctgatctcttgtgtggacttttacaacagcctttagaaaatgctgtgggttcctcgcctctcacacaggacagctggagcatcacctcacggcggccttgggggccctgggagcagttctccatcccgcctagaccatgctgtggagtccccaccgtgcagagccccggcctcgtgcagagccccggcctcatgcccatgtccttctctcagccgggctgggagctctctgagggccagtacagtgtctcgggcaatggcgtgtcctcagtggtcctgacacagtgtgctgctggtttctttatggaatttagttggacagaaatgatgattaggggaaactagcccagaaaaaaaaaattaaaagccttctatggatggaattctctaattgttttagtaaatgcttgtggtgttataaagaatcgcacaggagcaaaggctgagaagcctcctctgtattgtctggcatgcacctgtgccgcccatgtcagagctgactctccttgcctccgagagcgatctggccctgggaggcacctgcagccggcgcgaagggcaccttgccagtcccactccacagtcccacttcatttaggcctgtcctgtgaaaacagggagtcagaagaatttcccatccataaaaaggagctgataatctaccttgaaggtgaaaatgtaggtcttataaaacacataaagaaactctttcttcttaaaacactagagcttggtcctcctgcctcactttgcagatgaggaagatgaagtacagagagctgcaaggtgctgggtgtcacatcgtgtgttcagacagaaactggaacaccaaacccaggtttcagaggagacagacaggctcagaggtcagtcggatacggatttacatcttagcccggagcttacttgagtaagttagtacctgctcagatttgtttaagaagatatggcatatcctcaatttgccaggcattggctaacctctggaaagaaagggtggcagagtctctgactctcatcttcctcatccgaatgaaagggggggtgttgccctgcagtgtcgattgcgggttcagtgaacttgtgtttgctgggtgtgagctgcgtcccagcaccaagtgtgtgctgggtacatggaagctgttgtcaaaccatgctgtcttcctgctcatgtaacacacgggattggagccactcgctctgatttgtttatttttatggctcttcaggcttgttcacaagatggttacaaaacacacaagtttgctattttgaggagccatttgaaaacctggagccataattgcatctaaagatctttcactagaaaatgttcagcaaaaacttcctaagtcccaaatgctcctgagaacgtttctttgtgctgacaggttttgctctcaagtatctcaaagttacccattttaatgggacagtcctcaaaagggccttaaagtagttaactggtcatcttgtcatctctcaagccatgttatgacatgttccccactagaaactgtgtcttagacagtaagggaaactcttcccatgccgtagactcaaaaccagaaccttaaactcatatactcatttctgagaatgtgtcttttccctgaaccatcaattctagctgcggtatttaatttattggcatactttatgtgctgaaaggataaacaaaaaaagatgtatatcatttcaattctaaaaaaatttagctatattcatggacttattccacatgatcagaacctaattaattaaaaagaatgcttaagatcaaaacccatctgatttcaacctccttccttattgaagaacctatagtgttgaaatgtcgagacaactatgacatgagacagactttacaggtgaaatgcaataaaacttcagatctaaatatgcatttggatgatgtacagaaatccagatatttgggcaagaaatgtctgtctcaaggcctctctcctctgggattcctggcagtttcatgctggaagggacgtcttagaggccatcgaattcaattctgtaattacgagaaaagatgcctggaagcaacctgcccaaggtcacagagcaggtcagagctgaactcaggactagaacccaggcctgtgcaggagctttgttaggggcggtgggcttcatggtgcaccactctcctggggctgtgccattggcatgcccacgaatcctggatcagttgcccatcaagttaagtaggggcctagttaaatcaggtcgcaccgagccgtacaatggagatgatgtcaggtaagagggatgacagagacagagtcatgggtgtttgcacccccaagggtagcggtgagacgtggacttactttctggagggaccctatctttgtgcgggcatccggacaggctgcggtgatgtgggtacagcccagttacgtggccggttccatcacacccgggggttggacacttgctctctttcttttctgttcttgagggatctaaaagcgacaacaggtgccaagagaataaatgtttaccaatcaaagacaaatgtgattatttcacaatctgaagaaaccttgctaaagaaagaaataaagcaggtgtcgggggctaggctgtgacatcagacttttgcttagatagttctttggttttgggtgacttttttcaaccttacacagtataatcatgaatcataaagtattttaatttttattctaaagaaaagaaaagcctacccctcaccttaactctgattcattattttcccgtgtgttacatgataagctgtgttgctcaaaggaatcaacgtaaatcgtgatgagacagtgaccttcttagagaacgaaattctgtgccatcatcattcagcaattttccatgaaattcaaccagagagtgtcattccattcaaaaactctttagctgaatttctttcttattgagtgctctgatcgcatacactagaagctgcaggattttactgacattgaaatttgctctccggaggtcaagtgacattgtttcgtagcacaccaattcagcgcttttctgaaaataaactgaactctcagaaggcactgtaagcaaatgaccaaaaaggtggaaagcccacctgacagaggtgacgggtaatcaacatgtttcagaagccacgggagcagccttttgttttgatttcttcatctgtacttggaaccagaggaaggctcgtagaatgccgtgcatgcatacacaaaattaagaagtaatgggtttctacagccctgtcggcttctctgcaagtaccagtcaagggcaaattagggcagagcttcggttaaaaaaaaattcaatactagaggccagaaatgtaatgatattgctaataaaattatttctatacccagaattgactacagttcataaatatgcaatataataacttcagataatatttctaaagtaaagctcagaccaaacagtaaatctaagtgtgcaaaacactgtatttttagccagtttttgaaaaccagttgctcagatcaccaacagatagcgattattattatttagtccagaaatgcaatagttaaattttctttagggattagttctttttgatattccattaatcaggccaatcatgattgctagaaaatacatgttttactttcagttaagaattcactttatatcaataaaagctggatttagaattttttgaacttttacggacttttcattcgttcaggtgaacttcaaatagacaaaggactagcaggaatagacaaatgccatcatgttcatataaaaacactccccttttcttttttagctagcatcttattctgcataatgtgcctctcctgtactggaaactcttaagccagcactggtgttgagggaaataccatttgtacaatcatccgttactttcctaccattatgtcaagaagaatctttgagaacaaatctaaaattatgtggttgtggcttcaatttctaattacattactgaaacttctcttacacctgcaaacaaaaatgcctagcactttattgccttttcagtaatttcataataatgttggtataaattactgtagatataaatcactacaaatataaagtagtaagtgcacagtaacagtttcaaaagaaatactgacaatcataaacttgagataagagattttgaactagatgtaaatggctagtggctggtgcaaaaaagtgtaaggtgtatctattattcgtccttaagtgaccctattttaccacgacacttaggattacctaacaaaatatatgacttcacagatatcgaaagtgttgtgaaattaagtagggatttgcatgaaaacaatgtggctccaaagcattttgggttttggaagacgacaagggtatagtctcctctcgatgcatgaggtcctggttgaggtggggtcatgctatttgccttcaccgttacctccccttggtttcttttctcttgcaatctcaaaagcaaacatacaagcaaacacaaaataaccaagcaagcaaagggaccaacaatttaaccaaacaccttttgcaacaacttacagaaaaaaaaagtgcgctgtttagcttgctcccttccctctgttagagcaggcaattgggtagatgacagaggaggtccatgatccaggccttttgcattagctcaagattttggaaatgttactcgttgataatttaaatcagtttgagaagattgtgtagaaatgagaatacaagtgttctctccatttttaataaaataacagagtgtctgaaaatagagcctgttgacatgctagtggttgcaggaattctctgttggctgtgttggtgagatagtaccacaattttagttttaatttaatttaatttaatattattttattttttgagacggagtctcgctctgtcccccaggctggagttcagtggcacaatctcggctcactgcaagctccgcctcccaggttcacgccattctcctgcctcagcctcccgagtagctgggactacaggcgcccaccaccacgcccggctgactttttgtatttttagtagagacagtgttagccaggatggtctcgatctcctgacctcgtgatccacccgcactatttttttaagggagtttctttgctccactttgttggccttgcttggctgcatgtatttggttctgaatataactacagacatctcgaaggacatttggaataatgtggaagacactgacagatacggaaatgagctttggtcagagcaggaagacctggaacagctgggtgagactggagtcaaggccttctgcttacaggaaagtccaaatctgcaacctttcctcccaagagggaaaaagcacatctcagttcttactgttcattcccacccaacccccatttatacaggggaagcaagcaccttgaattccattttcttgcaaacaaaacaaaacaacaaaacaaaaaacaaaacgagtcaaaatttgcataaagccgctgaacttaaagggaccaagaaaccaaagaagccaccgcaacacagaatttgcaaaaagctcaatctgccttctcttgacacagcacaccctccattacttcacgcccaaactccatcctcagatttaggatccgggagtctaaaacataagcctaagctcaatcagccttcccttgacacagcacacgctacattacttcatgcccaaactccatcctcagatctaggatctgggagtctaaaacataagcctaaaatatatttgtccaactgagcaatcacatgaaaagaagacactatttcttccccaaaataaaaatgtttcattcctgtatgattctcaaaaattcaactaaaaatttctaatagataattttagcccatcttgttaacgatgatggcactataattttaaacatgcatgctatgttccgtagtctttaaaatgcccaaatcaggcctgaagctctactgagctagagagtctactgattctctttcctctaaaaaacaatcccttcgctacataacaacactgcaacgggcaaagcttcaccttgcgactgaaacgctgtctgtgcccaggcacctgccgagagtccccgagcctctggctaaggtacctctacagtttgcatttggctgtagcgatgcctagcttgccgcagaaggtaggtgcacacattgagaggagaatacacgtctgtgccacagtgggaaaaagtgcagtttttctgattgcttgaaatttatacagcaactgattttcaagtaaattcctgaacctcactattgggttcgcagtgaggaaactcaggattcgtagtgaatagaatgtaataaaaaacataaaaggatcttttgggtgctaacatagagggatttaatgaactgccaatttcatgttttaaattgcttcttactgagttctaaaagaatattgtgatggagatatccacaaagtcaaggttatgcatgaggctgaattagaacctgcctcatattgaaagtggacaccgtcttctttacaaacatgaagacaatcattcaggttggagatacatatacacatgatctacttacatacatatagtatacatatatatgtaaagatagctaaatacattgacatatgcaaacatgtgcccacatatttcgtaaaagaaaactcagctcaaactatcatattggatagtttttgagtgttttataataaattaatatttgagaaaagcgccataactgtttccacaatggaatggaatcagttaaaaggaatgaatatcctaaagaaattgctattgatcttagctgaggccacaccatgccttgcatagcaaatggtttccattaccttactatcttaagataattaatgtgcagtcactgcccttatcttatgttatcggtcattcagttactgttcaatttctatcaggggtgttttctacgagggcagtttcatcaataactgtcacttgctgataattttacaaatcatgatgccatttccccaatccaatttataaaatgtgtgctttatctcggattgactaattgttacataaacccttgccactcagcatagattgtggttcatttataatagcacaggcttaccctaatattttctatcaagtgatgtgtctgtgctttacccctgtcttcccaaggaatgcatttcccactgaaatatcctactattcatctgctctagtaatatgatgttaagctgctttatgtatttctcagacaaatattttatttgcttgtcagaaacgtaatcacaaaatatccttctggaatcaactctaagaatgtgcagtagagacataattcagtgtgagtcacactttaactgtagactaccaccaacatcctttaccctagctcatgttttcatgaggcaacttacgttaggtagaaatattacctttaccatagtatggctttttgacatggctgtcactggatttaggctttctgtcctccccgggaagttgtctcggagactggtcctcatatgacctcatattgtccctcctcccagcttccatggccatcttctccctcatggcctttgctctttccgtttccaaagcgatggctttctccagcagggtcaggttccccttggtcatgtcgaacacctcttcagacctgtccgagttcacagaggtggtatcgtcgtcccgctcatgacacccatcctccttcgcacagctggcaaacactctcgaccgggggctcaactgctcctccagccgcatgaggttcagcatgtccgagtagtttctgtccggcgtccttccggggaagtcctcttctggccggacatgctgacggatgttcatgttctgctgcggattcctctcctgcgggttggtctcactgagcttcctggccaggtcgaagcactgattcctcaaacactccagactgctcagacacacctcctcatcgctctcctccaccatcttttccatgagtccgttgttcatgggcttccccaacatgacgtaattcatatttctactgtcttgctgcgacatgctgtctgcataatttctgtcattcatgttttctgagagcacaacaccgtgtccttgggctaatagtttaagggagtccactgtttctctaacaacatcactgtctaagtctaaactcaactcacttttccgacccaggttttcgtttttgtcactatcgtcttccagactattggaggtattgctgttcatttctgactcagtcctggcccggtaggctgcatcctcagcgattttgccgaggtttaacaatgacttggccaccagttcatcgtaattgtcatattcgtcattattgttatcatccttttctgtgtcttgcattattcgagtattgtgacaattcatttgatggtcttctgcaaagaaaataaaaaagacaaaaaagaaaagaaaaggaaaaagtggctagaactggaagcttagttgcaacagcatggatagcacgttaactgcaagtcaaaccgtctatcatctcacagaactgtaagtcccatttgcagctgggttgaaaaagttgacataaagaaaacggatgttgctaaaaagcagaaggccatttaaaatacttgttgtgaattattaatttctttaatggatcttaagataaaccagtcaatgtggcaaatatgattttaaaaattaattttgtatttttcatacatttcaagaatgacttattttctccattggcttgctttatctatagcctcgccagatgtgtattaactgtgctcctcacattactaggctttctaagagttcatgaactttacttgttgccaactctgaagcagatgtttgcagcaattgcttttaaatggtctattttcacagtggcgtgtaggcaacacagaggacagcctcaggttcctgagagtcaggcaggggtgccggctgcattgggagctcagattcataagcacatgttggggctgaattaagagttcttttgaatccataccttcaagacaatttatcatgatacacagtgaaacaacagaaattccatagtaaatgtttagacagtaaatctgattcctctgtctgtgtctccacaggtttgaaagtgagagagagagaaagcgtgcagcagccaaaggcctataaaaggcggggttgaggtaagttggtacagctactgcacagtgtttgactggacaggcagagctggcacattcctccatctcacagcctcaggaaaagcttggtgagcgggtataatgtgtgagtaagtgtcatgcttaatctcaaaaacgtatttagaaaaactctttaaaaagaccatgttaaaaattacataaaacccctatgttttatctcaaacatattctgtttcacactcaaagagcatttgggatttgtacctctaatcaccatgctaggtcattgcttccatgtacattgcaaaatatgagtaataataaaagggttcctaaatgtatctgtacccttagattagatttggttaactgcatgccattttcacatctgttctttgtttttatgattaaaaatccagagtaagaaaaatgtctaaagtttattaacaatttaaagaaatgaggtatattgacctctacaaaataccagtacactaaaaactgagatatgggggctctggtgttttctctatggattttatgcagaaaaggttggtggaaaaaagacttggagttcaatatgtcaataacagaaaataatatccttattatcccacgctgaaggaacaaatatttaagatctgacacacctttctaaacttcggcaaatcaaatttaccttttattagacatagagaatcgctaattgtgtgaaacaaatattgcccttcttctggataattcctataaatcatcttctttattataaggataaaagtattccccaagagcagcaaaaagaaagaaaatcaaactagtgaatgaatcagaaacattgtggaagtattaatctccaacataccccttgctataccctagtgtttaagcttttaggacttgaagtcaatcccattttaattaatatttggaaatattctcctctcaatttatgcactttgttatattcatgggctgtgattacagaagtttcctcagaataaccaagctgtgttacctctgcacaataggtaagttttaacagccagaatcactatgtctatgaagacccaaccacgagatgaatgataagctatgatttgaaaacaaaaaagcacaggccacatgttggagcattttgaaagttgagtcaaagaagaaaccacagtcaagcaacactattttcatgatgttctcctacatttcctttatggaactcattgtgtggtcctgaagaatttggaaaagaagcaagaccttgaaagtggtgaacaaggaaagaaaaagcctgtctaatcctccttgctgcttctacagccacaaaaagcctgcagggggaacaggtcctggttcccaccttatgaacttcctcaccttcctacaaatgtgttatgtacaacattggtcattctccacattccaaatctcaggattagcttcagtttgttcccccctacattctcccttcagcagcacgtagttaagaagtacatctcacctttttgataatcagacatttatctgtttctccactcaattcataagttaccttcccccgacaaaattaaaacaaaaatggacaagcctcttcacacagggtcacagccatgctgacgggtgaagctgagagcagccaaggagaaagtccctgaaccgtctggagaccggcagaacgcggaccacctccgatgcatctccagctttatactctaatcacaaagcacactgagggcacggttcgtcctcataccgcattgatatgaaattagaagttctacagctcggcgcccatcatgacttggctgctttctaattgtgtgatgctggtgacccaagtctccaagacttaattagctcagtggggatagtaaaacttcctggccctttgtcagatctcctacaagaaccatgtcacaggatatgcctcctaaagactgcagtttgctgtcttatcattggccccagagccgactgctggggagagcagcccgttggtagaagaaatctggaaacaggcagtggaaagcatattggcatctgagcacagagcctgccgtgtgcttctacccttcttcaaagttcctcctgctcagtgtcatctgagcctctcccagcggcagcaaatgtggggacggcgggtgaagatggcgtgggtggcctcaaagcctggcaggtgaatggaatttctcaagctaccggtatttaactcttttaaaacacatgtgaaatgaagtcagctcctaattatgtgggctcatggaggggaacagccagtcaatccatcaacaagcaggctctgaatccctgctgggcatcagcctcatctggaattcaaagtcattcacagtgagcttttgggattccctccctggttgtacacactcccttccaggtatgcttttctgaggctaataatgaaattagtcacatgatggcatgggctatgggaactagatcagaattttctgggccagtctggggttgaaaatgtgatacaaacaatccacaaaatgaacattccaacctcaaaaagcaggaggccattttactaggttttgtttttgtttttgttttttgagatggagtctcactctgtcatgcaggctagagtgcagtggtgcgatctgagctcactgcaacctttgcttcctgggttcaagcaattctcctgcttcagcctgctgagtagctgggactgcaggtgtgcaccaccatgtagagacaaggttttgccatgttggccaggctggtcttgaactcctgacctcaagtgatcctcctgcctcggcctcccaaagtgctgggattataggcatgagccactgagcctggcctccattttactagtttctatatagtgactattgttctatcaaatagggagaatgtatgtgtgataaaagagcaatttatcaggaaattatcttaaaggacaagtttatgttctaagtaaaaacacatatttagatggaggtttaaagagaagaacaaagcattctcagctccctttttttggttttctattttaaatctgtcatccagcaaagccacagagcaacagactctgagcaggagcctcctgtgagcgggggccagcctggggctgaccgctgggtggactcacagagttaccgcactggcacggaaatcagagaagagctggcccaactactccaggtgagaaaattgagcccagaagacagagcccattcagtggctgatctcatgggctcttcttccttcctatcagccagttattctacaaacctgacttctgttgcattacacatgagatttcaacacctccatgagtgagatttatgaaacgttttagggttgaattttatctcttttgagtcagattgttataaacaatttatgctccatagttacaattagaaaatgaaaacatcttcttaaacaaaagaaacgtggttgctgtgggccatttatcctccaccctcctcactagagtctggtagagtcagaactctggattacaactttatatacaggcttggcttcttagtgtctctccctaagatacacaacttttgattcctgcaacatctagtcctgattgagctactgttctttctggtcactgacacaggacccaggcaagtaaacgtacagctgaatagaaaacatagaggaagccacaggaggggactgtactccaaagcaaaaatcgccctagacttccccgggtcggaggagacctggtctgcaggtgcactccagtgagtttcaaataatgaaggaccactgctttctatggctttacagaggtggtgttttgttacataaataaatcaatatcaaaatatattttgacttataaatacagaaatatgacaatgcattcattctaatgaaaagatgatggtgttttaatagcaatcgcaatgataaggaaaaaaaaccaaaccacataaaccatctatatatttctttttgtttgtttgagacagggtctggctctgttgcccaggctggagtgcagtggcacaatcacagctcactgcagcctcattccccctggctcaagtgaccctcccgcctcagcttttgagtagctgggactacagtcatgtgtcaccacgcctggctaaattttgtattttttgtagagacagagtttcactgtgttgcccaggctcgtctcaaagtgatctgcctgcctcggcctcccatagtgctggaattacaggtgttagctactgcacctggtcataaatgtttcatataccacatttccttctgtgcagaggaaatgaagttggtgactacagaatagtctgactcacctgagtctggtcccctgatgaccctatgagaggcactggggcacctactgctccctctgaaaggtgacagtacagaaccacagaggctgacagtttaccccatcactcactgtgaaacagcagagctggagccacctggagttctgggtgtagcacagtcctgaacattccacagtgttgcctccacttccagagcaagcaggcctgcacagttctcaccccagggcctcccaggaggcacgttctacactagttagccagacatgcagcactttaatagtagagagtaacgccgctcccttctgcctcaccattcggaatgtttttgttgctatttttgcatttatcttccgagtttttttttctcctttcaatactctgcattgatttatggactgaaggcttggttgtatcaccaaccactcagagctgtgctggaactgccagcttagtgagcctgccatccaccaggatcctgatgagtggagtttgggtccattctgatgtggaaagaagattagaaaattaggaaaatccaggactccggactgatattcaggaagacactgggttcgccactccaggtgcctgggaagcctgagggatctgcatgggtaggagggtgggagacagttgagagccaggataaggatgtgcagggagggaactgggggtacaggacaggcctggaccccctgactcttatgcaggcagtggtcgcatgtttatgtggagcccctggctactcccctggccaggaccaggcggagaagcgtgagttcatttccctctcgcttcaaaggccccaggcgcatgctgagacactgcagtctctttcctttcataagaggggagaagtcactttcccagcccgggtggccttcagtcgggcacctctcctaggtgcggcgctgacctcggcgcccctcagctgccggcagcacaggacatggcctggctccgggatcagctattctcacttccagcacgagatccccgcacccctcctctgcctccctcatcctctactgccagtgaggcccttcactagaagacccctgaggcgccctctaactcagagccctgcagttcaacgcaggtgaaaggggaacatggagggtgacgcggcattgacagtgggatgcacgtgtcttccctgccaggccgcactgtccctggctccgctctagccatcaccgtcacgcttccctactacatctaactcagcagtgcttctgtgtgtcttatttccagtatcataggaaattttcagaatagtctgtccatatgcacagttcagtgatttctgagttaacagaggttaaaattctcccagcagaagctcccactagtcttattcatcttgagtatagattagcacagacattttctccagtgccggccattgccattttctttgaattttagtgctagatagaattattgagatcatgccttcaaaatttaatatgtgaagaaacttaggtcctgggagttgaagtcacctgcttgccattcatactccttccacagggacgagtctagaattgccatcttggttttgctacatctcaagcctttcctctacctttcaaaaccgggacatattcggagggtcacaacgcagtgtcatctctaagataattttctgagacataggaagatccgtgtttagcaggcattcatctgcttcgagtcagaaagacagatctcggcttcatgtcctgcatgctccctcagctggagagacaaggaggcccgcccgaaggcagctccactcaagaagaacccttcctcagacccctaatttgagtaagcgctcaggaaggacacagaactacagctggggatggaacggagggactgagttttgcactaagtgctacatgacacattccagatctcttcctcaatacctgtcacttgattggaaagcccacttctgggcgccccgattctttcactgaactgctggagtggcactatatcacggagcagagcggcacacctgcctctcaaggcacccctgtggtccctgtgggggccctctcttctctgataactcatttgcctcttttgctcaataaatgcagacataatctgattccaccttgatctccttttttctttctcttctaaaccacagggtgttttcctaccataacgacctccctgcaatcacaacgcttcaaatactggtgaggtacccacatcagatcctctgtgatggcacacacgccttgcccaggtcctgcgggcagaagcgtcggggctgctgggcacgaggagggcacagcgctgggctgctgggagctgtgagtacaggtgaggaggtatctgaattttgctttcagatactgataaaatactcaaagttgctcttaagagttgtttaaaatgaatgctgtctggaatatgatttccctattgcttataaaaatatttaggattgactggcatgtttttaaacttttaggttcgggggtccatgtgcaggtttgttttataggtaaacgcgtgttgcaggggtttgctgtacagattagttttcacccaggtcataagcataattccccaggatgtttgttttaacaaagaaaagcagaaatactacatcttagtaaccatcttcccgcactgcatacactgactagaggggccggaggacctgtggtttatgtgctgcattttgccactgttttttctgacttttggagattgtgcaggtccatggtcctgtctgcacacaccctgcatgtgggaaaatggcctgtcatggcctcgggtcctgctgagacagcagttcaccactcatcccttagagaggagaagggtggggccggcctgggggaaatctcccctcccaggttgggccttccctctgctcctcatctgccgtggcagacagagaagcagacacacctggagagattgataccagtgccagagaggatgcctagtgcgcactttgaatacctcacgtctgctgggccttgcagacacttcctccaccctcagcgatgcccatgtctgctgcgccttgcaagtacttcctccaccctcagcgatgcccacgtctgctgcgccttgcaagtacttcctccatcctcagcgatgcccacgtctgctgcgccttgcaagtacttcctccaccctcagcgatgcccacgtctgctgcgccttccaagtacttcctccaccctcagtgatgcccacgtctgctgggccttgcagggtctgtgtggtcgcttctttgttcttctgggtgctaattactggggagctggttttggtgcattatatgaaaattacccaaaatacactcccagccattttgtgtgtgttgttctctgtatggttatttctgggcctccgtctcattaccataaatgtctgtgcgttgaggagctcgacctacttatccaccaatagaagggattctctggactgaagtttgtttccctgtgcctttgcatcggctgctgtcttttgctttctgtctctgtaaatcaatctactccgtgcagcaggtgcaatgccttcctcaactccaggaaaggagcgtgcatcacctcactcctgtccacgccctcagtgcagggctcagggaacccaggaaggcacctgtccccccttcacacatacgtgaggatgccccactaagtcacatatttctaaagtcatctcggttcctgtcactgcccaaaagccttcttgacgaccgaaaggaagcatgcaggccagacactgcctacactcccatggccattgatggtgtgaggtaatagcagccttagagaggcactggctcaggttttggaagatcccccacagctgattaagctgcaacaacatgtctctcagaagaatgatcttacacagggaattgaggcacggaggaaaacgtctatttaagataggaggcatttatgaaattccatgagccatgtatttacctaggtgagatatggaggtgcctagatactttcatcaaactgaaaactgcaaagtctttggagagggcaatgtagcacaacccttttatcagatccaagagaaatgtaatgatcacaattttgcacaaccaagctctgctgggcatggcactggggggaggaggagggaactaacagaataatagttattcatttaacagctgtttattgtcacacttagagatgaacaatgaaccaaagaaacagaatccttgtagtcatggctgttccattgcagttggtgaaagaggtaaaaatagagagtaataaatactgtgatgccacatagtgacgtgtgttccacgaaaaatgaagcaaaatcaaaagacaacggacagtacgtgggatggggggtcgggcaagtcctcattgagaaggtgccacttgagcagagatctgaagaggtgggaaagtgagctatgccagggagagtgttctgggggaggaaagagagggtgccaaggcccagggttgtgtgcctgaagctccaggagcagtggagccacgtgctggtggagtgtgctggaagggcaggtggagggctgggaggttgaggctgggacacaccaacttggcatcaagacacaaccctggatgccttctgctgaagccagggaagcctgggccaaccacatgcacagtctaaaggagaacaatggcaccagcaggcagaagccaggttgcctgtgtcagcgtgcctgggaggctccctggaggctcacggaggacctctgagtgacacactcttcacacctcacactgttctcatcatcctgtggatgaagggatggatctgaggaggagttcaaggtcatatggctaggacatacatctaggaatccaactcatgttggtctaatggaccaggcagcttccacagcccccaccgagatgacagggcccttctgcagagaacccaggtgagagctcagagagccacggaaattaccccagggctcccaggtgatagagaagacctggtccctaggtatctctgtttctactcggaggaagttcaggcgacacagattctagccccaaaatggaagaaataccacctaggctgaggaaaacacaacttgggccagaaaaaaacgcagaggggtgaggatgccttggcttcaagttgttaatgtcgcttcactttgaacactgaacaaaaatttattttctgaattcttccgaagactgaacaattttggattcaaagaaagaggaacccagtggcttaatgtgtaagggaagttttttctgaagtgatttgcctcatccaaagactggaacagatcacaggagactgtggtgcgtgtggctcttcaagcacacgtgtgtgcatgtttagatggggtttctggagcatcaggagaagagactgcactgagctcagtggcaacaggcccaggacagggtgcccagtgcccaggtgtgctatagaaggtgacaggacattctgtgtggacactgcctagcacagtgccatgagccacataggccaacccacatgcgattggtgtggcgaggaagtgaatttttaacattattcagttgtaatgaatttaacttatttacatttaaataaacacattggtctagggtttgccatgttggccagcatggatgcagaggtggaagttcagagggagctgggctctaattttgatttttttttttttttttttttttgagatggagtcttgctctgtcgcccaggctggagtgcagtggtgcgatctcggctcactgcaagctccgcctcccaggttcacgccatgctcctgcctcagcctctggagtagctgggactacaggcacccgccaccacgcctggctaattttttgtatttttagtagagacggggtttcatcgtgttagccaggatggtctcgatctcctgacctcgtgatcctcccgccttggcctccaaagtgctgggattacaggcgtgggccacagccccccgcctgattttgatttttataacatatatatatatatatacaacctcatatatgtaatttatagatatgtattcatatgacatgtattttctataaacggcccaccagcagagcagcacacatgtgggacagcgctttcatgttcttgtgtgctacagtgatttcaatgctgtcctttctatgagctaaaaggtgaatgcatgaagtctcatttatttataaagctttgagggtctttttatttgatgacattttaggtatctggcttacataaattaagggattaaaaaaataagagtcacattcttccacccagagaatgagctgtttggagtcaacagctactcagatagagacagactgaaacattcgaacgaattacaccactgtctctgtctctctgtctgtctcattctctctttctctctctcttccccctaccccctgtctctgtcatgtacacacacacacacacacacacacacacacacacacacacacaggcacaggtcaaagactttctggatcagttggatgaccgtgaagactccctgtccccagagtgattgcttttattgtcagtgctcggaacccggggagcagagataagactgtgaaaattctggttcttctgttttccagaatgggtttgagacacaggtggctgctcacataaatgtgctagattgggagggaaattgagaggacatcagggttccttctctttgtctctagtcttccatatttcatccgtgtcaaagagaagactctgatctgcttcggcagagcttgcagagacaacatgaccactttcttagcaatctgaagtttagtgagcctcagtattcagaaatgtatgtttttattttcaaatcaaatacttaaagcctccacctcagtttatgacttctaattctgccccctgtaaagaaccatgctttgtattttttatatacacacctcttccatactgtattatgtatttcttccagaaaatggtgactctgtttagttttgtgtctgcatgcaacccagtgcccttctgggcacagagaaaaaaaacacaccgtgttttgaaatgagctgtcatgatattctgaatcttttaaactcttgcagccttaatatacatgatatacttgctgcgtgtggggagggggtcatggatgttaggttcagggttacagaagagcatgaataaatgggtgggagcataatatcatattgaaattgtccttaatcacaattgtgatgttatggttctgaactgcttcccatctctcaatcgtttttatattctgcaacttctttaagcttcaaaataagacagcgaagtgaaggaagggcacgtactattatcctaatcttaagtgaaactgaggtccagtgaagctaggtgactcgcttaggacatgtgacacagccagagctggaaacacacctcattcctcaactccatctacccgtggataaaccagaacttggaatgaaacctaaattcacaaggcatagcagataaactgttattttcttagagtggactttataagcaaattgaacagaaacatattcgaccccactatcttacattttctgttttcattatcatgctaaaaggagtttccccaggactttatgcatccacctgcatcttttttttgtttttcaagatggagttttgctcttgtcacccaggctggagtgcaaggctgtgatctcggctcacagcaacctccgcctcccaagtaggttcaagcaattattctgcctcagcctcccaagtagctgggattgcaggcatgtgccaccacacccggctaatttttgtatttttagtagagacagggttttggcctgttggccaagctggtctcaaactcctgacctcaggtgatctgtccccctcagcctcccaaagtgctgggattacaggcgtgagccaccacacccgtcctctacctgcatcttaaatgtacatggcatgatatttacagccagatttttgctttgtatcaaagtacctgaaggtttatgaaaaataggataaattatatttctataatttagcacagtttgcatgaagagagtttaggttttttaaaatcatatattgacacctaaaaatgtctaattctatgattactcattcccaagatgcagtgccatgtacttcaacgtagctgcacatgccatgtcctaaaaatgcctccgtggatgcagggagaggttagttttaagatgataccaaatcatcatattctttctcccaactgtgtccacagtcttcctctggttgaagcctcgcataccaaacatatgatctttgtttctatgttggtctcagaactcattgccttttctgctgactgcagtgaaaactggttggctaattctgcttttcacagtctgtctgcgtttcaacttgctttcctcatcagggatatttccctgagaaagacaggagaggataattggctaatcaatatggagaatggtgtcctgcagggaagctggggagttcagaggccacacagcagacccctcaccccctccatgctgtcctcctgtgaaaactcaagcctatgaaaatttgtcttccacaaataccaggatgctctagcaacttggggctagcacctcatcctgtttgaaagaaaacacaccctgggaactttaccatgagaaaagaaatgtttctgtgagaaggaatttttatagcatgagttctgccttgaattccctttaaaaaagaaggtggggagtggaaacaccccgttagaaaattgtcccatgcacaggactgatttacagtgaggacagagcctgatactagaatggaacaggcacagattactggccatggtgatcccacagctggctgaagagtcagggcacactcctccaacaaaagcagcccctgcttcctgttcgactcccctgacccccacatcgactctgcctcagggcggcctccatgccttgcccagagcagctgcagccatcatttcgcacatcaagaagttcctaacgtccgcggccatcagatcgcacatcaagaaggtcctaatgtctgcagccatcagatcgcacagcgagaaggccctaatgtccgcggccatcagatcgcacagcgagaaagccctaacgtctgcggccatcagatcgtacatcgagaaggccctaacgtccgcagccatcagatcgtacgtcgagaaggccctaacgtccgcggccatcagattgcacatcgagaaggccctaatgtccgcagccatcagatcgcacagtgagaaggccctaatgtccacagccatcagatcgcaagtcgagaaggccctaatgtccacagccatcagatcgcacactgagaaggccctaacatccgcggccatcagatcgcacatcgagaaggccctaatgtccacagccatcagatcacaagtcgagaaggccctaacgtccacagccatcagatggcaagtcgagaaggccctaatgtccgcggccatcagatcgcacgtggagaaggccctaaggtgaccacacagatttcctctcaagcagcccctcctcctcagaggccagcagcccaggacaccaccgcacacctttgggtcactgatctggagaacgcgatacaggaagccaggaagactttagaaaaggaagacacctgcgtgtcaccggatttagccccgtgatcaagtggcaaggcagccctgagattcagtaaagagtaatgaagaaagaacctcatatattctccaaagtattccagaaacagagcatttaaagcaacatctatgtgctaaaggcagctgcacacacgcaagctttctttagtctagaaagcacattgctaggctcttcctcaggaaatgctgattcctgtctaagggaagatgcaatgtctgctataaagaatatatgtatgtgtgtgtatacattgatttagagatattttagtggactggagtatgaacataaaccataccttgctaggtattatatatccatttactatatatttctcaaatcacatgaatccaaaaaatatttatcataacataaaaagatctgataatagaaaaatctatggccattgaacaataactttcttaactttaggataacaaggggatttttaattggtgcagacttagactgtaatgatgtattctgaaaacaaaattcttcatgcaaaagaccagcctatggtaggtctacgtataataaatataactttgcttaattaaatatgaacttaatctgaaatgagtttctcaggtattatcccctgttgttcaaataagcagaaggtgatcaggagaacacgagttccattacaaggaaaaccatgcaaagtgtttgattacctatcccccacctacagaaaataatataatcttaattagcctcagtttctaatttgtatgatgagagtaaaagagcttctgccctacccatcttatgcaatcaatgtgaagatcaaattcaataatgtgattaaatatgcctattggaaacttacattattaggactattttgattcatataagcaacaatgctggaggatccttgaaattaaaataaatacttaatcttaaattataaacaatagtccttctataacctgtgggttcctattgtaataatctgggggtttgtatacatttgttttatctgaaacaaaacctcttagtaaagtccacatttcagtttactatagaggtgaaaatacccgactggatgaacaaataatggcatccagccgggataaatcgcctgagactttctctctactcgcaaggctgaggccagcatgaccttgtcccagcagttccgtcacgacgccctggtttctgcactcagacggccaccctgtgccacgcaggatgggcgcgggagtcacactccgctctgtgctctggccacgtggcttccttttaatctcaggtctcgtctgtgcttctctgtgttagaaaaggagcacaatcaactgcaggggaatcggttgctggcccagggacatagcagtcactaagagtgtcacccaaggaacatgaaaggccagcctcgggatgctgacccagaactccagcgatcagaggaatgggaccccccagcttttagggagtgcatggtttctgccaagccactggaagggaggacaaaaggacgtctctggtaggcaccgtatggaatctcccgtacttacgctgcacatctcacattaaagatgctgctgtcatggcagacatttacatttgttgatagtgattttggcactacatttaacagtgaggtaacaagtgagtaacgtgctcaacaagtgagaacattcaaacaggagatgggctgatgtatgcctttcaaagcctccttttaatacattaaacgtaactaggagtttgatcacgtaaaatgactgttctatcaacagttatcctgttcctttgatatagaagctgcttggagatttctgaccctgatggggtataagagactagaagatattccatccagctggagtacctgcaggtgacgttggctaaatggggtgttgaaacacccacgtggggctcctccaatggagacgtccttctcccagagaaagccttcgtgagcgtgtctccaggagtcaggcctctcaggtgattatgtcttaggagaaatgcatttgtttgccttagaaatcaaacaagccttcggtgtccctccagagaatctgtggcaatggaaacctggtggaagggccccgcaagggcatgcaaatgctgttgtttctaagtggctgcctgggatctgggattctcatgagaggctctctgaaagggagtggagtatcacgctctactgccaggatgctcagtaaactgggtgcacctgtctcacactggtagcaggtaggttatctctcaacatctccctgtggctgcaccctgccaggatgttcagtaaactgggtgcacctgtctcacactgctagcaggtaggttatctctcaacatctccctgtggctgcaccctgccaggatgctcagtaaactgggtgcacctgtctcacactggtagcaggtaggttatctcacaacatctcactgtggctgcaccctgccaggatgcttagtaaactgggtgcacctgtctcacactgctagcaggtaggttatctcacaacatctctctgtggctgcaccctgccaggatgctcagtaaactgggtgcacctgtctcacactggtagcaggtaggttatctctcaacatctccctgtggctgcaccctgccaggatgctcagtaaactgggtgcacctgtctcacactgctagcaggtaggttatctctcaacatctccctgtggctgcaccttcctgagtagctcacttgattcctttaaaagtcctgtcataggtgataatagaagttatttccttagggagccagctgctgaacatgaattctgaaaccaggcaccccacaattaactatgaattctttcatggtcctgctacctcttcacaagtgtttgctttcagcacctcctgtcttccgtgctctggactcagcatttgctgaccacatgagtggtgggcaccatgccaggtctggccgcagagttagaaatcctgggtcctgaggcacgatcagccagtcgctcctttggcggtgctgtcacacatccactgggtgcccatttacttgcatttttctggcaaaaatgtctttaattctagtttgctttccagcgtttaaaaacaattatatcctaagtgttcaagtgagaatagacaaaccctatgcagtcacattctaaagctatttcaataaggcttctgactacctttcaaagtacatcactttttatttttaaagaaatatttacatttgaccataaataaactaaaattgaatttttaattctagaaaatgaagagcaaaacttaaaacctggttaaggcccctggtgtaaacgatacctatttacagatttcctatcttaatccgtcgcaccaaacatgaatgcctcctgctttccaaacgggtgagaacgtgaaagagccacattgtataccatctttctagtaagccctgggcaagttacaaatcattaatcagcctccacaattaatgagtcactcaaaatgacactcacttaatacagtgtccagaaataatttgccaggttgatctactttccaaatattttactacacaaatctattattttaattcttagcatctcatgaatgacactggtgccttgtgtccctggtagatttaatagcgatgatggtaagtctgttgataggtgttctgataggccttctctacccagcattctaccatagcgagacaaaaaatcttgggagactaattttaatttatgtaatgcatgtgtgtgtgcatatgcatctatgtgtatatacatatctatctatgtgtgtgtacatatgcatctatgtgtatatatacatatctatctatgttctgtatatctatctgtgcctgtgtatatatgtacatgtaagtaagtgatggattgtttgcataggaatcttaagccactgtaacaatctaggattatttcataaaattcaggtttcctagtacaaactcctctgacttctgaaggaggagtggtaatttaagcctgcacatgagattagcaacaagcaactcacatctccctgatgtatggaggccctacccactggctgaaacaactaccctttgtgtccagaaattagttctcctggtaatcagattcttgaagaacttttgagcccaagggagaggggcaagaaagaaaattcccttcacttacaacatgtttgggcatttctatgaggaaaaccctaagccaataaagatgatagctaggctttgcaaaaaaacaaacaagcaaacaaacaaacaaaaccacaaaactcccacctctttcctcagaagaaatgacttctatgaaagggttagttctgaagtggtattgtgcgtcggatagtaacagaacactggacatgaaagccatgtcaccgtaaacgcactgccgggaacattcccaacacacagcatggcggccttctccctggcatgtctcagagcaccggaaaccccagatcagaaacagctctcacatatggaagcagatgaccggctgattatcttgtagcaatactacttcctttcatcccaattatgtgaccatcactcaagcaaagctttggcaatctacagacaaaacccactttgctggttgatgtaccagtcattaggcaggacttccaactcccctgaggaggtacctgggctaagccattccaacaacactgttttgccctttgcccaatcattgtatctcatggatacagcattcaggaaaatgtaaaattaaagaccaggtcggctaacttaacttccttgatacattttgttaagctaatcaaaaaagtacaccataaatatctcagtaaattactgacaaccaaactgaataaaaattagactgacataaaatctgaagtgtaacagagaatctgaagaattctttaacagaagtgttcagttcatataagaggttaattttctcagtattgaccaagaagaacaatttctttatatgccagtcattcgtagtaacagccggcaattcaccttgaacagtggacccaaatcacgacttgttactttgctaatattttaaagattaccgttttcttcttcctcttcctcctcctcctcctcctcctcttcctcttcttcatcctccacatcttctccatcctcgtcatcgtcctcatcctcctcctcgatctcctcctcctcctcccggtccccctcctcgtcctcctcgtcctcatcccctggctcatcattgtcctcggagtactcctccccctcatcctcctccttctcatccatgtcctcagtcccatcactgtcgtcacactcatccactgaggagctgtctgctttcacggcaaatggctttcgtttaggagcaggttcctggggctgtttatcttgtgtttttctttttttcgccaagggacaaccatatacactaattaaaaaaatagagaaggcaggggagagagagaaaaaaaatatctgtgttactgtcttttaaaatcagaccaatgggggccttgatcaaggtacttaaaggcttatcatgaatgtcatcagcacaaacaccagagagacataacatacatgttccccgaagtgtgctgaaatctgttaatgaagtgatagtgcaaataaataccgctcacatttgtctagttaccattcacatttagtccaagtctcctagttcctcgttcctataattccagagatcctacgaaaattcatgagattggtttgcataatgtgtataacatgtaattgacaatacaaatttatgaaacattttaccaaatatatactatgtataatatacatctgaagcaagatttattttaatcacattatatttacatatatatttatgtaaaatataaaaatgtctatgtcgtgaaagagctttggatatatttggatttgtatattttatggattaaattatatctttagacttgataacctcctgaaacaagatgagccctagggcttgtcaatgttgtatgaaagcaactgcatcattcaaagttctgcagaacttcctcagtcttagatgttattagtcccacgccagcattccagaaaacaacttcagtgttagcggtaatcaccactaaatcacgctgaaattggcccaggcttggatgagacccttccttacagcagaagctcacaatctttccttgagaaacaacgattttcttttttttattattattatactttaagttccagggtacatgtgcacaacatgcaggtttgttacatatgtatatgtgtgccatgttggtatattacattagatatatctcctaatgctatccctccccgcttccccgaccccacgacaggccccagtgtgtgattttccccatcctgtttccaagtgttctcattgagaaagaatgattttcaaagctacattacaaattcacttttgttgtagaaataatatatatactacaaaaaaataggtgggttaggggagacatagaggcaaactaccgcaggcaaatactccatttatgcagaacgagatgtgtggcctctctcattggcccattattctgcagggtgagatgtgtggcctctctcactggcccattattctgcagggtgagaggtgtggcctctctcactggcccattattctgcaggggggctcctgcacaccttgactagcttggctttggatctggggtagtgaatgatcattcagtcatgaccctgaccagtgtgtactatttgggcaactcctctattttgggtcatgggctatgctggagttcagagatgagtggcacagatcttcacaccaaggctttatgctctaacaagggatttagacaagtcacaaataccattttagaacctctcactcctgtgtacaccatgcaccaaacacctggcatgtcatagacactcaataggcatttgcggaatgaaaggatgaagtgtgataaatcccataatgaaaacgtgcagagggctctatgtcctgtacacagagggcaggcatgcacgggtgctagcaaggctttcaggaagaggtgaggctgctgatgagctttcacagatatgtaaaggatgtctgggagggaaacaaagcatttcaatacatcccaattaaaacaatctgcgaaagacatgaacatatgtaagaacaccaggggctcagaaaactaaaacaaaagcaaaccccaaaggctggagcatagagcggggctgggccaggaggtggaggtcagagtggagagtccggcggggtccaatcaacttcgtggatgaatgatgggactctggattttgacccaggaaacagggagtgatacgagttctttcaagcactcaataatgcaattaaaatgcatgttggataggtgcgaagcggaggacagaagagaggaggtgcaggctagagatgcggggagcagaagacagccagcgccatgttcaggtggggactgggatgagaaagtgagctgaggagggtgcccagatcatgagacagatgagagaggccaggaggaccaagggccgtgagggagctccttggtacagtcagaccctgggtgagaaggtgctgggagagagcgtgagagcaggacacagtgtgtgtggaccaggaggagcttgcattgcccatggcaggtcttgttggtcaactgactttggacagatgttcaaccttatacattaacatcatcagctgtaaagtcagaaaaatgctaatctcacatggctgcattaaggatgaaatgaaaaaatatatatatatgtaaagaggttagtactgaatctggcacctgctaggtactccatgaatgataggaactgctgtgtaatagtgataataacaagaaacttttgctattttttatttttattcaggtatccaattatccaacaaacatgtcgctccttaaagttttggaaactaatgattgtcctgtttgtttcttctatcaatacttctaaaacgatttagaccaattgcactagcgaaagggaagagaaacaattttatgtttcttaggaagccagtttttcttgataggttgtggtttgtggcctgttaggaactgggccacacagcaggagggggcggcaggcaagcgagcgaagcttcttctgtatttacagctgctccctattgctcgcatgaccacctgagctctgcctcctgtcagatcagcagccacatcagattctcatgggagcttgaaccctactgagaactgagaactgtgtatgtgagggatgtaggttgtgtgctccttatgagaatctaatgcctgatgatctgtcactgtctcccatcacacccagatgggaccatctagttgcagaaaaacaagctcccactgattctacattatggtgagttgtaaacttatttcatcatatattacactgtagtaataaaaataaagtgcacaaaaaatataatgcacttgaattacatcctctccacccccaaaccatggaaaagctgtcttccatgaaactggtccctggtgccagaaaggatggggaccgctgcccaggaagacacaagcatggggtaggggcaagagctgagggacttcattgccaccttgctgcgtgactcagggagtcccttcatcaatttggatgccactttttaagtctgtaagatgagggcagttagatgacttctaagtctctatcagccctgaaacactagggtgaaacgttatcatcccttaaaaacataataagcaaaacaagaataacaattttaatcaccagataattcaagaaaaaaaattcatctatagtctacataacatttcaaatatgaaataaacagatttctgggattccttttatattttcatttgtgaggggataatctgagataataatctcagagccagccacaccttcatgctgaatcaccaccggacaacctgtcaagtctaagcccaacaccaaccaacctcctcgcagggccacctgtatctgagtagacttgttctggtggataccttctgtgtttgttcagttagcagataatagatgcagctgtgcacggatggctcctccagagcctgcccttggtgtcgcgggtcataatgaccggagcttttcccagcttccttctccttcatcagtgcatcaatatgtttgtctgacacagtctgttctgcactgaggccacctgcacagcaccattcactaaaacagataactaggcccaccgtgaccatctatgagtcccgattgctgggaagtgatgtcaccccacttggcttggtgctattcagtgaggtgactgggggtaaggtggggctcctgtttcattttctccctgctcattcacacgcacagccgccctccttttcaagatggctcacttgttgttcagactgtgcgatgttggccccatgaggtttagaggaggggagtggagattttccttagaatggatgctgcagttagaagtgagcacaactgggcttcactcatgatcacctgggacagctgagagtttggaggacaatgtatccggctaggaggacgtttgagaggatggggtctgggccgtagggcattgctgtggtgggtgtctgagtcccaaccttggagaacatgtctgggccatcgaggcgtgggaggcgggctgcctcctgctcacatgtcctctgaactcccctgcacctgcagctggctggctcccttgcagagggcccgcccactttcattgcttttccatctcctggcagctgccatggctcctactccattagaacttgctgggcatgggaaggtagtggaggaagagggacaataaataagcaagagtagaaaaaaaatagttgatcaagatagttggagaaggtgagtgtgtgtggaaagtcaagtacacatggaaaagaaaagtgaggagttcatctggtctctgccaggacaatattggtataatcctatcaagcagggtttggtttaatatgtgaaacatttcacaaacagcctgagcgtatccagggtggtgatgtgtagagcacaccacacgaccaagggcgtgagctccaggcttggtgttgttaacacctctttgagcacccggactccggctgggccttagtttacctatcgatgtgatagaagcgtcggctgttcctttactctctaaagctttacatgttttaaatttcctaaatgattcccttcccgtggtgggaactttctgatgaagtgtacgtttcagtaccttctagtcttctattttcacttgaattggttttactttcctatccctacattttgcaagctcttggattcagcgtagcaacttttggaatcatctggcgtcaaacttccagtgcttcctgccatttgacatggttcattgctcacgatttgctctctatttgttaatgtaaagcgtgaatacagtcgtatccccaactacaaacaagtaccctctgtcccttctctctctgatccattctcctactgcagttcctggtatctacttccatggtggcaacacattcaaccaccaggcacattccattacatctgtgttcaactccacgtggctcgaggccctgcttaaatcaacacagccctcttggtctccaaaggtttagaatatttcaaatggaggccttggaaagcaattctgggacatgagtttggggagtgtgtatcctcctgccctcgtattctgtgaacagcgtgtctgctgatggggcggtgatctggaaagagaggaggatgtgggggcactggtggtgccgcccagcaacaccagtgaagggctcagcccaggacctcagctcaccctgtcagtgcctcagagatgctgtgcactctggtcacctccatggctccgcagctggctactgcaaacctctgaggcacaaaggcagccctttgtatttgaacatcattctgcaagactgagttcaacatccacaatgcactgacagaatgatgtttactcacatatcctctcctagatttatatctctttttatgatataaatctaaaaagatatttttatatctttaggatatttttaggatgatgatattttaagattccaaaaataatgcactgtctcttttttcacacagttgaaacttcaaagaagtcgtaaatatgatcactagtaagatcacggtagctcaatagttctctgttgacaaaatacccctcccgtcatttttccagagtgtgtccataacatgattctcaatgcagaagcaaggcagggaagctagcagtggccacatctcacagaaaaccatgctgtcttatccttggacttctcacaattcagcagcagccagcgacaggagtggaagtccaagacactttgggtagagtgaaaaggcaaacgcatgctggattagaaatgagaaaacctggcctttccatgttttcaccctatttaggttacgcagggttacacatggaggcctggcatcccgtcacccccaccccctccaagccagcctgggccatgcctcctgggcccatgcggatgcctcacgatgtctttttgctgttgtagctttcacagttcttttgtggttaactcggtgtcaacaacttccagttttttgcatctggttattctagaaaccagttgctggccatggctttccctcacaaactcatacacatacaacattatgtagtgcattctcgcacttccatgtcatgtataaaggtcttttattgaatgttttgtttatccaattttaatataaacagggataaggtctcaagtaactgaaaaccaaacttggcagcgtgtgctctgctcccaactgctgttatcaccgccgtggagagaggaacgaggtgagggtgggaagtgtcctgtgcgtgggcctctcccaccagagagcggggctcggaacgtcagggtgattgaccagtcggctcagaggcctgacagtgattccccacaaccacctcttttagagatggtatttttcttgtattgcttgaatagcctccattgggtcaatgttaaaacacttattttggaataatttttaacatatttaaactgcatttgaatataattctggagcaccggttttcaaccagctcagttaataccagcactgcttagaaagtgcttcctgtgtgcttggcactttctaaaatctctatatacacaaattcattaaaccctctcggtgaccctgtgatgtagattctgctgtaattcctaactttgagggacagagattttttgagtcacttgtgtaaaatcacagagctgagtaacagtggaggaggtttgcaaaccccttctccatgtcctgattttctgatctctgaagggggatattaatccaaccctgtttcttattgggccatggtaaggatctcactaaataagaatatctatttttccctaatgcctgttacatagtaagaaggtgccacataaatatgtgctgagtgaatacattgcatgattgatttattcctttatttggaaagcatgtcactgagcaatacagacctactcccaacctcatgggacaccgagacacagttaccctgccagagaggacagaggaggcttcacaggggaccaagatgggtgtgggacagggagtgagactgagacagagacacagacacagagacacagacagttaccctgccagagaggacagaggaggcttcacaggggaccaagatggatgtgggacagggaggagactgagacagagacacagagagatgcagagagacagagggacccagagggcgagttcagggaggctgcatgggcaggaggtggtcagaggctggaggtgtgagggtgcaggcagtcagggcctcccaggtgctgttcctcctaggagccgtgggagctccggacagtgtagacagtgggattacttctacacagttgactcaagcctgcaaaaccatcactgtggctgtggtgtgagaatgaggtggaggaaaggagagctagatggtggaaggtcatttaaggagcaatgtcaggtcataggttggcctgggaaggtacaggtaggacatgcaggagtgaggtgaggggatacatgtgggacgcggcctggttgccagctcaggtaactggcaggtggaggtgtgtgcactggtacggaagacacgggagactcaggtctttgctggcttggttttggttgggaacagaggcttacaggtgattctctataatctcttctttttcagatgcagaaataccatacttctctgtggttgctaaatttgaggtgtctcagcttaggtgacctctagaagggctgaagtgttggtttggggcagtcagtgggtggatgttgtagacatggtggggaaagaggcagtttcctgggaagagtgagggctccaccctgaacccttagggacacaggggtttggggactggggagggaagaaggggccagcagaggggacagagatgaagaggtcaggggatgggtccagggagcatgaggctggcccaggagacacaacccacagaccctcagtcatatccacaggaaacagagaacatgggctagcccaggagacacaaccacagaccttcggtcacatccacaggaaagagagaaggctggggtcatcacccagatctgagtggtccatgaacagcaaccagagccacgtaaatgttagtaatatcagcacaaggtctgtgcacctcaccaagtcgctccaggatctgcccctgtttaaccgcgggagatgtatttacctcagcctcagtctatccatctgtgagatgaagggtagtgcccatgctacacacttagggcagcacacgaaaaacagtccacatgaaacacccaacgactagcaagcgggggtgcttcccaaatctgagttctccttttcttatttcctttctcatgtcttaagaacagttgatatcctttctcaccactagccctttaaagcgttactcttatacgtttctagaatacataaaagcacttaaaaagatgtcagaaatagttgaaatcattgaactatgcaattaaataactagcatttccaaccaaacgtatatactaataaaaccaattcagttttaactacatacttccttccttttaaaatattacattaaatatattttaacattttttaaagttattttttctctgtattgttacaaaggcatagctgatttgaaaactatgtattttcttaaacttgacagacacgttctatacatgaaaaacattcaacaaataattgtttaaaatgtttacttgaacctcttagggaatttaaaaataatctcagtttctggaatgcagggagttgtttttttatctttttaaagtcactttaaatgatgtagccagttattaaatatttattgtcttgaatagtaattcaagattcaaataaagttacaataatcactaaatttaatctctttcaattccagaacactagttcttttgaactcaataatgagagtaaaggtacctctcgggctttgaccatttgtcaatgcatgtggacgcgcatcttggaggtagataaagtgcaaatgggaggctcgcatgcacgttttccaaaccagctttccaggagacgtggttctccgacagctgggattgtttcttatatgtctattttttcttcttggaattccagttcccaattcccaagtgtgcctctgttcctttaaagctgaaagacttgaactaatgcgaacccttgtgtgccacggcacaccacccccagccatcagcaccaacaatgctcctttgtcctccttccttcctttcttccttcccttccctccttccttcccttccctccttccttcccttccctcccttccctccttccctcccttccctcctttcctcccttccctccttctctccctccctcccttcctctctccctccctccttcccttacctttgccttcccttacctccttctttcccttccctccttccttcccttccctccttctttcccttcctctcccttccttcccttccctccttccttcccttccctccttcctccctccctccctccctccttccttcctttctctttctttcttttcttttcttttccttccttccttccttcctctttcctctttccttccacccacctccacaggctcaggtgatcctctcacctcagcctacagagtagctaggaccacagggatatactaccaagctcagctaatttttgtattttttgtagagatggagttttgccatgttgcctaggctggtcttgaactcctgggctcaagtgatccatctgccttggcctcccaaagtgctggtattacaggcatgggccaccacgcccagcgtctacttaatttttaagaagttaaactatttggtcacccctttgctgtagcatgtgagattccactgcgtgtccacagtcacccttcacaactgttgcccattttccatcattctcatcccacagctctatgctcatttatgattcttcttgctggaattttctctcctactgatcctttaagacccatctcaagttcccccttctccatcatgtcattcctgctcatcctggaattcagggtcatgtgttgttagcaactctgtgtcgctagacatttaccatctaagtgtcaaccacctcgcgttgctcttgattttccatgtgtgcttatcttattgtctcaatttagctgttttctttttggttttagaggctttgccatctaattaattattccaagtcccattgtgcgaagcaaaggggtgggtgttcagtacctctgtttccacggactgagtggattgactggtctgccagtgcttcggtgtgtttctatcagcatctgcttttcacgaaatcatactgcctcttttctgccaaaacagaactcaccacccttgccacttgcaagactagaatgttgataatgttaccacagaagtattctaaccacctacctcatggcagtgagattggccaactaagctgctgtatgaatatattcaggttaccagggtgctctttaagtgatgttccattttagtgaaaaacctgagaaggttgacggggctccctggagtgtccagtttgctacaagctagtgagtgggactctacttactagtgcaacaccctcaggacaggagaaatctggtggagggagaaagcttgaaaatcacttaatccatcttttcacctagaaaataaagtggcatgcacaaagtcaaagcctcaggttgtacagagctagacgttccaccctctaagcaagcacctcccctgccaggccaacacaaacgctgaagtcaccgtgagtcagaaaacatacggcaaacgcgaggctgcgtagccactgctgctggcactcactgcccgttagatgctccagccatggccactgcccatttgacgccccagccacagtcacgtagaataacgtgtccagagaggatattgccgaaaacaaacaccacacgtgcagtcagtccatcccaatgacattttcagtgttgtctttgtgaccatgcatacgtccacaccagtgctctacatcaggaaggtgctaggacacactgaacgtcagcacagcagcacagacgatgggcctgcatttagtgcagttgtgaagagattctctgcttggtgtgctgtgttcacagcaaccaccgggacaacatcagcagcaagtggctgttccactttccactgtcaggggtcctcaaagactcatgggatagcactggtgccattctcttttccagggacccctgaagttacagcagtactaccaccttgaatgatagtaattacaattgatttgaaaaagtgagaaacaagctttataaaaatgtatgattctggctgagtgcagtggctcactcctgtaatcccagcactttgggaggccgagatgggtggatcacctgaggtcagatgtttgagaccagccaggccaaacatggtgaaaccctgtctctacttaataaaaaaagaaagaaagaaagagaaagtgagagagagaaagagaaaaagagagagagagaaagaaagaaaagaaagaaagaaagaaagaaaaaaagttagccgggcgtcgtggcatgcacctgtaatcccagctactcaggaggctgaggcaggagaatctcttgaacccaggaggcagagccaagatcaagccactgcacactccagcttgggcaacagacagagagtccatctcaaaaaaaaaaaaaatatgattctacgagctacatgtttgcaccagggaaaagttataagaaaatgcagaaaaaaaaaaatggctaaagatgccccttctttagatgttcaggacagaggactttgtcttgatgtggttggtaagaaattattcaattgtgaaatatgtaaaattctggtacttgaatgattagatatctctatttttactttgatgatggagatatacatttgaacactcttagctcaaagaattatgatcatgcctacaatcacatataaatatattatatgtaaaatattatacatacacaccacactacactctatccaggcaaaatatgcctctctagagagatcattaagcttattaaatatgcattttctagcaagttagtgcaagcaaaatacaagctgttgctccacatagatttccaaagttgctcaatagtttaatgggcatcaggctacaaataataaaccttaagacttggttattataaagaggattaagaacgtttgctccatggtatctccccaattttaatttctgtggcaatggtcagttacaagctgccatgtctgcacttttttgttgaagcataaccttataactgaacccatctgtcctgggatgcctatatggtgtttgataatatcttggctggacacagctattcttatcctatttatgtacttttcaaatgaccattagaaatacttgtccaaggaaaacccatgagatttcttaattgtgcatgctgccccactctaaagtcaccacatgtggaaatatagcttaggttgtatatttaatagagcttaatatgactgcttttgttatgtttgtcatggatatgatgttccaagctgtagatcttcatcatccctagttctatgtatctatgtatctatctatctatctacctatcatctatctatccatctttgtatctacctacctatgacttatctacatgtctttctacctacctatgtctatctacctattttaccatctatctgtctgcctgttcatttacctagctgtctatctatctatctatctatctatctatctatctgtctatcatctatctatcctattctatatttcctattctatctgtctatctacctatctatcatctatctatcctattctatatttcctattctatgtgtcctattctatatttcctattctatctatctatctatcatctatcctattctatatttcctattctttctatctgtctgtctatctatctatctatctatctatctatctatctacctatcatctatctatcctattctatatttcctattctttctatgtgtcctattctatatttcctattctatctatctatctatctatctatctatctatctatctatcatctatcctattctatatttcctattctatctatctatctatctatctatctatctatctatctatctatctacctacctacctatctagctatctatttatctatctatcatctatctatcatcatcatcatgattacctgtctatcttctttctaaacttgacaagttgacaagttgacaagagatataagttgacaagagatataatattttcttgtgacagataatactggttttggacaggcagttcttctcacacagtaatctagtgaaaagcaaaaaaaaaaatccatgtgtttcagatggaaatggggtagaatcttacaggaaaggtgtcttgaggacaagttcaaaatatccattgtgcttcctccttctagagtctgtgttctctaattcagtatctccattccatctgtctgcagcccgtggctctgtgtgagcaggaaggggtcctcagggccatgaggatgcctcatgtggctgggacactggttgtgcccagtccagtttctaaccagaggtgtatggcagagtgccgggcacagggaggggtgctgcatgtcacaacaagcacctgctccattgagatagggttcactgggcgcgtggcttgagtgtgaggccatgagatgtgagtgcatgtctatccatctatcatctatgcacctgtcatctcatctaccatccatctactctgttatctttttttgaaagtttaaaaaaattttcaatagttcttggggtatgagtggttttggttacgtgcattaagttctttcatgctgatttctgggattttagtggacctgttatctaagcagtatatgctgtacccaatatgtagtcttttatccctccccctcccccactctcccaacctcctgctcagagttcccaaagctcattagattgttcttacgcctttgcgtcttcatagcttagctcccactcacctacctctgtcatctttctatcaatcttccccactctatcatctctccctctccccatctatcaatcacctatcatccatctatctatctattatctatctatctatctaatcatctatcagctgtcatctatctatcgttatcatctataatctatcaatctatctgtcatctatgaattacagaggtgcagcagtgggcagctcttccttcctccttggcaccagcttctgagatgaaggtcgccgagcatttatttctctctgctgattcctcagaagcctcccagtctccagggagcaccagagaaaaatcatcctgcagtgcacacctggcacacaataggtcctcagtgtgttatttattttttgtttttgttttaatgaccatatcactcatttaaggtgaacgacgagctgttttgctgaaaaggcttcaacccatttccagctgggccccaagcagggagtgtctgataaggcagagggaagctcacgcatgcccccaatgcttcccctccttgcccagtggaaaatgcatgcgtttttgctggagtgtcttcaaatgcagccatgcctggtcactgcacttgtcgctaaggtctgagttgcagaacattttttttttctgttttagagaaatgcaatattgcttccttcatgtctgcgcagaaaacttgctgagggagctggaggaagaggaggtggctactgcagatggaacccagacagctggaggacgaggatgtggccactgcagatggaacccagagagccggaggatgaggaggtggctactgcagatggaacccagagaaccagaggaagaggaggtggccactgcagatggaaaccagggagttggaggatgaggatgtggccactgcagatggaacccagggagcgggaggacgaggatgtggccactgcagatggaacccagatagggttgctttatcactacaggtgttaggtgactcatttgtcataggaaagggctcatcagatcctcaagcggcctcagctgttttctggaatcggggggccttgaagaggtgtctcagggtcctctgggcaagctggccagggctccaggagctgctgccctccgtcagagccgctctgtgctgcctgctttctacactcgtgatcccggttccatgggggctgttcactgtgagaggtgggggctcagccggcccacccgactgcagaggccccttcttctaggattctccggcccacccaactgcagaggccccttcttctaggattctctggcccaaccgactgcagaggccccttcttctaggattctctggttttccggctgttcactatgctatgagaggtgggggctcagccggcccacccgactgcagaggcccctcattctaggattctctgtaggattccccagtgtttccttcaacagctcttattgcaaggggcttcctcttggatttcatttggaaataggtcagtctcataaattataaaacatcagtcacaaaaaagaatcggtggggagcttgaatccctctggggatgtcagcgtcttggtgtttgataaatgctaatagaatgcatgatgacatcaacaatcaataggtgtcagatcatctcatagctgtgaaaaaaaacaaaatgaaacctgccacgagaaggctggacacaatgttaaggtggagagtttgagaagccatgcggatctgctctttccagatcatgctcctgggcttcctggtccacgtgccttaagatacagccaggaacgaacatctgctccttcggagaagaccaaactcagaccgtctggatgtgaaagtccctcctggagagcggagacaggcctgtgacctctcagaccgtctggatgtgaaagtccctcctggagagtagagacagggctgtgacttcaggggtcacagtccagcatctggtacatctgggcactcagagaagcatctgattggctggcatggatttgtggacatgagatgttttcttatgcctccgtgccttcatgcaaggtcctccctcagcctggaatcccacacacctcctcccagtcaattctatagctccttcaaaggtcagcaggagggtctcctcccttgggaagcccctggctacctgcagagaatggagctatgcccccgctccatccctctgcccctcacacacctcctttacagctctcagtgcaccatgacacatttgtgctcagatagagatgctgcacattctttgaatcagctctcttcccgcatgggacacggtcctctgtccacagtgcagccacatacggtgtggaggccatgaatattaggatgtaatcaagagggcttccatgaaggcaaagccatcatatcttattatgaattatacatttagatagaagaagacctagtgccatccattggcatgcagcaaatgatcttatttatatattttcagtcatttgtcctactatttattatctttttatttcataggtagtaacattttccaggaagcatttaaagactggcccccatgagctgtattgtaagatggagcacacgggagatgaaacctcagaggatttatctgtcttctggggagctggtacaatctacctgggaagaaattgtctacacaggcagaaactgtacagcagtggaaagacgacatacaaggctttacatgcagaaaaaggatatggcctctgaggaaaagtgatgattccttgtgtaaagtaaaacatcacatggcaactgaagaatgcagaatgtggactagacctggaagaatcctggtgctcatccgcactttacacacatgaaaataccaaggacagggcgggggacggtgaagccccttgtcccaggccctacttctagctaaagccaaagctgggactaaataaaagtattctaacttccagttttttcaaaatgtcaagtttgaaatttttgtgtccaagccatttattaaattaaagtcaacgtgcttagtgtaatgcatttgtaagtggcatgaaggaaaataagactgatactgccaatattctgtttgccatcccagactcgtcttagtctcctgctgagtgtttcagccacattagcagaggtcgcacgggaaaacctcacctgcagctcaggaggcttctccaggatgcccatgtccctgggcttctcccacaatgcatcacctccctggacccttccttgcatgtcacctgcagctagaggcttctctcgggtgctcatgtccctggggcttctctcacaatgcacctgcctccctggacccttccttgcatgtcacctgcagctcagaggcttctctgggtgctcatgtccctggggcttctcccgcagtgcacccgcctccctggaccctcctgtgcatgtccctgaacttccagtgcatgtgtgcatctgtgactgtccatgttgcacagatgacatcacacatgctgccaaggcagggagccatctccttgtccctaaacactgtttctgaaagagagctgtgcgtgcagttagcactcaacaattagtatcgcggaatacatttttagcaatctgtagtatcatatcatcttctacctgaccacagtagcctgtgatcatttcaaacctggctgtatgtgattccctaccaaatattgtaatttctgaaataaaacagctggatgagttacctgacaggtacaatgtacagtacgcaggtgacggttacactaaaagccagacttcaccaccatgcaatgtatccgtgtcacaaaaccacacttgtgcccctcaatctataaaattaaacaaaaataaaaatttaaaaaaggtattgacttggaagtccagcccactatttacccactccttcttggtctcactgaacattcccaggcatgcaagatcacctgtgccacagtgagctgtatctgtccctggttagcctgtgtgtctctagaaggcagggctggtgtctaaagcagttcttgctcagaactgacagcacctttgcctggctgtgcataagacgcgtgtgctgggcctctgccatcgggcttcgtgcacccacactggcaggttagaggtaggcagaaaaatatgaaaggactcccaggctcttgctacacaaactcttttaatagccacttcaggcctaaatgtctatgattttaaaattgaaaggcacttttatacaatgatccagacctagaacttgagtacaggcaggcctcggagacgtggttccaaacactgcaatgaagtgaacactgcaatcaagcaactcacacagatgttttggtttcccagcacaatataaaggaagctgagtaatgggtacaaatatacggtttgacagaagaaatatgaactaaggttagataggtcagtagggtgactgtagtttacaataatgtattgtgtatttcaaaatagctagaagagaataatttggatgtttctagcataaagacaaatatttaaggtgatgtatatcccaagtacactgacttgatctccacgaattacatgaatgtactaaattatcacatgtactatgaaactacatacatctattacacattaataagatatgaattgcattgtccatcattcctgttaatttttaagatataaggttataatgtactaataccttgcatgcatttttctattgctagaatgttaatctaaagtagactgtgtctatcaccagtgtttgcacagttcctaaccccagagaggcacaaaaatcaattgttgagtaggtgtttaaataaatacataaatatttgacaaaaagttatggaatattaaatgtgaaatagtgttatgtctaaaaatcaaagtatataccttaatttaaaaatattttattgctaaaaaatgagaacgatcaaccgagccttcagggcgtcctaatctttttgctggcggagggtcttgccttgatgctgatggctgctgactgatctgagtggtggttgctgaagcctggggtggctgtggaaatttcttaaaataagacaaggaagtttctcacatcgatcgagacttcctttcaagaaagatttctctgtagcacatggtgctatttgatagcattttacccacagtagaacttctttcaaaattggagtcagtcctctcaaatcctgccactgctttatcacctaggtttatggaatattctaaatcctatgttgtcatttcaacaatgttcacagcatcttcaccaggagttgattttatctcaagaaaccacctgctttgctcagccctaagaagcaacacttctaattccagttctcttgctatttccaccacatctgcagtgacttcctctgctgaagtcttgaacccctcaaagtcgtccatgagggttgcaatcaatgtattccaaattcttgttaatgttgacattctgatctcctgccatgaatcacgaatgtacttaatggcaactggaatggtgaatccttcccataagattttcaatttactatgtccaggtccatcagaggaatcactctctatggcagatgtagcctcatgaaatatgtttcttaaataataaggctcgaaagtcaaaattaatcctgacccatgggctgcagaatggatgttgtgtctgcaggcataaagccaacattcacctccttgtgcatctccaccagtgctcttgggtgcccaggtgcattgcccatgagcagtaagaaatgaaagaaaattttttttcccccttgggaagtaggtctcaacagtggacttaacatatttactaaaccatgctgtaaacaaatgtgctgtcatccaggctttgttcttttatttataaagcacaggtggagtagatttagtataattcttaagggccttagaattttcagaatgtaaatgagcataagcttcagtttaaagtcaccaactccattagctcagaacaagagagacagcctgtcctttgaagctttgaacccagatattgacttttcctctccagctatggaattcctagatgccatcttcttccaatagaaggctgttttgtccacattgaagatctgtgatttagtgtagctaccttcattaatgatcttagctagaggttctgagtaacttgctatagcttctccatcagcacttgctactttaccttgtacttttaagttatggagacagattcttccctgaaacctcataaacccacctctgctagttttacacttttcttctacatcttccttgccttaccttcacagaactgaagagagttacagccttgttctgagtagcctctggctttagagaatgctgtggctggtttgatcttctatctagactgctcaaacttactcagcaataggctctctcactttcttatcatttgtgtattccctaaagtagcaatttaatttcctctaagaaccttcccttcacattcacaagtcggctgtttggcacaaatggcctaacttttggccaatattggcttttggcacgccttcctctctaagcttaagcatttccagcttttgatttaaagtgagagatgtgtgactcttctcttcacttgaacacttagaggccattgtagagttgttaattggcctaatttcaatattattgtgtctcagggaataggaaggcctgaggagcagggagaggtggtggactggctggttggcagagcagttggaacacacagcatttacggattaagtttactgtcttacacgggcgcggttcctggtgtccccaaacaatcacagtggtaccatcaaagattactgaccacagacgccataacagacataacaataatgaaaaggtttgaaatattgcgagaattattgaaacgtggtacagagacactgagtgagcacgtgctgttagaaaaacggcattgatggacttgtatggtcagggttgccacaaaccttcagtttgtacaaatcagaacttcactgcaaactgcaataaagcaacgtgcaataaacagggtgtgcctgtaatggcgaaagttgctctaagaaaacgcctccaaaatactttgaattgtttatttttattctttgatccaaagaaaaacaagggtaaaattttctacttaaaaaaaatcttaactagatttattttgtgttattatacatttttagatactatttaaaaaacaacagactgcattaaggacctaagaataatataaatttcagggctttgggtacaaagagtgatcctcagagccctccttatctccagcctgcacagtttccctgtcatggaacactcactaaacaggtgtctgtgcttccggaaaggcttccagaggcaggtctgaggtgtctgggacaaggcccctgctgacaaggagcttggggtcacgggcaaggaagactgacagccgtgggtacaggaaatcgccacaagcagcactcaccaagcaatcctcactgttctaggagagccattctccatttgcctggggtgaaaatggctgtgagagctctcaaatcatcagtgcccagaaaattaaattcaccagagtattccggtcaccagcagcactactatgcacagttggggactgttcccaagacccagggatcaggcagggaagagggggacccaggcactctgtgacttgcagggaccaggcagggaagaggaggacccaggcactctgtgacttgcagggatcaggcagggaagaggaggacccaggcactctgtgacttgcagggaccaggcagggaagagggggacccagactctgtgacttgcaaggatcaggcagggaagaggaggacccagactctgtgacttgcagggaccaggcagggaagaggaggacccaggcactctgtgacttgcagggaccaggcagggaagaggaggacccagactctgtgacttgcagggaccaggcagggaagaggaggactcagactctgtgacttgcagggaccaggcaggaaagaggaggacccaggcactctgtgacttgcaaaagatgaacgctttgtttggaggaacctggagtttatcagggatggggtaggctggagacagaggggtcccatcgcccctgccctggcatgtccctttttcacacgcgggaagccagagaagagagtaggccatccctctgccttttggcatcatagctggtgactgggcagatgaaggccccgccatcatcctgaccttaaacccaaggcctcacgaatgcatgtgggcaccgcgggctgattcaggattcaggagagccggacagggggatgcacagatgcccagagcttgctgctgcttttcagtggccctgtctgggcagcggacaagggactcagggaaaggctttgcctggcatgcagagcaactgctcacagatccgaggctgccaagcacccgtgtgagacagttacgtgccgggtggccctgtgagggcaccaggactgcctgcttcacgacgccctagggcctgcactgcggctctgcctgctggctctggggtctggccacctagctcccctttcaggctcctgtgctgggaacaagaggccctgacacccctagaggggcatgagatcagtgctttctaatttctgcctggcaggaagcatcacctctgcctggtggcctattcctttattcagctatggcaaaaaccatgcccaggattagcctgggaggcagggggctcctctaacgctgagtgagcgagatcattcacaggaagaaacaggcatcgcttgacttactcaccactctttcttccagaattttctagcaaaggcattgttaaatataatgatcactcctttaaaaacgatcgttttaaaaacaagacaattccggttttgaataagaaggaagcaatttgaaaatcgttatattctctatgatctacagtaggataacagggacatcctttgattccattgatgtgggtgtaaacaggtctgatcttcctggagagaggctcttctggaaacagaaccctccatgccctcccctccctcaccccagcaattctcctcctggtcattcatcccagggaagaaacgaaaagacacaaacattgtctgcaaagatacttttcccactttatgcacaatatggagatgttttatgaaaactaaatacatttgaacaataaaagaattgcataaataacattacagccacaggatgaaagccagccatgaaaattaaaactaaaacatttaatgggtatttggaaacaagctcatgttataatgttaagtgaaaaaaaaaaagaatacaaaatacaaaaaaatttacatcgatcatatgagactaattcagaaaagaagagcaaaactgtcttaaaaaatcagaggaaaaatctagcagtggttaccaatgccctggacgaatggcacattgtgactttgaaacaatagattattttttttctcactttttagctagatgtgttgatactgggaagcaacgaccaccagtaactttttttcttttttaaaattaattttatttcatagttttgggggtacaagtggcttttggttacacggatgaattgtgacaacagatactaataacaggctgtcatctgcattatgggttctttcatcatttctagtcctcgctttaatcctcagcagcctttgagccaatgtatttcttttggtttctattgccaataatatcctctgggagaatcagtgaagaacatttaagaagcaaactcctttttagcttttcaggttctaaagtgtttcaaatactgaaaagccccatggttggtgccctcttccctatgagccctgtgctgtgagtggggttgcgtccctggggcagtacccacctggcctgtccaggcttcagagttccctgcatttggggatgtacccagatgcgccctctgggagacggcccggggtgaacgcgtgctaaagggccctgactcactggttcagccccggaatctcctttgctgcgccttcacatcctccccctttcctcctttattagaaatcaatttgggttaatttaagaagcttctctgccaaaaccatactggcctcagggaaagttcagttcattagtcactcaaagcaggtgcaccttattctaataatgtgatgagtgccttctgcgcagctgcagcagggacttcaggcctgactggagctggaggaagaaaaggtcgttccagggtggaagaggatggggggagggtgtggccaaagagggggtgttttgctgcgcaggcgagacgaggtgcagcgaggccgcaggccccgagccctgcctgggaacagcgagtgcttctgggacgttgctgttattaccagaagggcctcctgcaggggagggcaggagcctagactccacttccgcaaagagtcctgctgtctgtgtgtcctcagggagcctgggaggagaggagcttcctcgggcccctgcactgctccctgctcactgcaccccaggaggggaggagggggcagaaaagagaggagaggcccaagatctgcattcctggacacagtcaactccacccacctggcaaggagtggcaaggaggctgtgtccagggtgctcagggaagcccagccccagggcccgcagctgggcccctctagcagcaccactctctgctctcagatcttatccccgttgaggttggactaaagctctggactctccagccttcctgacgataaatgcagccattaggattcactaccctctgccctctccgcatgcccgcttcccttcctggctccccagagcgtctgcacttcattcagaagcgtgagaagccgcaggattggtcgagggaataacaaggtgatccaggcatcgctgaattgctatgtattatttatgaataaaatttcttccaagatgttcattttccccctcctctcctccctagagtttcaggaaatgcatccacgtgtataggaagcctgtgtctggcgatgtcaagtagtgcattagataatattcacggccctgcagagtggctaccgaattacaaggaacggatcttttaaaatctgttgtattatgtagggggagctcagtttccctcagcaggagacagagggtgcgtttatcttaaggatgcaaccagaggcttgcgaaggctcacacagagcctgccaggcccccaggcagtcctttctgaataagggtaaaagagggccctaggatcctacagggtctctgggtcgcctttgtggttggctcctcactgggctctctttaggcagaggctgcacggcacacacagccaggcggccacagtgccttgctctctcagaccccatcctgtccactggggatatgtggatggcaggtgggcgggggcggctctgagtgacccagagcctctgggcccctcctgcgtgtgcagcagaggcctggccccctaggtgcttctggggcaccccagagcaggccaggctgagtccagagaagctgctgccccatagtcctcaccccactccaaagcggctgtccctttctcagaaaaatatagcctcctgcacagttcttaaatactgccttgcttgccagctacatcagtccacggtatgaacagaagtgaaacagaagtccctgattagaaatcaccctccagcaccactggctttttctcaccctgtgaaggcactggaagcaggactacagtgatgctgggccccggcgggggatgcgggcaggtgggaggagctgtgggaacgccccaccaccgttatgcggaccccaggtctgtgagctgcaggcagaatgcgtgctggtcttcagatttgtctatgccgttggctctgtgtgtgagttgctcacccagaataaattcctcctgttcccattatctaaaaatgctgtctcattaggagtccaggcctgtttgttggccacgattctcaaactcaggcagcatcagaatcaaccctctggaggggtggctaaaacccagattgccggtgccagccttagcttctcacttagctggtcccaggtgacgctgatgttctggatcagggaaccccacttggggaaccccggctctaggaaggcggccccgcctcccactctggacggggcttaaaggttctgaggatgtctgacttgcttgtcagtggcactcaggaatggctgtgggaccctggttgttggtatctctgtaaatcctcttttcttcagggagcttccagaaaggccttcctgcagccctctctggacactgagggcagctgtccagccaggagtggccacagccttctcccacaacagaggtgaacacagcaggaggtgcaggaggatggagcagaaggcctgagttaagtcatcctcggcacttcctctcaacatgcagttcaggaaagacagtgattcggtgttgttcaggccagtttgaggtgggtttccaggtactgcaggcagcagcatcctaagtcacactgaatcttccagatgaaaacaccagtatcttattgaagcaacgttatgaccaggggattgtttctttcctctaaatctttactaattttggcaggaagagaatatggaaattggcgtttcagtcctattttggggtctaaccctgaaagcgctgttctctttggggcaggccagaggggacagaagaaacatccacttcccagagccggactcaggagggtcctcatgattactgcccgctctcctcaagttgtgcctgtgagtgacactggtaataagagcaggtggacagccccagataggggactcgaagagccgggtcccagcgatgctcatgaacctggctactccagaagtatttgccgtgagtgcagattccaggccctcactgtacccaggatagtcttctgagccagcttagatgggtgtggtgagaggactctcatactttcagccccagcccccatctcaccagccatccttgcttctctaatgagtggggtgcacacccctgagtagttgcaatggacagagatctccacagaggagctcatggtgtccatgagaggggcatcccgtggtcggcagaggctccaggcacacagggcagagagctggctcagggttcccgggggctctgtggttgtgctttgtggctgcggggaattgcacagctgggccactgtcacatcaggactccctctctccacacttcaagatctccatagcggctgccctgccttttctagaatccccacatggatgagggtggtgagaactgaactgtggtgtttcagtgggtaaacctcagacaacagctgtactgcacgcaaatttcttctgtgtattctgttgatgttcccaagttcccaaattgtatattttttaattattagttcaagaaatcagaacaagattataattgtgaaatctggccttgaccaatacaggtcatatacattacagactgttcatcagtatacttattgttttcagtgccctatctgaaaataactatgttccttctccttgaattggaattatttaaaaaatatatctccttttaccaaatgtcaaaaataagctgtaagcccagcattctgagagactgaggtgggaggatcacttgaacccaggagttctaggctgcagtgagctatgatcaggccactgcactccagcctgggggaacggggtgagactctgtccctttaaaaaaattaaaataaataaaatcatgctctaagatgcattacatgctttgcatgtattaaatccaccgaattaatcatgttgcattcacaatacaacaacacaggccatgcccagaggtgtgtctcctggggctgacgcactacagacaggcaccaggcaaactactttctttaggatgatggccaggtgttcattttgtacacagaagacttactgtgacaataaaggttgactgcaaccaccacccaaaagagaaggctttgggccgggcacagtggctcatgcttgtaatcccagcactttgggaggctgaggcaggcagatcacctgaggtcaggagttcaagaccaacctggccaacatggtgaaaccccatctctactaaaaatacaaaaattagccaggcgtggtggcatgcacctgtagtcccagctactcaggaggctgaggcaggagaattgcttgaacctgggaggcggaagttgcagtgagctgagatcgtgccactgcactccagcctgggcgacagagcgagactccatctcaaaaaactaaacaaaacaaaagaaaaaacaaaagaggaggcctgaattttgtgtctgcaaatcctatgggtactcaggcctgaattttgtgtctgcaaatcctatgggtactcaggcctctgagcaacagcaagcctggacgtcacctgtttgattctcttcttcacccaagtaaacccctagacctcaaaatcttggctccatgtgcaactatgccatgctatcaaactaatgttataatatgcatgccctatcttctgatttataatatcagtgatgaatagtacaaggacgggcgtgcataaagcttacggggagggtgtgggggtgaggcgtacacaatgtgtctcataaagaatgaaggagagctatttattctcacggattcatggagtaaagcacagatagcctggtttggaggctgcgtgcacagaatttttcataaatatcccacagtgtaccccattgtacagcagccacacgttaattagagcattcagcagacactgcaatgtattccacgcacccaagtggatcttcatttttcacatgcagggccttactaattaaaatcagttttgcaattaaatgtggaaaattgtgttaaactttcaagcgtggttagaaaaaaatgcaattatttttaggatattttattttaatgcaaatgaaatttctatctatgtgaaactggtaaaggggagatataggaactcctatttttctctctgtcttcctctctgtttcttctttttttatttatttttggattatagatgctcctctcagttgcaagttgcaatgctccacatctctcagccagcacctggctctgttccagggcttttagtgagtgctctctgtcaaggcatgaataatacagcccctaggctgttggcagactccaaatgaggcgtgcatacatcaggaagcaagcccttgactttagctccagaacagcctcctgtgaagacaggcaattattcaccacgctgtgccatggcacccacactggcaggcaagaggcgtgcggaatggagagggggtctgagtgagggtgtgtgccgcaagccagagggaccccagtcatgttctaatgaaaaggaaaagccatcacttggagattttaatttttaagtttcaaatgaaatgatttgactcagtgtaccctacattgggaaggatttgaatgtactaccaatacccatcacctaactttcgggtgtttattgagtgtacaaagactctgatgctaaattgcagggttggaaccctaagttcaacaaacaaatcattaaaacagtccagtgaaggttaaatgggaataaaatccattacatttcagaaataaattcagagggatcacaaaacagacatgtgaggaatgaggccttactaggaatttcctctctctctctctggtgaattggcagcttatacaaaaatcaccatttggaaataagtgtgtccaattcattccaaatgtcttagcatgtgtatcactgttgcaaggaaggttaaaattcaaatttctgtaatcagttaatagtaatctgtaataaatattaacaaattttgattattcctatttctaatttttattgggaaattttaggaaaaaggatttcagaacagcaagttgaccattattttgatgattaaatttcgtttctatagattccattctaaccactaacttgcactttgtttttaacacaaacagtattttatatcaacatgcaaagccaaaaaaaacctgaatataaggcactagaatttttcatcttagtcaaatgttcaaaaatagattattgcagacatgttgacatgcgatattttagctggaatgccagcatcagttcatgaaatattctggatgaataacaacgtctctttagcaggtacttgagccccactaaacaatcacctacacagacagagaggaaggtgtggtttctttcaatgtatccctgcccttcaggagatagcaggctttggtgtgaggatgctgccaggaaatgctgagcctccaggcctcaccccgtgatgcttcccctgctcaggtgtctgcattaggcaatgagctcagtagcagcagatgcagctccccaggcctcccacaccaatgcagcgttgctcaaaccacgcactttgggcagattcaccccacttatctccacggggccttcccagccagcaaactgctacgagggtgaggagaagaatatgcagcagcttcctcaatgtcaaggttggtgacttcctagtaggccactgttttccttccatctatccacaaaacaatagcggacggtacaccgggacagcttctgtcttccatgttttaaatgcctggaggccacaccaggctgacttgcacagttgggagactgcaacacagggacttactcttccttgatattggggaccgaaactaaatcttgggatactcacttaggatgactgaggtttgctttgtgagcttggtggctggacaccaggtttgaggcaccagtgcccccggccacctctgagtgtggtgtggggaacatggaggtgctcggagcagctgaatgggctgagccacgtgtgcagccatctaacaatgggcgcagaaacacaggtgaccatgtgcaggaaagaccacatgagcacgttcactcgtgatgtaagcattacttctagccctgcttataaaattcaccgtgtttttgtcatttatatgctaatatcacaagacaaaaacctcagttgggaaaagcaaaaggcaaattcaggtgactggctaataatgacgtttctgaagataaatatttgtcatatttgttagcttcctaggaggtctggcctgatgacctgtatcagggcccaaaaatgttgagtaagcttggatccctgctgggcaatgtgtgggatggaaacagttttccttcgctgccaagagtgtctgcgtctctaaggagctgacttaatgcttttatcagatcctggaactctgtccttcgcctttctcactggttccttggtagccaagagacccagaacaaaatgtaacaccacattaagacccccgatgtatcctgagttttcagtaaaattaggtgatcattttccttatgttgttccaaatttatattttgatttaaggtttaccattgtagttgtacataggcttatcagttatttcaaattcttcataaactattaacaccagtaaataactacagagattatcttttgttcaaagacaggatttggaaattaatgtagaacatccaataaaataaatattataaccttactcctaccaaaaaattttaaccagagttttaaatcataaactcctttttaaaattattttctttcccaggtattaagcactggttgatcctcctctattctcaatttcgtacaagcccgtaactatacaacaatcacactaaaaaaaaaatccactccagccactttcaaagagacccagaacaccactgaggaggcgtggctcaccaaacagactgccagatcccactgccagatcccacagctttctgagacccacagcagatcccgcagctgtggcagagagggtgacgtatggcccccagaaactaccatagcgtctgtcctacaaagcaataaaattgtaaactacaattgtgagaaacatttgatttccttaaaaatctcttatgttgaaaattaaagactaaatggcaggctgggcatgatggctcatgcctgtaatcccagcattttgggaggctgaggtgggcagatcacttgaagttaggagttcgagaccatcctggccaacattgtgaaaccccatctctactaaaaatacaaaaatgatctgggtgtggtggcatgcgcctgtgatcccagcactttgggaggctgaggcgggtggatcacttgaggccaggagttcgagagcaccctggccaacatggtgaaaccccacctctactaaaaatacaaaaattagctgggcgtggtggcgcacacttgtaatcccagctacttgtgaagctgaggcaggagaatcacttgaacctgggagacagaggtttcagtgagcttagattgtgccactgcactccagcatgagtgacagagtgagactctgtctcaaaacaaaactaaactaaatggctggcatcattttattacttggtattcctttcctaaaaaagaaaaattgattttttacattgctgatgccctacatctacctcaagttgtttttggcaagttccaatacatcaacacctcaaagtactgaaatacaactttttacttggctattgctgatgcagtgtatgagcaaaatgaacttgtaaccttaacataaacacattcattggaaacatttattgttaaaagaccaaaaaaaaaaaaaaaaaaagacatgtaatttcatcagaaccaaaacggaggcttctactcttttgtcctatttagaagaagcctggtgtcctattcccatcaggaacctgacagcaaatgccagcatcacagctgtgttcacagagggtgtgccggcatgaatgggcaagaatagctgtcaggaagggatagctttcatagtcagcaaatctttcaaaaccagtaaaaaaacaatgccagggccaggcgaggtggctcacgcctataatcccagtactttgggaggccgaggcgggcggatcaccggagatcaggagttcgagaccagcctggccaatgtggtgaaaccctgtctctactaaaaatgcaaaaattagctgggtgtggtggcgggtgcctgtaatcccagctactctggaggctgaggcatgagaataccttgaacccaggagacagaggttgcagtgagccaagattgtgccactgcactccagcctgggcaacagagtgagactccatatcaaaaaaacaaaaaaccaggcagatataacggaaaatttccaaatttaaaacagcaatagtcatagatgttaatatatccatgagtcttacctaatacatcaagggacacttcttaagtttaagaaattaaaatttttcttgatacatagacatcaaataataaggcttagaaaacgctcagtgagagtcctcttaagagaaggctcacacagtgacaacatttttgcaccgttttacataataaagtctgcaaccctcttattttagaacagaggaaactgaaggctgtagacgttacgtaagttgtccagagctactggtccattagtgatgtagtggaagctagcatctgggccaagtaaccgggaaatagttctttttcaactataccacattagatgttctagataactgagtgcattaaaatatttggtgttctaataattacataccatatgagccatggtaaaaatgatgatttttaaaaaattaagcaaaagtttattggaaacagctcttggcccgagagcttccatgactcctccctaacatcccagcgaatgggttcctctgagactcaggcacttctgcactaatgagtcagtggcaagtttccgaaggaagaaaaagcccaacttgttttcaaatcaaactctagggaacatttctgaagcagggaaagagatctcatgaacagatccacacacacattacatgggacacataaattcatttcttagtgaaatgcaccttggttaagcatatgaatgcttgaaattatttggaaacgtcacgatttttcctgcaaaactatggctataaaattatatctagctcacacctcattacaactttttataattgtacctttaaaaatatgtaaaagaggatatttagattgtttgtaacacaaaggataaatgcttgaggggatgaagattccatctttcacaatgtgattatttcacattgtatgcctgtatcaaaatatctcatgtaccccctaagtatatacacctactatgtacacataaaaattagaataaacattttaagaaactttttagccaaatttaatttttatataacagtgtgataaagtttaactactgactaatgaagagatgattaggggaaaatgaatttttctcatgggtgactaacttcttttgaaaacataaacaatgcagtgttttagacttttagattaaatgctgacatatatatttcttcataaaataatactttaagtaaactacttatttcaattatgtaattcaataatttactattttatacaataacaatcataatgtaattgactaaatttaataattgaaattgcaaaattatctgaaaaatagcccacaattcctttgatctgtaacagaggaagtcagacaattgtttcgtggggtctctcattagacattcttgcctccacaaatgctagaatggggatttgggagtaatttgtaatttttcctttgattttactaaagaacaatcaaaataattgctggatgtcactcgtaagctaatgtttcactaaaaaggaaatggaatgcaaggccgtgaggagaggcctcccagatgtgcggcagatgcacccgctttagaatcagttttgtgacctgggtctgctcactgagggtttgttaggctggaatgaccttggtctttgcaatctaatttgtaaaagtaaaacatactttagcctgtaaactcttttacctcactataattgaaacctttctattgaaagacacatcttcatgaatagcttagggaaaaaatgcttaccagaaaaacatctaaaggactgatgtgtacctgacagtcagccacgggcatgtaacatataattctgccatgacacattttgagcaatcatcaccttccccttagtttctaaaggttttccaccccatccctgtcgcagacctgaaatgctggtatttataagattaatgtaatcactgcagttccaaagtcttgcaagcttgatatgccctgaccttcacttgacctgacctcaccctgcagccgtccagatgtaagaatgggcttagtttcccaggatgaaccccgttaaatgctggaaatggagtctacagacaggtcagcaggtcacattttaattgaccgttcattgtttaccatcctgccactcccagaatgaggacgtgaggaaggagaaattgggctcctcggtgagcagtgggaagttcttaggtggccgtgtgctgagcaccacatatgcagatgggaacatgagcttaaggctggcctgaatttgtgtcatcctaaggagtgtcacctattctgcccacgagatcgaacggcttatgttttgagaaccctttcaagagacaaagactgagttccagtgtgagaagaaaaagaaggcataatgtgtattgctttccaagaacacctgctcacacagttcatcatcaggactgggtccccaaataagtcactttagacagcacattgtggaaaaaaaaatgcaggcattaccttctgtgtcttgcatatttgccactgacatgaccactgccgtcacagccaggggtgggacagctgcaacaggaaagaatggattacacggtgccgcaggcaggcaggtgagacggaaagcttccgtggcagcagagagaaggagggcggctcagacagaggagagaaatcacacaatccaaaggagggggaaattcggggaggctttttacgagcaagtctcgggggaattaatttcatcagtgcagcagggcgtgagcaagctgccgatgagctggaaggtgcagtgtgcccattagaaggcgtgaattttccaaactgttaatggggatgcattttacccacatggcactaacctgaacagctcttgtatggctggttccacgggaactgcagagagatggaaatagataaaaatttaccatctatcacaagcgaccctcttccacagaaaattaccaaaagggtggcatgaaagtggggtcagaatcgacctcagttccgcaggatgaaggtgaccctgagccggcctcaggatgcagggaagcgcggacatacctcgaacccctttggaccgcgtgcgatgccgcttctcctcggtgtccacctccatctggggatagattagcagccatcaatgtgcttatcctgcctgtgcaggccagccctgcaggggcggctcactctccctggcattctattaatggggctttaatcctgtttccctccatgaagggaagccctctacaagggcagggggtaagaccaggcaatctaaatgtattactcaaacaattataaacagaccttaaccttgtagggaatatttaatcaggaggcccttgtcctctataatggggtagattttgatgaatcttgaagtaccatctatttactctcttttcaagaatttgatggagacacatctgtgtgcttctgagttgtgctttgtactaagaatataacagccattaggtttataagaaggtaaatatatataatatatatgtatttttatatatcttatgtatatataaaaacaaatatttatatatataacatatatattttgtatatatatacctttcagttacaaggagaatctaaatattatatatacattatatataatatatagtttatatttatatctatatatacacacacacatatatatataatatttagattctccttgtaactgaaagttttaatctgattaagcggttaagacaagaggctgtaggtacagtggaagaacacgttttaccatcaggggcgcgctctcaatgttgtttagttcctggaatgcaattgtcctccacatttatctaaattgcttggtttcctttgaggcatctagaccttccactcataggaactgacacatcttatacttgagacattacaaatgcttttatatattactttgtgggatcttcacaacaattttgtaaggaaagtatttttattatacctatttaatacatgagaaaactaaaattcagaccacctgagttacccaagatggtttgagttgaaggttttggagtaaggaccaaaaatcacatgtctgtctttgtttccactaagcctcaggagcatgctgttgcgtggtaaatatatacgagtatgtttgttcaccaaacattcccacagtatgggaagtgtttgcacatggcaaactggatagcaggagaactctactcaagacgacgggggagctaagaagagatgagcaatagaagctggccaaagccccattgaatggcctctacaccggctcacagggcacaccaaagccacttcctccatggtttagaggaagaacatcgggactgagtgaagaagactcattagatgcctgtggctctattcgaggcacactccagaaaagaacagggtagatctgccgctgaaataaactagcaaggcacaactcaacaggtacagtatgaaaggcatcagaaatccacatggacagtgcctgatttaatgtttatagcaactaaccagcagctatttattgatgaatactatggatgagtattatggtatcgggggataaaatcatacatgtaataaaaacataagctcatttaatgagcttaaaaatctcttaatgggctatatatggacataatgatgtgccagatttaataccaaaacaaaaacttcagcaaaggaggggccaatgggaagtggaagccaaggaaagatgctcggggaaagctgtgatccatgagaattgtttgtgtaggtgtgaaaggaaggaaaagagactgtctctatgactggcatctagaggcttgatatgcagttattgagtgaatgaatgaatgaatgagtccatttgctgggaatgctgcaggtcaaggaggtgcctgaagtggaatattggaaagacgacatcagacggtgcagacgacgggcctgagccagggccacgtgcagtgttggaagggatgtaccgggaggccccgctggtccagctgaatagacagctgctggcctttcttgagcatggggaggacgagtcgcaaacatgttttagaaaaaaacaagttaacggcagcttgagagagggcatggagggggcaggcagtgcagttgggagcaagctgggaggagactggcagtcgcctaagaagaaagggcttgggcagtggcctcaacagcatctgtggcttagtcccatcgtcagccaattcgggaacataattgtctgggaaagaaagaaatgggtttaaaaaactttctgatggaagaatccacacaacacaatggctcatcaggcagcttttgggttttctgccctttcctgtgatttaaagatatacctgggatatgaaactctggggccacatcacgtggatttgacatttaactaaatagcaccatgaggaacacatcaatgctctgaaattgctattcaacatgaaaacacttcaaaacaccagaaaattctagcaaagtgatctagggccaaagtgacatgaggcagagatgaactgagagtcaagaagcctaaagcaatggcaaaaacagcattcacatccatgagaaagggcatttcccggggtcccctgcccttgtcacaggccattcacatccacgagaaatggcatttcccagggtcccctgcctttgtcacaggtctggggatgcagagataatggggtaaaatcgtattctttaaggaattcaaaattgaattaaaacatttaatgaaggcctataagttgagaaacattctccgggggtgtagtggaagtttggatgaggcttccattggattccatggattccattccatcattccattggatgaggattaggaagaagaaagaaatttcctggaggaactcatatttgggctgaatgttaaaagttaactggatgtttcaggttaaaaagaaaaactgtggtgagggtgtgttcctcacagagggaacaggacgtgtaaagacccaaaggcttggagagacaggtgtgttccaggagagacaaagctggggctggggtgggagagacacactccgagcttggctatgagctcccttcagtagggcacagaattctcaaagtttccagcagaacaggggccagtcacactcagtcatcacccagcttgcttacccttatccagcatctcgtgaataaacccacatttatgatttctcttgctgtagtttaggggagcacctgtgagcagaagtgcagtaaagctagttttcctttgtgggcattaaatagaaaaacttggccttattagctaactgctcatatggttggataaggataagaattgttttatttttacaattaaattcttcatcctttcagtattttttatgcatataggggcaaacttattttttttccagtcagatagctaattcttccagtaatcagttattaaataaatcatattccctccctacactaaaatattcctcttgctgaatgtgaaattcctgccacagttgggtcagactctctgttccctcctccgtcggttccttccagtgcaatcctgtttggattatggtggctctacagtgtgttttcctctgctgaacaagggcctttgctatgagcattacaggagataatttatgaaagatgccaagcacagcaccccacatggagcagacactaaacagatggggttcccctttctttccctttcagccaatgaaacccaaatctgaagggtttcaaaagctgttttaaattttacatttacatagctgtttaataagtgccaattgccagaaagattcaaattaagcagaaagcataaaacgtatggtctgaaatgccaggaggttttcattttctaatgtgtgcacctgatggtgtgtggtcctaaggcagctggcccttgccggcactctcacactttgtttcttcaggactccccagcccctccatcctgccctgcccttctctcctacccgcctgaaaagaatgcttgggcttgcttccacccagggcctgcccaccactggcgactgtcattggcagcctcaggcgtttaaaccgttcatttgaattcattcttctggtggtcccagggctggaactgcgagcttcacttactgaacccgtgaatggctcagtcgcgttttctaagacatcagctctgatcttccttggaactggagaaagttcacctcagttatcactgcttgggtttctgattacctctccagtaatttacatttagaaaatcacccttaaaactccactttagcagtaattctttttattttgaagtctaatatttatttttaaaataaggacgttttctaagatttaaaatttgttttatacttaaagaaaagtcttgaatttaaggaatctattttgagccaataaagctgtcaggagtgattcatgaagagagagcaggtgaattatttcctaatatgaaaactttacatttggactcaggatttattttagtactatgatcttccttctcttttccttccaataaaagggatgctttcctcaagttgagcctcagtgaagagattataatgtatatatatttgatacatatatttaggggcagggtatcactttgtcacccaggctggagtacagtggcacaatcatagcttgctgcaccctcgaactccacttccagagtggctggactacaggtgtgtgccaccatgcctggctaatcttttcaattatttgtagagccaggatctcactatgtttcccaggctggtcttgaactcctggactcaagtgatcctactgcctctgccttccaaagttctgggatccctggtgtgagccatggtacctggccaagaactaattttttttttttttttttttttgagacagagtcttgctctgtggcccaggctggagtgcagtggcgctatctgggctcactacaagctccgcctcctgggttcacaccattctcctgcctcagcctcccgagtagctgggactacaggcgcccgccaccatgcccggctaattttttgtacttttagtagagacagggtttcaccgtgttagccaggatggtctcaatctcctgacttcgtgatccacctgcctcagcctcccaaagtgctggtattacaggtgcaagccaccgtgcctggccaagaactaatattttaaatgcacgaaaatttcataaactcagtaaaatcccttggagtcctcagtggctgctttctgatgtcaagtaccacattaggccataactgtgaacccaggaggagctcactttgggtcccaggtctgccagagaccagcaaggtcctcctaacccgagtctctagccacagggacctgctctcccctccccgacagagtcctcttgcaggaacaggacatgggggcttggactgcaggctgggttacggacagctcccactttgacaccagaacctgagctccaggcctccctccctgccacagtcactcctccactaaccaggaagcaatttccattttgccaaccagccagaccctgcctttcagctcctgctgctcaattcgcttggtcaattctttgcttgtcagcagcatcaagaagaggagataggagggagggcaggagccagagatcagtcctagcctctgtgaggggtaaggaaggctcggggaaggaatgttgaagagaaactggaagtcctggcagaaggcagtgcaggtgtgcatgtctagccatatccaggtgttttcccaacagcacttcttcctaggaattactctttccaaggcagctgggagctggtcagccttctaaaaccctacgtcatagaaaatacctccacgtctcaattctgactccagcaagtttgggctcctaaaaatacatctatgaagattagcaagaatcataacttatattttctagtcatccttcaaaaatgtttaaacagagaatgacaacaacacgtattatcatgaaaccctaaaaataaatccttctaaatggcatagtttgaatgcttaatagacttctatgcctagtttgagacaaacactttaaaaatcacgctacaaatcctaagaaaatagcaatcaaaatgatgacaggttgcaataaagatgtcttgtaataggccccctagaggggagctccatcattttgacagagccaacttgtgagagtgcgaccacccaggatagcactaattcgagcacggcaccaaggacaccacaccagcctgtgcctcaatgggtgcccccagcctctccctcagatctgtgtgtgttgtgagggtgcagagctgggagctggacccaacagaggtgggaggacagccataggaagtgcactcagccactagccttttgaatacaggaaaagcaagttgtcaaaatataggatcctatctttcaggcaggtggacgtcctgacggaaaagtgcctggcccatggtagatgcctgtaaatttcagttaagtgagtgaatgaataaactaattacattgtactaatgcatctcttggtcagctacattgttaataattttattacagttttaaaaaattctcacaatacaaataaaaagtttcaaagaaatatccactccacatgcagccagaagacacctacgcctctatttccacatgcatggtgggaatgccacgtcaatggaatgctggtcaggcggcctgggatcactggacgttaagccagaagtcagcaaggagcctttcagagcttcaaaaaaagcctcagggtatttgctctgggaaaatcctgggattccctggcccaagaagggtttcctcccatcatgtttgagccgggaagctaatggaacatttgaaactaaaccaaacctgaaccaagtctcaaaggcttcgaagatgtctacagggtaatcgaggcagtggtgatgctttcataaaataatttacatttgattttattcaaaaaaggatggtctagcagttttatatccatgaaaaacaggttgcccaatttacgtcatgtacgataacagcagagaagccccaaaatacccacaagaagaacttttggggaagcgctaggggccaggaagagagaggcctcacttcactttggaggcctcatctcaggccaagggggtcgtcagatgctgtgcaagcagtggtgaagctttgttgttcacactaagagctgacacccgatgagctggagcctctttcagatgtaatggttgcatttccaatcacagcgtgatacctacttttacatcaaggaatggctgggcaggaaggcaccccttccagaacttcagaggaaacatcaagtcaggtgcccttcaagaatttaactatttttgttgttgttgttggtaaaatagatgttgtttcagccctgagcataaaaataagaaaatagatccttattttcattttaaaatatgattttctaaacttgaatgtgtttcttatgacttctccattactttatcttgccagcaagttctgggagaaaattcaaagaatcagaattttagggctggggggtacccgaacagtctcatggccaggggctcatacccagccacttagaactgttccatcgggttcttggtgcttaacaaattggactaacatctaaaaatctccaggctttatatcaaaaccttgatttctgttttttttgtttttttttttctgttttttgtttttttctttctggaaaaatatgatgatctgaaagcattgctctaaatttctcttggcctcagatggccggagtggaggtgcagcgtttccatgggaggggcagccagtgttcccatgggaggggcagcgttcccatgggaggggcatgtgctaccccacaccacagctttcaagtctggggccctcatgcccattcctttctgggcttatgcctcctgcccacctgcttcagggattcacgtctgctgctctccatctgttccaagctggttctgaagctggacctagcaacagtgagctgaggctgcgtggggagtgcaggtgctccctgggtcccctgctctctgcccatgaggatgactgagtctaagagaaagagcagacgttgaagtcccaggacctctggagcatcctggagaagccagacctcagttgatgcttctggggtatgtaattgttacaggagtgacattcccatgctgggcctcaagactcagaatatggctcatcaggacgttcatgggtcctgggtagatactggaactgtatgtggcaaaggttcagaatgtaccaactccccctgaagctgtcctctagcacgtgagcttttggtcaatgtttaataatttctttgcgtttcatctctgctcttggagtaatttgttctttgatcttcctgaaagttgctccaaacaagtttccatagactttgcacatgcctttaaaataactctggtcttatcttcatgtgcttgtgagacctccaccctcccgccagcccagctgcacctacagggtagaaacggtgccacattcccaccctcccgccagcccagctgcacctacagggtggaaacggtgccacattccaaccctcctgccagcccagctgcacctccggggtggagatgtgccacattcccgcctgcacctcccattcctgcggagcgccgggcacacagcagggctgcctgaccatgctgggtgggtggaaggtgggcccgtgatgatacgtggctctgaacatctctgcatgtgctttccagggccctgtagtgggcagtatcctccgtctactctgctggctctccagatttcagtgtcttcatattctcgaactcctccttgtcagtggcagccccttcactggatggctttggaagacactgtggcctgtgcaccgtgcggggcagcagcagcatacatgtgcatgacggggtgacagcctgcagtgccagtgctggctccatacacaaacctgcttatgctgggcacaatcacctttatgaatctgagtattttcatgtgtaaaatccctgcttaccgcattgggtggtggagaggactgaataaaagaatcttaggtaagaaccttttacagagcttggtgcatagcagatgctctccaactcctgagctcaagtgatccacccacatcagcctcccaaagtgctgtgattacaggcatgagccactgcgcctggctgggtacatagccgatgctgaggatatgcttggtgctttcttcttatttccatgtctgggtgttgtaagttttcccaaagggataagaaacaaatgcttgtggaatccatgttacagataactgcatagcccttcttatgtagggtaagatgaagtcctctgggtactgttgattaccttctcataataccaaatattatattagcctttcatgtccctgaactagtatgctggtactttggccccagagtacagtctccaggactcctacagccaaacgtttagttgcatttacaaaatctaaaaagtgcgtgtgtgtgtgtgtgtcaggtgggaacacaactttcttttctagatgagaatatttttcttggactcttcacagtctcctttaattcaactaattcttcatttttaacaggatttggactcctaagttccctgtgccaggcaagggagcagctgagagtgtcttctcaggagctgcagtcctgaagcctggggaactgggtcattgctagaagaggcggctctctgcatgccaggagaaacccagcccaggagctgcagcccggcaatcccaggacagaagcgagagtgcaccctacatcttctcattctgcagccctcagcatggcacttggcacagggcagtggctggataaatatttgctgagttgtactaaatacaaataacaaggtttgattaaggatcgcatgaaggttggacacaccttcttgacaatacggaaataatttagttaagagtcacagatgctctacgcaggaaagaaaatgagtaaaataaagggaaacgtttcctacctatagggggaaacatcataaatattaggtaagtaatgaacattcaaaaaacttagactaggggccaggtgtggtggctcacacctgtaatcccagcactttgggaggccaaggtaggtggatcacctgaggtcaggagttcgagaccagcctggctaacatggtgaaaaccccgtctctaccaaaaatacaaaagttagctgggcatggtggcgggtgtctgtaatcccagctactctggaggctgagacaggagaattgcttaaacctgggaggcgggggttgcagtgagctgagatccaccattgcactccagcctgggcagcaagagtgaaactccgtctcaaaaaaaaccaaacaacaacaaaaaccacttagactaaggataattttaatggctggtagtttatgctttttcacacaagtatagtatgaaataaaaatcatctctggccttttggcacctgtaaaatcagtgtcttgcaggataaacggtgtggtcaagggacacagtcctgatctaggaggtgtagctgatgctccccattcctgggcggacgccatctcttgtgggaactcacagttctccctgtaccaccagtgagggctcctcaccctctatcctctattgtacctatttataaactcacacatagctacacagcagtgcacacttcctgagggtgagggctttttcaattcattcttgaattctgtggttcctcaatttgtggcatggtttcttgtaaataagagaccctcaggaaatcacgaggaagacagatactcaagcaccaagctgtaacccaagacaggatgaactcagcaccaaaatagaaaaaccactgcgggtgccatggagggcagtggggaagagtggggtaaggagctcaacctcccagggtcacaccctgcctttgtctcctcttagctgtatgagttcaggcaagttatctaagctccatggccaggggtgtctcgatgacacatgtgggcaacagcacccacatattcccagagatgttgagaagccaaagaagggagcggcttggagagagttctggggaaaagaacggcagttctgtgtggactgccaggaccagccctgccttctaaggtgctctggaacaggcccagtcgtctagagccctcagcgtccattgccacaactcagccaggacaataccatgtgaagaagcaaggctggcgcatgccctggtgcacactgctctgggatgtgttggaacagagcccaggaatctgctgtgcagcctcacaggcggccatctgggtcctcctgccgtgccagcttcctttgtgggctaagctcatcccagggctgatggagactgctctcccttgcaacctgcacttcccatcttgtcccctctcaggcagcaagcttgctgttctctttacaaggaagagcagaggagccattgaagccagcccctccgctggtctcaactacgtctctcattcaatatccccttccagcctgcttccgagtaagaagtttccattgaaatctctgctcgctgccaggaatcgtggccccaaatcacagggtggatccggggctcctgttggatcccacctacgcttccacatcagcccctgccgccgccccctcttgtgagggtctcgctgtatctttttcttttctttttggagactctgctactctggctggagtttcagtgacacgatcatggctcgccgcagccttggacctcctagacccaagtggcctttcccctcagcccctgagactctgggattacaggtgcacaccatgtctggctaatctgtgtattttttgccaccatgttgtccaggctggtctcaaactcctggcctcgagtgatcctctgcctcagcctccaaaagttctggaattttaggtgtgagccactgcgcctgacctagatccttttcttaaagctgacctctgaggacccactctctcccatccttctttccagtgtgtctgtccatccctctcgcctggttcgcctcctgctttccttcagctcagacccctccaccctccaacggctaacctgccctctctcatgcagtcaggaccctgttggctatcacttttaacatccttctttcaaagaacaccactgacccatcccccaaatccacagtcttgtcaattcctctccatcagcgaagactaggattctctggatcacgttcccccaaatttccatctctcgggttcaccacactggctctcagagctctatcctggtcctttcacctctcagaggacatcatagctgcctctcctgctccacaaagaaggattcgaactggcgttttcagccctaacctctccggtcagcactccttgctgcctctgtcacatcaagttcatcttagggttttcccttaaccacgcccctaattcctatcgcacagttaggcactgctgtctcctttctccttcctcaccgttttgcaaatttatttattagacatcggtttttctgcacagttcactggctgtaagagcttgtgaggtggggcctcatgacaacccagcgtcggtccacgttctccatagttagttcctgaatgtatgaggtgattgttcttcccttccgaagctttaaaataatacttggctagtttttccccctttcccctatcaaataatttatcacattctggttttggctgttgccattttttcccgtttccttgcatctgcctggacaccaccctcctccatgcctgatcctaccaagagggagcattgctggagtccccaggtgctcccctcccctgctttcctgtctatcccccatgccccgctgtgatgccttctgtccgggaattctcgggcataagaacccagagtggttctctgctgattaccccaagtctagcaataatgcctccttttccttacttgcctttgcaaaattatgactgacacagtgaaagagatctgacttaacccactccatcttgcttttaacatccaagctgtccatattcattcctgggcaaaggctgaattagctttgggagaaacttagtttacagtttaaacaaagatgataacggccctttcccaaagcagacctccttcttgcctggggactacattgcccttgtggaactaacattagccataagatttaaaattatgatttaggagtcatgcagctggaggctacaagattctgaccctccctaagctgctcctaagaccagtgttctgatattttgcagaccctgcacctgatggatcagctggcaccacccggatcaataaactggctcatctgatcttatggccccaacccaggaactgactgagcgcaagaagacagctccacctccctatgatctcatccctgaccaatcagcactcctggctcactggcttccccctacccaccaagttatccttaaaaactctgctccttgaatgctcgggggagactgactggagtaataatgaaactccagcctcccacacagatgccctgagtgaattactctttctctattgcaattcccccgtcttggtgaatcagctctgtctgggcagcaggcaaggtgaaccccttgggcggttacattatcgggttgaagtacaaacaggcacacaggggtccgccaggtggggattgggcagccgctgctgtctctcttcccacagccaattttcttactggaggaaaccaaccttcactccactccacaatggaatgaatacacagagcaggctctttgtatatttattgtttacaaaatcaggctctgtttacaaaacttttttgtacttgctatttttcacttaaaaaaaaatcacagccatctctctaggctaatgtctatccattgaactcatctttttgaatggctgcatagtattcctcagaatatacctactataatttatccagccagccctccaagttcctttactaacaaggcttatgttgttttatttcactacaaaaataatttacaaaaatgattacatgtattttgcatgtatttccagaatagagttttctaaaaagatatcgtcactttaccattaaaaaagaaaacattccacgccctttttagtaacatgtgatcatgctggtttctggaagcgctggtcacctttaattttattccgtccttggctttggttgagtaaagccacgtgtctcgtcatttcctggcccccagggagggtaagcgttctctcacaccctcaccgtccacagctcctcgtctgtgaaattgtgattcatatcctttgcctgtttttcttctttcttttcacatttttcacattgattcataatagctgtctgtacactgcggtgctaacccctttgcccaccttatctgtcaccagtattttcttacagcttattgttgatattgttttgttgtttttctattttgctcatggtattttttcccatgtatacataaacgttttcggtcattcagtcatttgaaaagaatcccagtctccgtggcctgcatgtgactttctcactaagccttgcattttggggtgagtggccgagcccctgacgggcctgttccttccggtgccctcaccaggctcagccctggttcaggccctgctccctcctcccagcgagtcctcctggggggctcagccctggttcacgccctgctccctcctcccagcgagtcctcctggggggctcagccctggttcaggccctgctccctcctcccagcgagtcctcctggggggctcagccctggttcacgccctgccccctcctcccagcgagtcctcctgggggcatctgactccactgactccacccctgggccgtgctgtctcctggtgatgctcagaggtgtcggctccctccctgatgaatgcctgtcccagcagatgtgtggctacggtgctagtgaaaaaagctctctttgatagctacaaaaaacacaaatgtgactgaagagctgattttaacaagtaatagacagtgttctgtattgctgatctatagggctgttctgagactacatctggtttatattcagcattttctatctttacttctccctaattcagattttagtaatgtggtaaaaaaaatttaaaattaaaaattcaaatatgttttgccatagaaaaatattactggaacttcccatttatacaggtatttgaaattatcttaatgatttttctagtttgcatattctttttaatttttttaaattattctacttattttttagggggaggaaaatactaaaagaataaagaacagacagaaaacttagagaaacctgtgtctacaagtgatagaatgtggaatctgtgacatatgttaagtattcactggggaggaaatacgttattccacagaaaagtcatagaaatgaaaatgttctgaaagttattaaatgggaaacatgaagtttagagacagggtatgggcttggaatagttttttttttttcctacttactgtgtcgttttagctttcaggcatctattttatcatctgcacgaactattccacaggaatgtctttcctgtgtgtttatgtgacggggtggatgtgaacactctagcatgtgtggaagaacccggaaaatgcacagggctccacacgtgtgaggggacgctgctatgtgcccagtgcggtagctgtgagttcactagactgtcgtcctcactgcgctctcctgctgggagtgcccttcaccatgagagaaatgcaccgctaatatcacactgccctcccttcaaggagcaggaaagaaaaaaagcatcaacaagagcattctaaataataagagaaaaccctaaaaaaacacctgcctcttgcagaagagaggagaaagttctagaaggggtggaagggaaaaggaaggaacattatgttgtcagcacagccgctgtagggggaggactgaaggaagtgagtgggtggtctctcgctgaccactgctgccgggtagtggttgagcatgagagaggccctcccgtgtgggttcgaagcacagaccctttgttcccgggtgatgggcgtgggaccagctgatgccgaaatccccgtcccagacaacactgcctgggcttggtgctcctttatcaaggggagtcccaggaggaggccagcgtgtagtgggattctcagggctgctgcaggtgacgaggtgggcagcggctctgcctaggactgccccaggggacagaggcaagtgaagagctacaagagagaggaaggaagctgccctctgtttcttagaatccaagatggggtcaatccagccatcagaaaggaagaagtgactgatatggaagaggagagggggaaatctgaaggaatggtttacaagaaaaagctgaggcatcttcccaggatggaaagtggaagagggaagggccggagaggctgaggtggaggaagcggtgtgcaggctgattgttttgaccacataaggaagtggtttgtggacaatgtggtctggaagaggctaggaaaccgggctaggagatgtgagtgctgctgtttatttagttcttttctcacacgcagagagcacacaacctaaccgtctacagtgggggccgccctgcctcagtgtggactgtacagaaccgagtgtagacaggccacctttacctactgagtgagggccgtcttgcctcagtgtgggctgtacagaaccgagtgtagacgggccacctttacctagtgagtgagggccgtcttgcctcagtgtggactgcacagaaccgagtatagatgggccgcctttacctagtgagtgagggctgccctgcctcagtgtgggctgcacagagccgagtgtagacgggccgcctttacctagtgagtgagggccgccctgcctcagtgtgggctgcacagaaccgagtgtagacgggctgcctttacctagtgagtgagggccgccctgcctcagtgtgggctgtacagaaccgagtgtagacgggccgcctttacctagtgagggccaccctgcttcagtgtgggctgcacagaaccgagtgtagatgggccgcctttacctagtgagtgagggccaccctacctcagtgtgggctgcacagaaccgagtgtagacgggccgcctttacctagtgagcgagggccgccctgcctcagtgtgggctgcacagaaccgagtgtagacgggccgcctttacctagtgagtgagggccgccctgcttcagtgtggactgcatggaaccgagtgtagacgggctgcctttacctagtgagtgagggctgccctgcctcagtgtgggctgcacagaaccgagtgtagacgggccgcctttacctagtgagggccgccctgcttcagtgtgggctgtacagaaccgagtgtagacgggctgcctttacctagtgagtgagggccgccctgcctcagtgtgggctgtacagaaccgagtgtagacgggccgcctttacctagtgagggccaccctgcttcagtgtgggctgcacagaaccgagtgtagacgggccgcctttaccttacaggaagtcttctctcctaggaacggaggcagcgtgactcctggcaggacgcaggcccagagtcaggggctcgctctaagctctactcctggtcctctccagcttgtgactgtggcaaagtcacttaatctctctatgccttgatttctccatctgtaaaatataaaaagcaatatacagcacctcatgaattcatcgccaccttagggagagacatacacagggcgtcctctttgcaaccgtcaacatgcacacagcagcttcctccaggaaccaaatgttctctttcatgtccatgagcaacgcattcccctttagagtttattctcctaggcttgacgcctgctgttcggactctgacccttgcccaggctcctgttgggagcaagccccagctgggacagcttgttctctgccagctacgtcagctctgtgctctgcctgatatggttccatgagctcccagttcctgtggaccagaagccctgcacacagccttatcctccctccttcccagactcggggtagactcagcccgtgtggcagcatcatggaggagctccacaccaggattcgtgctgtcacccttatttattctgtgatgtctccagggacttctggggtgagaggaccagcctagtctccttaaaattcatagaactaaaaaccttacaaaacactttcttacccattatgtcatttggccatcaattgaactttatgtgaattttatgaataaagatactgatactcagagagtatcagagagtgctcagaactccccagttagtcaggagataataattgaaactgaattatctgtgttgagatccagtatagttcttcccaccatgaattaaggcctgtccctacacatgctcaggaaggacccacaacgctgagacacgggtcagggaatttgagtctcgccactaggtcctcggggagccttgggtggtggcattggataattgtccccttatgatttccattccaaaggattcagtgcttcttgctctccagggttgacaggactaaacctctctgggctgttttgaacctcaacaggtcaagtgagcagagagcccggagccctgcgatgatgcagcttgatgcagataaccatcatggaagtgccgctgcactttctatgcaattcctcattagagcaacaggaaaccagagcgtagagttaaataagaaatacagggagtcataatagggacattttccccagaattcgcaaatcttttccttcgacctggaaactaacccaccttgtccacttctgctgaccattagggactgagccctaaaccctttccttgtgtacttaattttccccagagaacaatttcgtccatacacacagttaataagggatggagcatgtatgtcttgtcaagaacataatggtagatatgaacctcagaaggttaaaaatcctgattagtcccttgaaggagaaaggaattagaccagattgatcttttttctctactacattgtagtttaaaacaaaagaacttctcttacccctcctttggatacgataactcccctaaacattaccatgaactctgaactatcttacagaatcctctgttatgcgagaccccagagcccacacaattcctacccgcctttggatcttatgtgcctgctcctagtggttaacatggattcactgggggaaaaaaaaagaaaagaaagaaaaagagaaagaaaatgttcgcactgccctgtgaagacagattctaaatgatcagacatgctctacatgtgacccaagcaacaagcaaaatcttcaacgcgtaaacaatgtgcgattagacagaatgggttataacagcaccaccacttactacttcatgatttgagcatgttgtttcataagcattaatttcctagactttcaatgtctgaattaaataatatatcaaaaatgtctggcttatcattaagtgctcaataaatgatagtaggcagtgatattaatatcactggataccaatttattaatatacattttcagtttctaatttctaaatgtgatgatctagacaagcagcaaaggtcacatacagaaaattctggctccctacatatgaatgtgaccagttaatttgcccacccttgactgagggctgagtctctggcactctgctagacacgggtaatgcagtataaaacagatgggtaagatatcgctacatcaactcaaggcaaggtggagagaaagaatagacagaagctggaattgacacagttgaaatcttaaatatgtagaaaaataatttattttgggtgtaaagacaaatggaaaatatgaaagaacagaaaatttaaaaatataaaaatgtatttttgcataaaaaagaaattccatggccatctttaaatttaccaccccaaaggtcaataaatggaaaactcaacataatctattaaaataaaaaaaatgaaaacgagttaatacattggcaacatgctcagttttcatgctgtgacatatgtggggtgtttgtcttttttagtaaattattttataaagctatagttactttaaaaagcattttgcaatcagctaatatcaatggaatattagtaataatacccagaaacatacatatgactagctcatatctaaaaattaaacagttattaatgaatgacaagcaaagtatgctacaattcatattcatagtataaattcaaatgcgtgtgaggttcttattaaagttgtcatataaagcatgctcattggtgggattttatgaacaataaccttatgctagacaatgctccttaaagagccaacagaacaaagaataatgatgtgatggagaagttccttgcctgaaatccgtccacgttattctaatcagaaggtggctgtgcatgactccagaacaaagtactgcacaaaacctacagctcccctccctgggcaggagcagggcagccaggcagtcccctgagcctctgtggccacaacctggtgcacagagtcctgtcccagggcaggggttcgagtccgtcctccgagcctctgcggccacaacctggtgcacagactcctgtcccagggcaggggggtcaagaacctaccaaaatcccccttttgtggctcctagttcatttaaaaaaaatatttaaagtcagaggcagaaatttcctctgggaaatctattttaggcaagcaaggtctcagacctaatttgtttctgtttatttgcttttgaaaaccaagcattcacaagtggccatctccagagcttgacaagaagagttggcctgagtgacgggcacttctccctgggctgggcaggtcctgtctcagagggaccacagggtgggtgtggtgtgtaggggctatgcctgccccgctcctctgccctcccaatacagccgactccacatgacctgaggacagggggttgtttattttgggtttcttatgaatcccatggtttgagtgtcccacaccattctcttttggatttcttctccagtttgtggacacagagccccaggcattttttttcagaatggggacctccacgtaagggttctaaggccctgcatgtcagaaatatttatttcactaaggggataatgatctcacccaagattgcaaaggccctgaggctattttattctatgctatgcatgcgtggtgttcaggtttatgaacggttccactccattgccaggccagtctgcagtctaatcctggttcccctgggaagctcagaagctcagaagcacgggttttctctctgaacaggtctagggtcttctcttcctgttggttttctggagtttgatgagtttgatgtgtttaggtttgtcaaccttttttcattcttaatgcttgacattcgtgcccccatacaacctgaaaactgttcatctccgagaactttcttctttctttattaatttccccctctttatttcctttatcactattagtttttttgaatttctactactaaatggatttggattgtctaaatttatcttccattggttttagctttttttttttttttgctttttttttttatctctttcttctccatgttctggaaggttttctaaaatttacctttgacttcctcaattgcactttaaattttcagtactccaattttaattttcaaaattaggttttgtcacagtcacacatttgcatttattttggtcaatttttgtctttacaaaaggatagagatcatgtcgcaccactgtgtggttaatatctcacacaaggtacattatatgtaaacatttgatcaataatagagtgaagaaataaaggaagaaagaagtgagtgagagcgtctctgcacagggctggtgccacattgtccctgttcctcacaactgtataaagtgggtgttactagcctcattctgcagatgttggacagaagctggaaagggtacacaatttggccatttttgcacagttgatgagtaagttgggaaaggaagcacagggtgtcctgaagtaattcaggcaaaagtaaaatagggaacaacgtcaggacctcctgggttccctttgttgggcatgacctcttagcacctcagggttcagctgaagaaaaggcctcgttccaacctggtaccccggggattcttggtttactttttcattcctcgaatgggtcttgttacctccagatcctcttgctcagaggtgggggggtcaccttctttctacatggaaataggatggtggctgtcaggttttaaccctgctccacggtgagaaatagattttacatcttgatcccgtgtgcacatcctatgtatattatagagatttgaaaccgtgataaaatcaaacatttcacagaacaacaccttcttaatatgtatgacatcctcaaatgctttccattctacttctttttattgacattagtactgcctcctcagactggtatcacaactcacaaatgaattgtggccacagttggagaaacaccggtgtaacttagctggggtatattttctccatggtctctcgaccatgagacttggtgtgtgattgtgcggttggctctctgctgctgccgaacagcagcctgccttgacctcttctagcccaatacctcatcaccacttatggtaataagatactgaaaacattatctatgataccagttgtaaagtacagttgggtatctctcagtttcatgtagaattcaatttcaaaactgctttccatgtatgccacatgcttcagttggtctgtcattggatgccactggtaagtgtcaggccactgttgtgctccaggttgcctaagagacaatgaggatggaatgtatgaagtgactgaaggccttcggtggaccaagcattatactaactgcaaaagggtgtaatcatttgtccttactcacagggtagggtcaatgtttttcagggtaaatattcaacatgatactttagccttgtgatatgtgtccccacccaaatctcaccttgaattgtaatcttgaattgtaatccccatagtccccacatgtcaagggtggcaccaagtggaggtaactggatcacgggggcggggcagtttcccccatgctgttctcatgatagagagtgagtttcaagagatctgatggttttatgagtgtctggcatttcccttgcttgcacttctccttcctgccaccttgtgaagaaggtgccttgctccttctttaccttctgccaggattgtaagtttcctgagccctccccagctatgttaaagcgtgagttgattaaacctcttttctttataaattagtctccagtgtgtccttgtagcagcatgagaatggactaatataccttgggaattgctgagaaccaatctatgcctccacgtcaaccccacggtaagcttacaactgctccaaaatatgcacctgttcttcctgagtcccgttcccatttcccacttagacttgctcgattcccatggcctgctctgcatggggggcatctgtgcttctggtgtgtgtctctcaacacagcctcacacttcctgccaaaggctttttgggcttttccacgtgacgtttcacataaattgttgaaaaagtcagcaggtaggagggtcacttattaaacacccctcagccttctcctccaagttccctgtgacagtgaatagtaacaacccaggcccccagtccaggtttgcccaccgtcaccctggcccatggtcctggcctctgggtagctcctctcagcctcccagtgcctctcaacagagctcttctctccctcctgctgtgtggcttgattcccactgatggaccatggcctgtgggcctgctgctgcttcctccggcagccacaggggcttctctcctggggtgggtgccttggcacctcctgccccttctctatgtctttgtgagatgtccccttcctgtacctgagtcttcagtgccaccccatcacctttgaggtaagacagcaccctggtgtggggcccatgggtgcttagggctgccgagcctcctccatgtctgcacgccttcctgtgtggacccccactttccctgactaagtctcccctcagcctctgggagcagcacctgttctcatggccccaggcccggctgcttcaggcaccctcactccactccctcagtgcaccatgcttccttttccatcatgaagcctaatacattgattcatgcctttcgtgcatgccttctttcctgcatgagttctttcctgcatgcgttctttcctgcaggcattctttcctgcaagcgttctttcctgcatgccttctttcctgcatgccttctttcctgcatgcattctttcctgcatactttcctgcaggcgttctttcctgcatatgttctttcctgcgtgccttctttcctgcgtgccttccttcctgtgtgccttctttcctgcatacgttctttcctgtgtgccttctttcctgcgtgcctcctttcctgcaggcgttctttcctgaatgtgttctttcctgcaggcgttctttcctgcaggcgttctttcctgcaggcgttctttcctgcaggcgttctttcctgcatgcgttctttcctgcatgcgttctttcctgcaggcgttctttcctgcatacgttctttcctgcgtgccttctttcctgtgtgccttctttcctgcaggcgttctttcctgcatgcgttctttcctgcatgcgttctttcctgcatgcgttctttcctgcaggcgttctttcctgaatatgttctttcctgcttgccttctttcctgcaggcattctttcctgcaggcattatttcctgcatacgttctttcctgcatgcgttctttcctgcgtgccttctcttctgcaggcgttctttcctgcatgcgttctttcctgcaggcattctttcctgtgtgccttctttcctgcaggcattctttcctgcgtgccttctttcctgcgtgccttctttcctgcgtgcattctttcctgtgtgcctttcctgcgtgccttctttcctgcgtgccttctttcctgcaggcgttctttcctgaatacgttctttcctgcaggcattctttcctgcatgtgttctttcctgcaggcattctttcctgcatgtgttctttcctgcatgcgctctttcctgcatgcgttctttcctgtaggagttctttcctgcatgtgttctttcctgcatgcgttctttcctgcaggcattctttcctgcatgcgttctttcctgcatgcgttctttcctgcatgccttctttcctgcaggcgttctttcctgcatgccttctttcctgcgtgccttctttcctgcaggcgttctttcctgaatacattctttcctgcatgcgttctttcctgcaggcgttctttcctgaatatgttctttcctgcttgccttctttcctgcatgcattctttcctgcaggcattatttcctgcatatgttctttcctgcatgtgttttttcctgcaggcattctttcctgaatatgttctttcctgcgtgccttctctcctgcaggcgttctttcctgcatacgttctttcctgtgtgccttctttcctgcaggcgttctttcctgcgtgccttctttcctgcgtgcgttctttcctgtgtgcctttcctgcatgcgttctttcctgcatgccttctttcctgcctgctttctttcctgcgtgcgttctttcctcatgcgttctttcctgtgtgccttctttcctgcatgcgttctttcctgcatgtgttctttcctgaatgcgttctttcctgcaggcattctttcctgcatgtgttctttcctgcaggcattctttcctgaatatgttctttcctgcttgccttctttcctgcatgcattctttcctgcaggcattatttcctgcatatgttctttcctgcatgtgttttttcctgcaggcgttctttcctgaatatgttctttcctgcatgcgttctttcctgcgtgccttctctcctgcaggcgttctttcctgcatgcgttctttcctgtgtgccttctttcctgcaggcgttctttcctgcgtgccttctttcctgtgtgcgttctttcctgtgtgcctttcctgcatgcgttctttcctgcatgccttctttcctgcctgctttctttcctgcctgctttctttcctgcatgcgttctttcctcatgcgttctttcctgcgtgccttctttcctgcatgcgttctttcctgcatgtgttctttcctgaatgcgttctttcctgcaggtgttctttcctgcatgcgttctttcctgcatgcattctttcctgcatgcgttctttcctgcaggtgttctttcctgcatgcattctttcctgcatgtgttctttcctgcatgccttctttcctgcatgagttctttcctccatgcgttgtttcctgcacgtgttctttcactcatggcttctttcttttgcaccctttcttacttcagacacaaacacatcattatgtggtactctaacagtctgcttatagcctagtttctccatttcattaaaaaaaatgttatcatgtatgtttgatgtttacaacatgttgatatgggatacacatacatcgtagaatgcttactatagtgaaacaaattaacttgtttatcatctcagttacttttttgtgacaagagcagctaaaatctacttagttagcaaagcctccaacacagtataattttattaactttagttttcatattgggcattagatctctagacttgatcatcccacatatctgctattttgtatcatttgacttatatctccccatcaccccccacccataaccactgtttcactctcacctacgtgtatttgagcttttatttttaatttttacttttttgagacagggtctcactctgtcaatcaggctggagtgcagtggcgtgatctcggctcactgcaacctctgcctcctgggttcaagtgatcctcccacctcagcctccagagtagctgagactacaaatgcacatcaccatgcccggctaatttttgtatttttagtagagacggggtttcaccatgttggccagaccggtctccaagtcctgagctcaaatgatccacccccttcagcctcccaaagtgctgggattacaggcctgagccaccgcacccaggctgagctctttaggaaaaaaaaaaaagttccacatttaagtgagataatacaatatttttctttctgcatctgacttatattacgtagtataatattttctgggtatatctatattgtggcaaatagcaggattgcattcttcttaaggctgaataatatttcattgaagatatatatatatatatatatcccccacatttttgccatccatttgtccattaggttgcttctgtatcttggctattgtcaatcatgctgcaatgaacatgggagttgcaggcatccttacgaggcattgattttgtctcctttggaatttcctcaggaggattggtgggtcacatggtagttctatttttaatgtactgtttttcataatggctgtaccaagccacattcccatctacagtgtgcaaggcttcccttttgtccacaacctcaccaacccttgctatctcttgatttttggataatagctgtaaaccaaaaagtatctgagatgggtatcaatcaatttagaaggttattttgccaaggttaaggaaaaaaacaaaacagaattacagaaactgtctgtgcctttctccaaagatgaatttgagagcttcaatatttaacagggaaaactggcactttacataagataaggtgaatgaggagttgctacctgtggagatatttaaccttttatctgtagctatctgcttcggaacaaagggaaaggtaacttcttgcatgactcagatttcagcttatttttttttcttttggcctagggaattgtggtcccaacttgtttttttccattcacacagctgtccttccatgtgtgaggtggtaacttatgatgaaaccacctttgataaatggtaacagtgagaaaattctgggagtggaagatctgatccagccaatgccattttgcctttaccctcaagctgccaaactagctttgggagacatttagttgatagtttaaatgataattaataggccttcccccaaacccaactgcctttgtaaagctaatgagagaccacctggtgagggggaggagaggagcctgaattctgctaaggtgtggacattcatgatggtcagccattattccggaggtcctgcagagagcatctctatagtagaacctacgattggctttttgaggcatcttctcaggttttttgcatgtctgacacccatggctccatgtggaccccccaatagatgactctgtcactcctgtggccccactcagaaaccactcagtgcacagggggacctttcccacaccctgtgattgtatcctagtcagttggcagcaagcagcctgcctaggcgccccacactttcctcaaactgtccttgaaaatcccttaacctacaagccttccatgaggttgatttgagttaataactccatctgccacgggcgtggccagcctcgcattaattaaactcttggtttactgcaatgccctggtcttcatttgtgcagtgggcaggaagaacaggccaggaggttacaatgatggctttattttgcgtttcccatttgaggagtgatgctgaacaccttctcatttgcctgttggacatttttatttgttgttttgaaaaatgtctgtttacggccttcgctcatttgaggattatttgccttatttttactgttgatttgtaagagttatttatacattttggatattaaccccttatcagatgtgatttgcaaactttttttttccactctataggctgctttttcattgtgatattgtttctttggctgtgcagaagctttatggttttgtgtagtccatttatttatttttgttttgtcatttaagcttttgggtaacattttaaaaagtgttgctgtgaccaaggtcaaggagatttttcccaacattttcttcttggagttttatggtttcaggttttacatttagggcttgcatccattttgagttattattattttttttaatgtataagacaaggatccaattttattatcttccatgtgaaaattcagttttcccagcacggtttattgaagggactgtcctttccccattgtgtcctcttggtgaccttgtcaaaaattagttgcgcatatttgtttcaatttatttgggggctctttgttctgttccacgggtctatggttctgtttttatgccagtatcatactgctttaatatctatagctttgtaatataattttaaatcaagaagtatgattcctccaactttgtttttccttctcagtggttttttttttctttttttcctggcttcttggagttttttgtggttctacaaacattttaggatattttcccaatttctgtgaaaattgctattgttgctattgaagattttaatagggattgtgttaaatctgtatattactttgggtagtatggacattttaacaatactaattcttcctaatgaacatgaaatatcttttcatttatttgtgcctttttccatttctttccttaatgttttatagtttttggtgtacatatcatttacctcctttgttaaatttgttccaaaatatcttttttgatgctatcataaatgggattgttttactgatttattttccagctaggttattatttttctatacaaatgctactgatttttgtatgctgattttgtattctgcaactttgccgaattcattcataattctaacagtgcttttgtgtgtaatctttggggttttctacatattggatcatgtcatctgcaaatagagaaatgctacttcttccttctgaagtggatcccttttgtttatcttatttcatttcttgtctgactgctcttgttagtacttctaatcccatgctgaatagaagtggcgagagagggcatctctgctttctactggatcttagtggcaaagtttcagttgctccctgttaattatattagctgcaggttttacatgatagccttcataatgctgagaaacttttcttctatacctaaactgttaagagttttttttttttttttttttcatgaaagggtgttgaactttgtgaaaagctttttctgtgtcagttgagatgatcatggggttttaaaatctttcattctgttaatgggatgcatcacattgattgatttgcatatttgaaaccagcctcccattgcattttaaagattattctaaagctgtgcaaaggctctgcctttacattttgggcatctatggggtaaaatggagagtacaccaaggcagtgcccatctggcagaacttcagagtagattctcctgcttctcctcctgcttagctgcttttctgtgtagagagtgaggaaggtgagacgtacaggcagcaggggattaagaaacaacttgtccctaaatgacccttcaggtctgggggaaaacatttggaagaatgggaagccaaatgttttccccctagacctagatgtctgaagctgcaagtctgaaggctgactgtatgttgttaagttctgcttggctatgaacaagctgtgaaatgcagggacagttaggtgttgtctgggtgtagacagggcctgctgccagtgacagcagtgtgctaggaagaaaggcacatgggaggtgccactctgctgctgtctgtccatcatagccacagattcattatattggatcaagtctcggtatcttctggatacactccccatggctgctactacccagtgatcgatccgacgcccttctagggatgttctgtcatttaaagaccagggattacatccatgatcttctatgcaatggctttgtgaactttaagattcagaagccacacccacagctaacatcatacagaacaaagtaggagggcaaacacttcccgacttcaaaactcactacaaagcaacagcaatcaagacagagtggtgccacatatggacagacatgatgcagctcagcggaacagaacccataccaagaagtaactcacgcgtctactgtcaacagactcttcacaggggtgccggggctagtcaaaggggagagaatcatctttttaaccaaccggatatccccatgcaaacaggggtactcatttctgagtacttcagcccagtgagatggagttggtggcagcctgcctccagcatgtccctatctcacactgtgtacaataataaactcaaaatggatccaagacccaaacttggatccatataagaactaaaagtaggctgggcatggtggctcatgcctgtcatcccagcactttgggatgccaaggcgggtggatcacttgaggtcaggagtttgagaccagcctggccaacacggcaaaaccctgtctctagtaaaaatacaaaaaaattagccaggcatggtggcatgtgcctgtaatccgaactaccatgttaggctgaggcaggagaatcacttgaacccgggaggcagtgagttgcagtgagttgcagtgagccgagattgcgccactgcactccagcctgggtgacagagcaagactccatctcagaaaaagaaaaaaaaagaaaaaaaagaaaaaaaaaaactgtaactatacaactctcagatttggcaacatattcttaaatatgacaacaaaagcatgagcaattaaaaagtagataaattgaacgctatcaaaattttaaaaaacagacttttgtgttgcaaatacaccaccacaaaagtgaaaaaaacaatctacagaaggggagaaggtatttaaaaatcatatattgataagggatttctatccagaatatataaataattattataaatcaataatagaatgacaacccagttaacaactggcaaaggatctgaacagatatttctccaaagaaaatctgcaaaaaaccctaaacacacaaaaagactgtcaatatcattagtcatcagagatgtataaatcaaaactacagtgagaccatgctatacccactgggatgtccagaagcaaacatgagatgctgacaagtgctggtcacttgtcacttgctgtatgcagacagccctcattgcacttgaggatggccccaggtgctagaccaccaagggaatcagaacatgcctacgttgctggtgagaatgtcaatggtgcagtcactttagaaaacagtgaggcagctcctgaacggattcaccagagtcgagtcactatgtgacccagaaattccattcctaaagaagcattaagaacatgttcacacattcatataaagactgtatatgtttactgtaactttatttgtgacagccaaaatggaatctccttaaatttccatctactgatgaatggacaaagagaatggggctgatttatataataaagttcactaatgtgggatatatatgaattcatagataatgaaatatatatctgccataaaaagttatgaagcactgatagatgctacgacataaatgaaggtttaacacattatgctaagtgagagaagtcagtctcacacggccacgtctaatgattccatttacataacaagtgcagaatggagaaagttgcagaggcagaaggtagattagtggccacttggggccagagtcggggaatgtgggagtgatggggtttctttctgaggtgatgaaaatgttctaaagttgactgggtgatacttgtttgtatctgtgactatcataggcccgcttatttgtggttttccttttcatggtttcagatacccaaggtcaacaatggtccaaaaatattcaacggaaaattccagaaataaaccatgatgaattttccattgtgtgctcgtgatgaaatctcccgccctccagttccatctggctgggacatgaatcattcctttgtccagtgcgtccgtccacaccgcacaccctacccacccgtcagtcacttggaagccatctcagtcatgagagccaccgctgtggtaccgcagtgttgtatgcagggtgcctcattgcacttcagggtggccccaggtgatagagcaccgaggccggcttgttgtttatcatcgctccatgtcattagttattattgttaacctcttcctgggccagagttgtaaattaaactttaccgcaaatatgtgtgtatgtgaaaaaacatagtatatggagttttggcactatccatggtttcaggtgcccacggggggtcttggaatgtatcccacagatacaggagaacacgcgattctagaacccactgaagtgtacacttccaatgggtgcattttatggcatgtgaattatatctcaaagttgttgatatattcatgcgatgtctcaaggaacactcaggaaacacaaatgaagcaactgaagcctcctgagctactcactcctgcctcaacttcccacgggcccagcggtcacttcttccctggactcaggggccaggcttccctcgaatgacgcatgggaaccccctttgtgcccttcagctccaggccaagatcctcacccatcagcaatggtgtctgtggggcctctgacacctgcccatccagccactgggctctgcctcttcacagcctcacctggtgagccaggacctgaagcctagaacctgaaacattaacccaaactcattgcccgtgtggcccactggagcctggaaccggaggctcatggtcaccgtgagggcacaagggctcagatgcatgttgccatgctcagaattccgcttctggctataacctcggctgttgatcagggagtgtctgcagagccaggcttcagatcatgtgctgctctgcagatcggggacatgctggaggcatgctgccaccaactccatctcgctgggctgaagtactcagaaatgaggggcaattctcaccagaaaggggagagccctgctggcccaggtgggctccaagaagggggactgaattctgctaacacaaagcacccatgtgggttctgcagtgccattcatgcattcacatgctgctgcacggaggcctgcgtccgcacccgggcagtttggtttaaggtcataggtggagtccttcccacataaactttttaaggcacagggatggtgaagaagtgtttgctccatgcatcacaggatttgatcttgctggaactccattcatatgaccagaaatgtggatgcccatgccttttcctatgcagccaatttgcctagtaaataacaactaactgctaaggaagaaccagatcaagagtagattgcctccttgcaccttttaaatgaaataaaactttgagagcaagtaaagtgcatctcattattatttcattttttttcctgcagtgggatatgcaggaatcctgttttttttttttttcctgagcagtcagagagagttccactgcctctatctagtggcaaattggggatttaatgccttaataaccagcccttgtccttgtgaaccgccttttgtgggcggtctccaagttccttccaaacagtgacttaattaatgcccacagcagccctgtgctccagcaaacgtgataatccgcccttcactgctgacagccctgggaaggccggtcatcctgggagagaactgtgcagggcagagctcagcagcagcagaccagagtcaaaggagtgggtggaaggtcgtgtctgcatggaaggtgaggaggtgtttatcctccttcctctgcagcagggagcacaggcgtctgcttgctggcagcttctcaggagctccagcatctgtgtctgggcatcccggatgggcaccctgcctgactctgattcataatctgagtgctcagcccagagcccagagctcacagaagcaaagaaatgaatgcagataagatgtatttaggccaagaatggccagcaaggcaggcaatgagtgccaatgctggggcgagcaagaggactagatcccaggagctgaagtggagcaggcaggtttccggggaagaagattcactggagttccccttaagaggggtgctatcagccccatgagaagcagaagctagagagtgtgccagaaagaaaggctttggtgagtcaggatacaaggcttttgaactccgaattaagatatttggacttttttttctcttcttacctacaaagggctattggatttcttggagtgacacagcgttaaaatcaaaattgtgttttagggtgatcttttcggccctaattcaaaatgcaaattttctagctgggctggcacttgtatccatagataccaggtgtcctggtgtgggatgaatcataagctcgaccacgcgggttttacaaagggatgcatggcctcaagagcactgcaatgctgaagagaatgggtgcaagggcagggcctttaagcacacggcctccgaggagtctctgtttctggggacttaatttgggctccacgataatgatggaaaggagacagtgcaggcgcagcatgcaggatgttcaccagcagcgtccttatcacacttgatcctcacaaaaaggccacgttcttgcatggttgttgccaccgtgctctaaagataaggaagccatggctatgggaggccaggcagctcctcccgcagctggaccacctggaaggctacctcacctccatgcctgcaccttctgggctgtgaaacaggatcctaaaagggctatctttgggccttccaagcaaaacacacatcagggcacctcattaagtagcaagtgtgcaaggcattatatgaattacaaagttctctgcaaactcaagagactcatagctgctctggctttgcagctgttttagagatagggaaaaccacatgaggaaacaaaggtggaaggagaagcctgtgaggcaagggaaggagggggcgggaggaacttcccaccagcacaccggctgtccactctgccccgggttccaggacaggttctgtctcatatttcacttgttcatttccttcaacaatcctgtgaagtggcagccctttgtctatcttgcagatgttgtgtaacccatacaaagtgagattccggcaagcattccaactggggtccctccaggaatatgggtgggactcccaggtcaggaggctcgctgcaatcatggtacagcagaacaaaggaaagcttcacaaaaagttaatgagggaggggctggaacctaaaaggacacacaccatccactgttttctttaataaaatgtcaacttaggaaggaagatttgcattcatcttgggtcagctaaagccttgtaaggattcactcatcaattaggtgctaggagctttgtccacatccactgtttgggtgcaggggacaacgctgtggtgaaaccatacaaagccactgctctctggagcttagatgcccaggcagggatggcaaacaaatgcacagacacgtgatatgccaggggagagaggcattcagacaccagaacacagagcaagaagatggagagggtcaggaagtggctgtttcaggaagactggccgggaagctgtctgaaaacttggatgcctgagcagagaaattcctcctcctgcctattaagccaccaaagcaaagccctttggaatttaagatggggaagcacacgaaaccctagctcaagagttctcacagccgccatggcactgttcacttttctaaatgctgccaagccagacaattcctcagaggtccaggattctgtagaaataaccaggaatccaacacccttctctgtcacagcactcagtggctgctgatgcatgaggtagcttctgtgggaactggggaaacatatgtgaaagaagaactccaaagacaataaaagacaaaaataatatttagaatcaagagggagaaagaagctggcatgctggataagaaaagcaaaacatatataaatacatatgtatgcacatgcatctgtaatcatctagatcacgtgaagacacgaaaccacataggagctaccagtacatgcatctaagtgtctgaatttcctgccaatctgggcaacggcattctgaaatccatcagccagagcacagctaattaaagcagacccacattttcttagcatgaatttcaccacacagatggcaatttaaaagcatctacctgcttaaattacaatgtaaaggaggagatattaaaatcttgctaataattgagtccaaaggcctatcgacagctgtgctgcctcccctgaaagacagccaggtggggaggcaggctgggtctcctggggcttcacacagagccatcattacaggctggggagtggcttgggctattgccgtattcatggactcgtagactccacactgagagttgccctagagactcaacgctccctgcttatcgcactggtgaggccagcaggcgcctgcactcacctgacatcaactaacctccttcctttgtagcattctgcatcttctcaggtttgcaaaagttattcaggagaacagacaattgtgaacacaatctaattacccaatggcataggaagggctttgtgattgataacaagtccatgtcccagtatggacgagaggacctctgatttgaaaaaggaagctagcttgagagatgggcttccagccagtgccttcaactgtggatctacctgctctaagttgcaggttcccccttcatactgcgaaggtcacaataccttgctgtgtggtgtctgggtgaattacatgacaaaatacacaacatacagccagggtccaatagacacaactctttcatccccaagtaaaacaagtattatgaagactttgtagcaatgtttaagcacttaagatgtaactttgaaaaagtatactttaggttgcaaaattataagtataatcctatctatctatctatctaaccatccatccctccatccatccatccatccatccatccatcttataatccaacaaaacacagaagggatgctatgtgttcactgtcttcctgtatgtgaatgctaggtttctggggcagagactgcatttcaatttcttttatatttttcaaaattttggacctttaaggatttaatttgttgtttttatttaagtacctgtttcacctaaaagtattaataacatgttaatctagtgaaagcaggtatctgttttgtacacaagcactacactcttaaaattaagtttatttctcactattcgtgcctttatcctatacacacacaaacgcacacacgtacataattgattttccacatggattcaaaagagtaaagcctgcataaagaagacagtatagacccaaagcaagtggactctacttttaaaatctcagatgacactaagcaggtttgatttttctttctcttttcctcacttaataatattctagggcagacagaataagaccttcttgcctagtgtctgtttctctgtctgttgtctgccctcagacactaactcaggtcatagcagaagatgaagttggccatctccttgggttgcaggtcgagtttggtgcatcccagagccctcccgccatcccactggatggtggccatggagagacagaggagcagagggagagacaaaggaacagggatggaaggacctgcattggtcactagtaacttagcaacccatgggccaatatgaagagcaagattctcactgggtcatgtgctccagtgctccttttgtggaggagggaatcttgaagacattgggtcagattgaggcccggccaggccgctcatcggattcagcctttcctgctctccgccgtttatggcatggtgcatgctgcaaagcaatgcaaagttgaggagtgattagaccctcaaaccctcaggaagtagcaggggatccagggcctgaacacttggactgtgtcctctccacttggtcaatggattctcctgtttcacgcagagatcaacaactcccccagaaaggtgagcccaatgtttgtataggaggctgggaaagaggccctgcagttcctcaacaccacctacatttcgtttttgagttccagagagagaacgcctcctaaggagggctgctctccacctgtctacactcacgtgggcatattacatagagctgggggagccgctgatttgtgagttgacagatggagaggatggttttgacttgggtaagaaatatcttcccaccttagtacaatactagatgctggcttctgtgtaaatttagctttatctccatttctcacaaaaagaaattaatttggtgacttatgtaaggtcaagtaacatgcccgatatggtttcgctgtgtccccacccaaatctcatcttgaattgtagctctcataattctcatgtgttgtgggagggacctggtgggaggtaattgaatcatggcgggcgagtctttcccatgctgttcttgtgacagtgagtaagtctgataagatttgatggttttataaaggggaattcccctgcacacactctcttgcctgccaccatgcgagatgtgacttattcctccttgccttctgccatgattgcgaggcctcctcagccttgtggaactgtgagtcaattaaacctctttccctcataattactcagtcttcggtatgtctttattaacagcatgagaacagacttatacaatgcccaaggccactcagacaagagaacagatttggtatccaagcccagaggccctaaccccaagtccacttatctcaagtgatacataaatatattctcagtgtggggggttcagacttcatggataacactcaagttcctttagatccatgtcattctctgccatgcaggcaaacacctttgttagttttttctatatttgctctacatgtatctacatgcatgcatgcacacatgcaacctcacacacaggctgccacacccttagtcctactacatatggaaatgctagaattacttcattttttaccataaatgttatactgtaaatattcttctatttttttttcagtttgagttgataacatttacatgccagtgtaattattttatttattttttgatatggtatgctctgtcacccaggctggagtgcagtagcagatctcagctcgctgcaacctctgcctcctgggctcaagggatcctcccacctcagcctcccgagtaggtgaaactacaggtgtgcgccactgcacccggctaatttttgtattttttgtagagacgaggtttcaccatgttgtctaggctgctcttgaactcctgagctctagcaatctgcccagctcagcctcccaaagtgctgagattacaggtgtgagccaccatgcccagccgccagtgtaattagctatagcttgattgtcaggattggtgggggctgttattccatagtatagctacaatcagtttataaaactatcacgtgttgatataaattcagggtttcttttcctatttttcaccaaacactcaatactgtaataaaatgtttgtatgtgtctctttctcatgcacacatacctatatttctcaagggtagagatttatttaaaatttccagatgccaaggagtcgcccttcagagtgttctcatgaatttatcctcagcacaggaaggcgcacgttcacgaacacatttgccagtgtggggttacatctcacttgactgctgatttcatggtgtatttgtgtatgacagattatctgagtcagaataggtagttcctagacatgtctacctcctcttctatgatgtagctatttccttcatctttattacattgtttatatgcactctgcatacttaatcttttcatatcatagttcccccagtttactgctggtcttttggctttgtttacaaacttttcttgttcctaagttttaaactttgatctacttacattcatcagtcttttgtaatgtctacgttgtatgtggcacctaagaaggcttttcctattctaagggaaaagacaggctccaggattttctcctaatccttgcatatatttgattttcaaaatgtagatctttaattagccaaagtttatttgggattgatgtaaaacaggaacctgacccagttagcatagctccagggaccccagctgcctctgagcagctccttccagaagaccgaggaccttccctcctgcagcagaaggctgtgaactgcacaggtgagtctgcgtcctcagggtccctctctgcttagtaagtgacgatgggcagacacctgagaagagaaccacgggcaacgctggctggacggtctcccggaggggctgctttagaagggtggggagcttaggagggtgaaaggcttttctaaagaagtgataattgggttcctactgcctgagaaaccagccaagaaaggcccagactgaggacacagcaggtgcacaggtacaggagaaagggattcagattcaaggagtaaacaggaggcctgggatttgcagagagcaggggtggagtaaggtgggaggtgggcaggggaaggttgacatgggaggctgatgccccagacatgtccaggctgatttctagcagtggcaggaggcttttaaagggtttatgtagggagcaaatgacatagcttatgtttaaacagccctctggggcctagtcctttctgttctatctggaaaataggtggtgaggagtgagggtcgattggagaacatttatgaggacatgggtcatattttcacttatctggggcccttctgatcttaagaaacttagaggacaaggaagatgacttttacttgcattcattaaatgtgtaagtttaccagccgggcgcggtggcccacgcctaaaatccctgcactttgcgaggccaaggcaggctgatcacgaggtcaggagattgagaccatcctggctaacacggtgaaactccgtctctactaaaaatacaaaaaattagccaggcgtggtggtgggtgcctgtactcccagctactcaggaggctgaggcaggagaatggcgtgaacccgggtggcggagcttgcagtgagccgagatcgtgccactgcactccagcctgggcaacagagcgagactccatctcaaaaaacaaaaaaaaaagtgtaagtttactgagatgccactgtgaccaagacatcatgcttgcacagcagacgtcactgacacaagtggcagttccaaaatgtcctgagtgtaagccagcacaaaaggggctgaaaaatctcagggtcgggagtctgcaaggacgacatcttgtgtatgtctgctgcacttccctcgggcaagtgggtgcagcacactgttcgtaaaaggaataacctcagaatgttggttaaatatggccttacttcgccatggcaaccccacaggcacacatctactgaggctatgcaggattccttccaaattgggagggatttctgccagggtacaagtggattctttctctctcctcacggttaggagcacatgtcccagagagctccggtacccacctcgaagtggtctgacaagctacagtccatcctctgtgctggttaacatcttctcatgcaaatttaaatgcccttattttatgggacagtgttttccttggcaggctcagagttccacagcattaattttaggtattttttttaaacaaaaggatacacaaattctacctttaaatgatgatacaagtattgagagagatttcaacctctcctgttccatctattaacctacagaccttttccggtctggaagtatgccaacagataacaccctaagtcaaaggtcaaatgctgcacttgacctccaagatgcccgcttgggcctcttccaagtgtactttcctttctttcgttcctgctctaaagctttttaatacacttccattcctgctctgaaaaaaaaaaaaagaaaagtacacaatatgtgggtgcacaatgtcagttctttgtccgtatttatctttccaaaaacaatgattcaacagcctgcaaattgatatggtcaactcaggcacatgtgatggaaggcgggtcacctgcctacctgcgaccaaatactggcggaggcgtttcatcttaaataactacttttcagaactggccacagatactcagaggccagcatgtcaaatgtcagtcacattcaggactcacctacatggcccaggagagggtaaattttcttcaccatctaggaaagaaagcatctttcatgatacttgttgggttagcctgtgatactgacaaaggtgtgctgcccacatctttgtcaatgaaacagagtagatgtgagtcaggctattttaaactgcgccccagggaaagacactgtgaggtcatcttgatgggaaagaaaaaagagtagaggtggaagggacatcagggtgggggcctgagtcacctttatggccagtgtgggcactttaccgaatcctagacaccagctgcctccctcagaggagtgttgggctggactgcatagactcgtgcatgaactgttcatctcagctgtgcacagaatgtccattagagaagggggcagcctgtttcccaggagctgcctggatgttgcctgtggatggtcctctggctggcctgcgtgtgtgaagaactcggctgagctccgcccaaaattgtgtgggcaatctctctctctccacttcaggaggctggcataagcctacaccaacagattgggtagtgcctaatatccagtgggtgtggacgggaagctcccagcacgggctcctgaaggaccccacagaggcagaactcggagcagctcccctgccctggcggcacaaggcttttgctgtttttttttttttcaaacaacatagaggactgaatagttggatggggagcaacctggaaaggctgtctagcgagtcttcctcttcgacgaagtgaattcttctctttctcagggacgcagccttggaccacgtggccctctgatacagaagaatgtttgtctgtgggcatgaactctttcaagcattaacgttaaaatcaatgcaaaatgtgttttctggggtgggctcttccttttgagagaactataatgcagtgataagattgagcggtgttcactggattaggcacctttgaaattacccaattttaaagcccctcaattcaaacaaaaatttagggcagaattactttgccagcttgctttctttatatctggaaaacttggactctcttccgagaagatattttacgttgatttttaaaatacttctctcaaaacaaatgccaatttcaaataattctgaaattttttatcttgactataatctaaaaattaacatattttatctaccttctgccactactcttactaaaattaattctcaaaaggcacccattcaagatccctcttgtaggcgtcttggaatatatatactacattattattagctagcgtcagcctgcaaggtaatagaacaccagaacttattcttacaattactatgtgttgattagaaacaaaattaattaaaaaaacaaacaaaataacacagcacccaaacccgcccagtgcaggtgcacactctggttctgccttgctctttctggcatttggttggcttggtcatttcattgctcttgaaattccctccccttgtggctgacagaattcacttgataatttccaagctgctctttctattccttcctctgccaaattaaaatgtttcctagattctgttcttgagcctctactttcatccttggcaacttcattcactgtaggaatttaacttctacctctaattaaacaactcataaagctttatatccaggccggctttgttgttgccattggtttttttcctaccaaagcttctactcccaaatttccagtgtctgcctactttccccacgcaggcacccagtgacagctcatcctaagatccttccatagccagccgcagtccaccaattctgacttcctcctgttgtcaatatcatcaaggtgttctcaatcagcttcctacaaccagaaaatcacctttgagtcttccctctgtccttttcattttcaaccaactgcagggcttctgcatcttttcagccttagctctgacttagctcccaccgcgtggacgcgttccgcctgtcccaccacagctgcccgtgcccaggcctgactgtcccagcctgtactatctcactgggctcccgtgggtctgtttttattgcccccactgcatctgaaccatttgtacagtgatttttttcttttttactgtggacatgttctgtgtttttaattttataggcaaacccaatatagatggaagttcaggggccctggatggagggtaggaggcgtggggccctggctccctggcattgcttcttccctaggttggccacagcactgcctccaagccttgggcttcacagagcagttggaactcacagcagcgtgccccgcctcggtttgctctcctcaagctcccggagtgagtccctgaacaaacagttacacatagcctcctggtctggggataccagctccctctctactgtgattcccgtttatcagtctacagggtccttgaatgtgagggctgtgctgtgtttatcttgtctggtatttcacaccaaacagcagcaaatgatacttgttgaatcaaagtcaattttaaaattagcatctgtaagaaacatacagagtgattttcccataaaaagacagctaggttgggagataagtggtgtgtgatattccccctccactggaatagtgtaggggaacttctgagatcctttgagaaaagtaatcagattgttttaagctgggacatcaatacgcccaagtcttcctgagcacgtgtggtgcacccagctccctggtggactcacctgtgacagtgtgacaagggactcgttcaccgaaacacaatgcaagaacacagggacattagcatactcatttacataaatttacatataacattcctgtcacccccagctcccaaacctgcacactgaatgaattttttaaaaaggtagtgtgacctattgcaattatactcaaactcaatattcagaacaagatacatgaagcaaaagcaaaatctgaactaatcatgtgcctgattgggacaaaggcagagcttcagcaagaaatagaaaaccaaacatccagtgccaagttctcctcctaatcggtgcttcaaagtagcagggccagccctggctgcctggtcctgttattgttcatttaacagactttccctcagtaccaccatgtgccatgctctagttaggggtctagggcttgaagctttatttaacaattataataaaactgtggcctaggtgttactgtccccattaaacacacctcttaaaacttaaaaacacatttttacggcttcaccctatgccatatgacgtggccccagtctgtcccctccactgtgtgacaagggtgtgcgggggacgtgggtgagaggtttgctggggccggcccatctctgcccgcaccagaggagactgaggagaagggttcagagaccgggtgtcccaaggccgtgcccaggagggagactggagggtctgggttgcgagctgtggatcctggcagccctgcagggattctagcaggggtggcccgggccgagggaggcccaactgttccgcagacagaaagctgtctctcagctaaacacacgccaacaatagcagccaaccagctaattgctcaccacccactacaagctcagtgcgttagtaagaaagcggcttctcaggcctcgctggcttcctaggacaggaaatgcccgtggtggaggttgttctgcaggtcaaggttcgctgcaggagggcggggtgcccagtgcggcctctgcctgcctccccgaggcccgggaggtacagggaacctctccgtccagggcggggcccgctcctcagaggactcctgagtcagccaccccagggtgctttctggtggaatgttcttgaacactggcatagccttgtgcggggcccctcaacaccaggagggcgggtcttgagaaaacctgcccctctcctcgggagtggaaggctcgcctctgtggggttatcctggggccacggggtgcttttctctgagtgtggggccccgtcacgaccagcggagcccacaggacaaagctcaagagccccaagtgacgcccagagaagggcagcgtccaggcgggggcacatcggatcgctccacctggacccctcgccacctccagcaaaaggggagaggaagagagatgagccgtgcacagctgcctcagtgtgaaccccccatcgccgctgccgccacagactgagccgcccctgagagaggcaggtgcagctgcctcatctgggagatccgaatccggatccggatctggagctggccagaagtcaggagagctccaccccgggaggcagagcaccctcccggctggtgagtgcttccaggcacctctctgcccagcccagcaacagctgcacgtggagcaccctactctgtgttgtagcccaccacaggcttaaactcaggcaacagctgggccagtccatgttctgaacaagataccaaaggtctctgaaagggagattcggttggcgaaaggcacagacgctgccggatgacccccggccattcttggattcatggggatgatgtactgaccggattctgggaaataagccaacgtgtagaatagcgttgtcaagattacacaacaaaattagctgtcaaatatgaattgattattctaatgtatcatagaaatgcaaattaagaaatgacatcatgtacgaaaagatgcaatataatgaccaaagaatacccactaaaaggctggttagagggtatttggcaaagctaacaaagggtttacattcattaacttagcgcttccattactgggcgatactgggccacctgggtgacatctctgagtcttacctgcctgagtgatcaagggaggaaggtcagaccagcctggcttgatgtggcgtggcccaatttagaaagggtgtcagtggccaagggctcctgcagtgaaagctcattatacatggcagctaaggtgatttttactttagagctcaggagccataagcaaatgtaaaactgaagaatgtcactgtgttattattgtttctgcttggatgcttcctcatattcaattttgctgtcttgtagaggtgagttctatcacatgtggggtcataatgctgagttacctagaacaatgcttacctgaatactttgcaatgcttagccaataagcttttgactcatgctttgccctgctccttcaggcaagcacagagcagatgctggaagaatgaagggcatgggccccttggtctagcatctgggtctggcacagtgcttggtgccagcaccgatcagcttggtcagggagtgagcacatgctcgtagcccaaaccaggctcaggctctgcaggaggagcctggtgtggaaagagcaggaggctgtgggattgtggggttcatgcccagggacctcttacacttatgcctaaagcagtgtcaggattgaaactttgggggcagaattgaagggactgaatagtagatcgacagtcctatcattttgaaggtcagatagtgacaagagggaggctaggaatctatgtagtggcagagtaggaaaagaaaatgaaggttctgcaagacactgaaatgacagattttgtctgagttctgcacttgaaaggagaattttagaggaaattaaaaaaaatgaagtaatattttgtgtatggtgacaaaaattatcatcatggttctgaaatatgctcttgtcaggagtatggtataagataaagatcagacttagtattggagacatggccacaaacattgatttgtcaataaaaccatctttcattgattcaatagacttttcctgggaaccatcctgtgtgccaggaactagggacatcaggacaaagcactttatgtcttcaaggatcttaccatccaatgggagacgcaaaggaaaaaacattcattaactcgttgttaagaggcccagaaggggaacatcataaccaggaaaatgagggggacacattggggggcttctgtgaggaagtgatggttaaaggacaccttttttgagacaatcacttggtctctctaagcctcggtatccgtactataaattaggtactaggatgaatgctttttaaaattcttttaaactcaagtattacagaactttttaaaaagcttcagtttagcatcttggtattaacaactcagaataaagaatctgactaaatgtatcaaaaagagaaaggtaatattttattgaactataattacacaaggcaaatatttgggctaaagtgactagtgaatgacattcgtgactgtctaacatattcatgtccatacacatgtgtatgcctgtgtgtattcatccattcgcatgctgctaataaagacatacccaagactgggtaattataaaggaaagaggtttaatggactcacagttccacatggctggggaggcctcacaatcatggcggaagatgaagaaagagcaaagtcacgtcttacatggcggcaggcaagagagcttgtgcaggggaactcccatttataaaaccatcagatctcatgagagttattcactaccacaagaacagtatgggggaaaccactcccatgattcaattatctccacctggtcccacccttgacacttgcaggttgttacaatttaaggtgagacttgggtggggacacagcaaagccgtatcgatgtgcatatgacagatacagacatctgcacacacacacacagtatagctttccacacatgaaatgacttggatttgaaattaggtttatgtacatacaataatccaggttgtatttcactgaaaatatattcaatgttaccttcaaaattactaactgaaaagtctgtatataatttagaaagttattggcattttatcattgtttgcatatcattctatatggaccaaaaccatatttgtcaaagtcaaaaaataatagctaatatttagccatttttatttgcatatcttataatttatataacttttttacctgtaatgtaagggctcctgagaataatttaccttcttatagagttccagttacagcaacaactggctaatgtacaatttagtgtattttaaagtatgagaccagagaccaaggaaggaggcatgtcctgtagagcctggtgatgggcatgaggaattgtttttgtttgtttgtttagtttgtttgttttttaagatggagtcttgctctgtcgcccaggctggagtgcaatggtgtgatctcagctcactgcaacctgtgcctcctgggttcaagtgattctcctgcctcagcctcccgagtagctgggactacaggcgtatgctaccacgcctggctaattttttgtatttttaatagagacggggtttcaacatgttagccgggatggtctcgatctcctgacctcatgatccacccgcctcagcctcccaaagtgctgggattacaggcaggagttttaaatataagtgaagttttaaatttagattcctgttttgtctctaaagcatctgattcttaactatcattcattcgttcatttgttatgtgtatactcttttattctctaaataaaattgaatgcctattatttgccagctattgtaatgagtgattaagattttttaaaaataagagaaagcagttgacttcattataatttaaacatgtcaattttagatactttatttttggttttactagaaatgtatgtgtaagctgaatgtatatccttacaaattatgaaagagtgacaaatgcagttttcttcaatagtttcctgagaccaaatttgttaatttggtaaaacctgcctgtaagtacaatacaggtgacaaggaattatgtctcagcccacactgatatgatgtgtaatcattttagttgtgcagccagtggtcctattttgacttctaactagaatgactgtaaaatttggtgctcatatatactcagtctaattgtttttcacttcttaaaattgattcgggttttaataaagtccgtattaaattttgtctaaagcattagtttctggtttctcacattgtgaggacatacttattttgcgtttgtattaagcgtgtgcatgacagctttctgaaattatgcacccttcatcaccagctccaaaaacagcatgtttactctaatttcagcaaaacaactctttaacttcagaagttaaaatttatttctctgcacattttagagatgtggcatgtcaacatcactgggattcagggcaccttggatgctcagagctgtccaaaatctttctgaattcacagtggctgtgatacggaaatgaagccacaggcaagcttgcatgaaagagggctgggagaggtgctcaggatggagtgtcagataaggtctagttaactggagagatgaagtgggttttcccatggtcaaacagcaaagctgccagagcagattgtagaaggagggccttatacacacccctcccaagtgcctctcatcctgtggcccagagcagattctagaaggagggccttatacacacccctcgccagtgcctctcatcctgtggcccaaagcagattctagaaggagggccttatacacacccctcccaagtgcctctcatcctgtggcccagagcagattctagaaggagggccttacacacacccctcgccagtgcctctcatcctgtggcccagagcagattctagaaggagggccttacacacacccctcaccagtgcctctcatcctgtggcccagagcagattctagaaggagggccttatacacaccccctcaccaatgcctctcatcctgtcgcccagagcagattcgagaaggagggccttatacacacccctcgccagtgcctctcatcctgtggcccagagcagattctagaaggagggccttacacacacccctcgccagtgcctctcatcctgtgaccgagagcagattctagaaggagggccttatacacacaccctcgccagtgcctctcatcctgtggctcagagcagattctagaagaagggccttatatacacccctcgccaatgtctctcatcctgtggccgagagcagattctagaacgagggccttatacacacccctcgccagtacctctcatcctgtggcccagagcagattctagaaggagggccttacacacacccctcgccagtgcctctcatcctgtggcccagagcagattctagaaggagggccttatacacacacccgttgccagtgcctctcatcctgtggcccagagcagattctagaaggagggccttacacacaccctcgccagtgcctctcatcctgtggcccagagcagattctagaaggagggccttacacacatccctccccagtgcctctcatcctgtggcccagagcagattctagaaggagggccttatacacacacccgtcgccagtgcctctcatcctgtggcccagagcagattctagaaggagggccttacacacaccctcgccagtgcctctcatcctgtggcccagagcagattctagaaggagggccttacacacacccctccccagtgcctctcatcctgtggcccagagaagattctagaaggagggccttacacacatccctccccagtgcctctcatcctgcggcccagagaagattctagaaggagggccttacacacacccctcgcaagtgcctctcatcctgtggcccagagcagattctagaaggagggccttacacacacccctcgcaagtgcctctcatcctgtggcccagagcagattctagaaggagggccttatacacacacccgtcgccagtgcctctcatcctgtggcccagagcagattctagaaggagggccttacacacaccctcgccagtgcctctcatcctgtggcccagagcagattctagaaggagggccttatacaaccctcgcccatgtctctcatcctgtgacccagagcagattctagaaggagggccttatacacacccctcgccagtgcctctcaccctgtggcccagagcagattctagaaggagtgccttatacacaccccctcgccagtgcctctcatcttgtggcccagagcagattctagaaggagggccttacacacacccctcgccagtgcctctcatcctgtggcccagagcagattctagaaggagggccttacacacaccccacacccctcgcccgtgcctctcaccctgtggcccagagcagattctagaaggagggccttacacacaccccttgccagtgcctctcatcctgtcgcccagagcagattctagatggagggccttacacacacccctcgccagtgcctctcatcctgtggcccagagcagattctagaaggagggccttacacacaccctcgccagtgcctctcatcctgtggcccagagcagattccagaaggagggccttacacatacccctcgccagtgcctctcatcctgtggcccagagcagattcgagaaggagggccttatacacaccgctcgccagtgcctctcatcctatggcaacgaggcagaactcaggatgggacctgggggcacgccaggttagtctacttacaatgctactccctgaaaagaactttggctttaagaggaaaatcattctgcaatatgtgaaggtgaaatcaggaacaaacattaaaaaaaaaaaatctgggtttcaccttgctcacgaaatttgatttgaggtcattacattctaatagaggtgggtggagtaggggaatctattaaatcaactctccagggacggtgattggcaatccccagctgttttgtccccattcagacatgtttgaaggacatggtgcctggagcagccccaacggcccctggggacaggatggcactgtgccttggctgtgcccttgtcaggagcttctgtggtggggctgcgatgccacatgctttcccacatcccaggtgcatttcactctagagtcaagtcatggtaatgagaaggggtgcattacagagagggtcagctcaattccgacaaataaatgcacttgaatttccagaacctaagaaatgaaaacatgccagggtgggagttaggggcctgggttctctccagactccagactaagtagcttcgttactgtacacaggtcacttcatttttctcattaaatccctattgattaagaagctggttagtaagtcgtagggacattgaagggaaaggagctaagcagaaaacgtcggtatcgacacaattcaggcatatcctcaaagttatgtccagccgactcggcatctctatgaacacccacaacttcatgcgggtgcagaagagagctcctaacttctccccataatctccaccctcccaatgcgggtgcagaagagagctcctaacttctccccaacaatctccaccctccaatgcgggtgcagaagagagctcctaacttctccccaacaatctccaccctccaatgcgggtgcagaagagagctcctaacttctccccaacaatctccaccctccaatgcgggtgcagaagagagctcctaacttctccccaacaatctccaccctccaatgcgggtgcagaagagagctcctaacttctccccacaatctccaccctccaatgcgggtgcagaagagagctcctaacttctccccacaatctccaccctccaatgcgggtgcagaagagagctcctaacttctccccaacaatctccaccctccaatgcgggtgcagaagagagctcctaacttctccccacaatctccaccctccaatgcgggtgcagaagagagctcctaacttctccccacaatctccaccctccaatgcgggtgcagaagagagctcctaacttctccccacaatctccaccctccaatgcgggtgcagaagagagctcctaacttctccccaacaatctccaccctccaatgcgggtgcagaagagagctcctaacttctccccacaatctccaccctccaatgcgggtgcagaagagagctcctaacttctccccaacaatctccaccctccaatgcgggtgcagaagagagctcctaacttctccccacaatctccaccctccaatgcgggtgcagaagagagctcctaacttctccccaacaatctccaccctccaatgcgggtgcagaagagagctcctaacttctccccaacaatctccaccctccaatgcgggtgcagaagagagctcctaacttctccccaaccatctccaccctccaatgcgggtgcagaagagagctcctaacttctccccaaccatctccaccctccaatgcgggtgcagaagagagctcctaacttctccccacaatctccaccctccaatgcgggtgcagaagagagctcctaacttctccccaacaatctccaccctccaatgcgggtgcagaagagagctcctaacttctccccaacaatctccaccctccaatgtgggtgcagaagagagctcctaacttctccccaacaatctccaccctccaatgcgggtgcagaagagagctcctaacttctccccaacaatctccaccctccaatgcgggtgcagaagagagctcctaacttctccccaacaatctccaccctccaatgcgggtgcagaagagagctcctaacttctccccaacaatctccaccctccaatgcgggtgcagaagagagctcctaacttctccccaacaatctccaccctccaatgcgggtgcagaagagagctcctaacttctccccacaatctcccccctccaatgtgggtgcagaagagagctcctaacttctccccaacaatctccaccctccaatgcgggtgcagaagagagctcctaacttctccccacaatctccaccctccaatgcgggtgcagaagagagctcctaacttctccccaacaatctccaccctccaatgcgggtgcagaagagagctcctaacttctccccaacaatctccaccctccaatgcgggtgcagaagagagctcctaacttctccccaacaatctccatcctccaatgcgggtgcagaagagagctcctaacttctccccaacaatctccaccctccaatgcgggtgcagaagagagctcctaacttctccccacaatctccaccctccaatgcgggtgcagaagagagctcctaacttctccccaacaatctccaccctccaatgcgggtgcagaagagagctcctaacttctccccaacaatctccaccctccaatgcgggtgcagaagagagctcctaacttctccccacaatctccaccctccaatgcgggtgcagaagagagctcctaacttctccccaacaatctccaccctccaatgcgggtgcagaagagagctcctaacttctccccaacaatctccaccctccaatgcgggtgcagaagagagctcctaacttctccccacaatctccaccctccaatgcgggtgcagaagagagctcctaacttctccccacaatctccaccctccaatgcgggtgcagaagagagctcgtaacttctccccacaatctccactctctgatgtcttcttttccaggcaatagaatcccatccacacagctcctcatggcagaaactcggcagccacgcttcagtcttccttcctctcagtcccccatatcactgagtctttatgattttatcttcaaaacatatcttgaattcttttttgttgatcaatgcaatgatcatagtctgagctacatcatcgctcacctgactaatgcagctgctttctaattggtttctccactgccattccagcaccttggcattcaaatctccaatctgtttaagcatcaaacttaagacataaacatgtccctggcagccttttgttttgcagtcaccagtagcttccaccacacttcaatttaagactcattgtgcctgtcaccaggccctgcaggacatggctccttccttggtctctggtctcattttgttccctgatgccagccagtgagtgatgcaacaacagaggcatcccttggttctcccaatacacctggctcagcagtgtccgagggtccttcctgttccctctgcctgaaatagtccccccgcttagggctgactcctttactttaagcctcagcctagctgtggttttccttggaaaagcagttccaaatcactccacttagactaaatttgccatctcgtttgttcctcaccacactgtttgctgcctgcacgatattcttattacaacatgcaattgttttatgtgtctgtctgttggtttctgccaacctttctaagttctacggtaactgggaaagtgcccacgttatttcccattgaatctctatcacccagcacagagcatggctgagacgccctttggggtattgctgttgctaatgagacttgaaatcatttatttctccagttatgatggtggttctcttgtccaggaaaacaagtaatcagattcagttgattttttttttttttttaaactgtagctttgggccagggacggcggctcatgcctgtaatcccagcaccttgggaagccaaggtggccagatcatatgaagtcaggagtttaagaccagcctggccaacatggcgaaaccccatctctactaaaaatacaaaaactagctggtcatggtggtgcatgcctgtaatctcagctacttgggaggctgagtcaggagaatcacttgagcccgggaggtggaggttgcagtgagccaagattgtgccacttgcactccagcctgggagacagagccagactccgtctcaaaaacaaaacaaaacaaaacaaaacccccccaaaaaaacaaaaaaacaaaaaaaaaaccccctacacacttcaaactatatattcaaaactacagtttttcaaaatatacagttttcaaaactatacattcaaaactatagttttgaatcctcaaatcactgtgtaacctcccctaactcccagcaccgactctgcacagcctggatgaacacttgtgttgtgtccatgtcttgcttttcttactaggttataaactctttgagaggaggagctatgtcttggtgaactttgcattccatgcagacgtagcatgggttcatttggacagaaacctgagcaataggaccgggactacaatacgtgctcgctgaattaaacggcattattttatgatgtgtgcctctcacgggactattagaatggcctgcactgtttaagattgactttgttagaaatcatgcccctttttatcactattattttattataactggattccatagctagagtttggggttgtcttttaaatccaacattatacaattttaagtgtgtctttggttgagtagaatctcaccctgttctcaggtgaccccattatcttctccccacatcagtgaatgacaccatcagatctaacatcaagccaggtgcttggattcccctgacttctccttcctgccatcaccaccctccttcaaccattactcaatggttggccagcgctgcctccctggcgtctctccactggcccagttcggctcatcttgtctggacgccatgtttatttgtcaatatttctgtagcatatcctagttgctgttcctgccaccaaatatctccccttcaaatcgattttttatgtgtagtcatcagtcagaagtaatgtgacgttgcttgtttgcttagaattttttttttagtgggttccagtacactctggaacccaatccgaactccctggcatgtggaaaggtcacaggtggtgaggccctggttgatgtgtccagctgtccctcacacaccctcttccctgctggacatcagccatcctgaacccacaccccagctccccatatgtgcagctccctcacccttctctgaactcagcccttcttatgttcaggcatcactctttccagggcctcccctagggtctggtccctcctcctcggtgttcgtggctcctttcgccacagccctggcacactgggttgtgactgtttagccactgaccaccctctctgccgatgaggcactgtcacctctagctccttgtgttatgtggctaatttcccggtacgtggaacagcactggcacatggaaggcagtcagcaagcaccgggggaatgaacagaatctcacggagcgcattttccccaatattgataaggaataatcatggggacattatggttcacaacactctctcacatgtattgtggtatttgaccctcacaatctcacaatgactattttataaacattctacctatgtctaggcatggtgactggcacctgtagtctcagctactcaggaggccctggtgggaggatcgcttgggcccagaaatttgaggctacagtgcgctatgattgcaccactgcactccagccagggcaacagaatgagacccactttcaaaaaaaaaaaaatctacatatgaccttgatgtatgtagtctatggacaaatcttcagttcaataaattagtaaattagtcagaacctccgtttcctgactgttagggaagtttaccatttgcaggaatgttcaaaggtgaatttatgaaggtgaaaaggtgtgaattgctcaggaaaaacatgatagacgataaagaatggatatgactttgaacgtcacaggttctccacccatcaacaaaatcaaagatagacaactttaacagaagactggtgatgggttttgatgaggaataggatgagttcatttgggcatagaagttgagctcacacaggcatgcctgcatcagcccgctcatgcttcctccatttaaaatttactcagcggagtgtgactagggacatgacacttgggaaggagccaggaagactcttccacgtggaatggctgcaggtataagtgtgtgagatggatcaaaccaggagacccttattcatgcctggctgcaagaagcgaggtggctaagggaacacagacatgacaaacaggcagggacaacacgtgatagagtcatagaaagggcatgcctacaggtgtatgcgtgagggcctgcgaaagggaaatgaagctaggaatggactcttgcacaacatcccctcagcatttaggaatccatcttaatatgtgctgatcacagctggcgatatgtgtcagggctactatttcagtctcatttcatttgtcctggtgttctggtttaataatcctcctagggctgtatatttggaaactagtgatgtgtcctcagcacttgacactgtgctgagcacacgtgtactctggattcttgataagtgactgaatttctacgtgtgcccaatacattcttgtacatgcaatgtacatatccagcctgtccttatgacaagtttccttggctacaggatggaaagtttggaactagggagggacagaaatcatccatgcagattaatctttaaaactcgattctgagaatgtctgctctgtggagtcagtgtgaggctctggtgcaggcgaccccctgaccaaacccagggtgtccccgttccagaagttccctcgtagagcaatgtgtatttatcatatgcagctggaaattacttttcaggcaggaaaattaattataagtaaatttgttatccacatttttaagttctggatggaaattgaaatatgcccttataattagacacttggccactcttcagggaaaattacgaacatgtgatattttggaaaaagcatcaatatttaattttttggtcaatttctgaagaatggatcattgttgggggctggtcattttgggggtaattatttaaaagtttgaagtaaaagtagttttattaagtgtattttttaaaatttcatttattattatatcaatttgaggttaaaaaactataattaactggtttctacttttctacttgcatttgttgaaattgctaattctgacaccatctccatagtaaccaatgtgcttagaaagcagaaaaataggaacactcaaataaggcaaaaagagaaacaggacaactcatggtgaaaaataatttcttttattacactgccttttctggaaagatacatttgtttataaaaatgtgtttacgtaaaattgcaaactacctgacattttatccagaaaaatgttacttagcagataaatataaaaatatattactggtgcattaataattttgcttgaggtaacttgaacttttgaattaagttacagctttggggaaaggtggaagttaaattatatggcataattgtactattaatgaaagctgatgaagattgtgaaatcgccacatttgagtcttgtcaaggtcaattgcaaatccaacatgaagtgttttacttgaaggaaattgccttctttcccttgaaaaagttcaccttctagatgggaagctactgggggagagagaagttggaaccctgctgggtcttggtctactcagagtagccgcccaagagctgctcagtgctttgcaagctgaattggaattaattgcagattgggtcatgctatatttacttttcgttttacaaagatattctttgtctcttatcaaatgaccaaacatcagaaaaattttctgttccagctcctcatgcttctggggcagagagtgtttggaggtatctccctccctgcagaaggagcccgtcccccatggccggccccaggaggacctttgcctctgcttgctcaccggaggcaaatttctctggtttcattatggattttccggaaagaagggaagggcctggtacctctatcttgcagcttaagcagatggttttaaagtcagacatctgcagctgtatctagccaaaatctttaataacaaccatcttcctactttaaccatcatatacagaacctttgaactcaaagattctctgtagaaaagtttcttccttccagtgagattgtactacaaatctaagtcccataaagaaatagttttgtggagcatctctccacacccctagctcttttaccaaaaaaatcatctttaagctaatcttagaagtagagttttgttttcaagacggtagatagcacagagtgtctcctgcttcttgtaagtctgtttaaagccagagacattcagtggcaagggaagggcaccctctcgaggggctgggcagctcaaaggcagccccgcaatcctgaggatgaaccccagatgctctaagatggactctgtctccagatgattctgcccatctgtaggctgatacgaatcttctgggcaagtttaaggcaggtgagactaagctatcacatttggcaggttatgtggattaaatgcattttcaactatgagattttttacttctgctgggtttgttagggagttgtcccaccataaattgaagagcatctgtcttgcaactttgagtggatctctgaagaaccctgacaaatgcaaacaatttcaaataagccttgtgatacggagcatatttattaatcctaagcaattatattatttccatgctcaaagtcgcaatgctatgtgtattaaattcagtcacactaatttacttattttctagaaaccttgttctaatatattaccttcaattaatagtaaattacaatgggaatgccatgaaatttcttgttatgttgttatcaggtctcaccattggcagaaatttaaaagggcctcagaaccacacaaaggccctgtccctgcaccaatggtcccggcctccctgtcacccaccctgaggttggagccactatgtggtctttgctctgctctatctgttcccaaagcaaggcatctgcccttcgtctctaagcctcaaacgcccggcatgcatccagctctcaccacacctgtcctcattcttgatgtcatgacagcaggcgatagcctcccaggcccatgttctctcccctctgcccttcccccctgctcttccctgcaggcagggtcttcccaacactggctccggcagccctcacctggtgccagcagcactgcaccgggggtggcacgtgtgctcttggactctggaccagtcttcctctgtttccctaaaacttgtcagctgtgaagctcagttcatctaagactcaaagcgacaccctgatgtggccccaagcccggggacctcacccacgttctttgagggtttcagcccctggttcacagctatcatgtccaaaatcactctgcaaagattcctgatggcttctatgccctgtggatgattcctccaaaattgaggactcttgagccctcaatccctgacccctgcctcggccacctagtcccttgtattaaatgtagtcacacaattcatttattttccagaaaccttgttctagtatattaccttcgattaacagtaaattacaatgggaatgccatgaaatttcttgttatgttgttatcagttctcaccaatggcagaaattaaaaggggcctcagaaccacacaaagtcattgtacattgcagccacaccctacaatgtgtttgttaacttaattacattattccaagttcataaacgcggtgctttctcccctgggacagtcccggccacaactgcctccagttccccttccattctttcctggacactcctgcaagacatcttgaaagagctgtgcccactgtctgtgtggcctcctcccccaatgggtccatgtcttactcatgggtgactggctcccttcacccccttccttgccctgagctcaggggtggcatctttattttgctccctccagtgctgcccacatcaggagcaggcctgctaccctggaggaacccaggaatatctgttgaatgagtgaatgaatgcatgaatatggtacataaaaacttctcaaattgttcataccatgactaaaataaatattaatttacaaataatctctattaaacataaggcaaaattttgactgatggagaatttgatggattagagagaagacacgatttttatcattttggctgacagagatgaattcaatcaaacagacatttgttttttgaaaaaaaatgagtaaggagagagttcaaaaggtacttttctttcatttttaatttaactgattaaagtattagttttctgggtgaatgttttacagtggttgtgttattatttctcttttcctattaatgtacatacatgttctgttaacctgtcttggcttactcagatacaggtccctgtgcactcccatgttagccatacacaaatagatatatacaatggcaagacagtacctactgttcatacttgtctataaatcattgcacaattttagttacaattaaagtctttctgtcacgatacaccacactcatcactctcagtcacagctaactatatctgaagttatcaagataaacttttatcagcagttacataagcgtaaagttgcaaatgcagatatggtgtgcccatagagtatcaaattcctgcaccaacactccctgcatcccagcaacagacacccagaagttctgatcgtggtacaatgggacaagaaaatgacatgcattcgaaccacagcacaaaactctgcaacgggcttttgaaaatgctagagtctctcctcttagatgcagcctgagacaaagccttcttagaatcttagacgtcttctttgaaatgactctaggtctttctaaatatttgcgttgatagtataaacggacccatgattaaccatcttggggagagatggtgattgggcgatgggggccatggctagccttcttcccccaaaacccaaccctggtttcgtatacaggccagcactttaaaagcgattggtgtctgtagtcactttaaaaataattcagctcacaacaaggactccgtgttcccgatgcctcaacccctacctctattttgggatgcaagccctgttatcactgaacagaatgacattcacagcaggtacaactgacacatggaaatttgttggatcagttgcactaattggatatctgtgcttgcaaggatgatggcacaagtaggaggtgtttaaacatgtgagttcagaaccctgtttatggtccatttccatgtaaatgaggagcaatggcagtttaagtgcaaggtacctgataatagaccaagggcagcccccacactgaaggaatgaaggcttgaacagaaagtctatgaggaataaaagaaaactgtgtttttctcaccttcctgcatgtaagatttatgcaagaaactcccattagcactaatgagagttatgcatgtaaatctcccatgaaatgacaaggatatgagcctcatccatcactgtgcagatatcacagtttctggggcaggcttcttgcaggcagactgctgcactgcgattgattttgcctgcccttccttaaggtgctgaaacagcaagcctcctgcagcaggcctggtgggagaggctctgggaggggtgtccctgcagagccatgcaggggccaaaactcctgtctgcaagtgctttgaataattcatagagcatcatcaaaaccacccacctgctcatgaaactgtattagaaaaataaaatgaataacctcatagcctgtggatgggatcctcttttgctcacccctctcatattttatttattttttcttaagagagcatgcaaagcattttaaataagttcccagcaatgaaatgtcccaatttccctatcctctgctcatgtagttgtactgtgaatgcattagaaattagacaaattgcctttttctcacacaggacctatatttttctgcctcagtgcctttgctcagctggtggaagattctttccacactattctctcaaattcaataaagctatttggatctccaggccaactttcttctttccaagggcctggtgtccctatgtttgccaccaatgatatggctctaaccctccctccctgtggtcctccatgggtctgtcttagctacatccccagggtgcacatcctgacctgctgtggggtccttagctcctccagggccgctgtcgtcttctgtatctttgggacccttttcagattcaacacattgacttgcacatggtctctccgtgaatatgtggtgaatataaacatgaataatttattttaaaaaggaatgcacatatgcatggcacagcattcttaaagcttcaagagatatactatgaaaagcaatttttctccccccaggcacctaattccttccctctgagacaacctgtcctgtggtcttcctctgaagtccaatgcactgacaagcatctacgtatacatacatgctttttataatacacaaatcataacattacatgcatggttttttcaccctgtacattttgtttaatattatatcttgggctaggtttatataatctccttcattaaaaaagcaaatttatcatgctccattacatgaatatagcatgatttatttcaccagtctcctatggatgaatatttgtttccagaatcttgttcttataaacaagacttgtaatgaatgcaataaaaatagccaacatttctaatacaaaaatgcttgctaagtgacaagtgccattttcactcattcaatcaatttttaccacaactgtcttaggtataaatactgtgattattcctggcatacagaaaaggaaaccacagcaggtagagaccagtagctcgtcccgggtgaagccacacttggttcttgcaggtgtggtcagaggtcatgctcttggcttctgcactggctgtctatttataaatgctactttgctctcctgtgtgtaaatatttgtacactaaatatctagaagtggaattactagtacagaggatacaccctttctgagcttcattgatattgctaattattttctataacccatacttttcaatactttgctatcagcctgcctgtctactgtccactgagagggaaagaaagccatgacttagtgactccacttggaagttatggtgtcatgagtttgagcagcttttctgatgtcaaattcatttttatctcctctgaattgtcttccatatcctttgcccatttttagttaatatttttatttgttaaatttaatatgctaatacgccactacgtttacccatttatgctatattttaatgaagtaatttcttatttattagtacaatattaaaacaatacctgcactaaaatttccacctttctacattgtcttgaacgttcttttgactcagcaagatttattcatttcatttctgcagtatctatgtttaagtttaatgtcttacatggacctaaatatgctcttcatttcacttggccatattctattaattcccacccatagattttacgctggatttatttatttatgaaagatacctatgatattaacgctaacatgatttttatcctggtcaaattagaattttgtccacaagactaatgaaaatgatacatctgcgaattgctcctcctaacaaagtgtacccccagtggccattctagaaccttctatggaatgtgggtacatgagaattctccttcacaagtgaaaagaaagattatgtattactaaacattaatattctctgggagatacattgtatgaggcttagcatattgaataaactcacacatttctatttttggaagaaaatttaaaagctcaacaccgatttttcatgataaaaatttggctaactacatttaagaaggatgattgatctaagcagacaacgaagtctacatacaacaagcttaaatggaagatgctgctagttatttaaataggatatgcttctccaaacatactaacaatagtaaatttttatgaatatgatggtatataatctttttaaaattagaactcaaggaaataatgtaaactactactaaggagaaaatacgaaacagtgaacaaagtatccagcttaaaccaccacagtaccatttcccagcaaaggctgcagaacacaaatttctttccaggcttctagaagaaaaattgtctccagggaatttgtagaggtacctccttcaagacatggggctgtccataaactgtggagtgtgtcagaccttggactgtgagcttgttggaggcacagacccggctttaatgcagacactgtgcaccaagcacctcctccatccgtgttactgcttctcattttgtgaagcggggatagagcctgatgcagtctgatattcaaaaccattagtaccagtaatctgaggaaccactttagcccactccacggtcttccaatcccttctgccctgaccagaaaaaaaataaaataaaacttataaaagaattctgatgaggtcagaaactgatacctcttcctgagatttatgtgaatttgtgtagctccagcaaaatgtcgtgcttgcttgacaacttcaggcttagaaagtttcctacttctgttccaaggggaaatggaaacaagggcattcaagcttagaaattctcttgtggaaaatccatttgtgtgaagcttccatggacctgtggggcacctgacaccgctgggacctctcagctcacacagcccccagaaggacctataaggctgtgccacacaccagaggtaggtggtccatgcgctgactccactaactacagcaggactctcagcaaagcaaagagaaactcatctctggcaatctcctgcctcccatcctcctaggtggacccctggtgtctaaatcccttgacaatatctgactgccccttagatctgaatccccctaagcggtccatggtcctgaaccacatatcctattttccaactttgcttccatcagggtgtcgcctgacttcaggtaattgtcctcagttaggaggaaggagatgccatgatttgcagtttccaccacactccggaataggaggacagggatcagtagtttggcatcctactctcctacagggtggtggcctgtgactttgataacacaagtcatgagaaatgcaaatttctactatttcttaaactacagtccagaaaaataaaagctcaaacaattttatttatttttaactatccataatattttataacatcacattgcaataaacattgttttaatgaaatcataacaattatgatagaagcaacacaaatgaatcactctgaaaacaattgaaaagcattattccatgagttaaggaggatcttgacaaagcaagactcaaaattatttggttgctttctggggaaacatgtatgaggatgatgactataaagttatattaacggcactgagtcattaaagcaaaacaatttgatttggtagcaacctagcagttccacaagttctctgtgtgtatatacacatagtacattatctatgcacacaagtgatatatattatacacggttatcagagagacacaagaataataatgtataatacctgcatatggctttgtagagatagtagagtgagttcacagtagttaacaacattggcttggaagttaaaatgcctacataaatttgaatcccatctgtgtcatttattaactgtgtaatgttagacaaattatttaacttctctgtatattaattttctcctaacataaattatgaatatagatagatagataaatagacagatagacaaggtttgggtctgtgtcctcacccaaatctcatcttgaattgtagctcccataattcccacatgttgtgggagggaccagtgggagataaatgaatcatggggaaagcttcccccatactgttctcatggtagtgaataagtctcatgagatctgatggttttataagaggtttcccctttcacttggtcctcatttctctcttgcctgccgccagttaagacatggctttcgccttctgccatgattgtgaggcctcctcagccatgtggaactgtgagtccattaaacctctttttcttcataagttgcccagtcccaggcatgtctttatcagtattgtgaaaataaacttatatacgtgtgtgtgtgtgtatatatatatatataaatatgtatatagtactaacttcatagggggttttttgacgatgaaatgagacatggtgagtggcacttttagaaccaagcttggtacagagtggatgcttaataaatgattagcagctattatcatcttttgtagtttacattaggttcatgatatccatctcacttgaccatttacttctgttttacaaaaaaaagaacaaattttttgtagagatttgcccaaaaacaagtgatcgctggcagtttcaggactacctgatgacatttgctcactgttttaaatatatttctttcaaagggtcaaagaatatagatttacagagttggagctatttcagcagatttctccttctggacacgatatgcttttctttaaaatagtcaccattcagaacacaattcatgtagtttttcgggaaacagatattgattttattttaaggacagtctttagcatggaaattggatgcagagtgtgattttctctttgggctctggttcaggggaaattggatttcctagagcaccagctgcggaggcgccacaggtgttcacggctcagcaatcacagtggctaattgggacacacgaggacagaaaaatgccctaaatctaaatcttgttctatggcatttttatttctcccataagatcaagccccaaagtccttcttaagtggagatgctaaaggaagctaagctgctgcagacagaaaagatgacacatggtagggggagcactgcaggggagggaagagctgagagcggcagaaggtagcgggacttggggttgtgtgcaacagctgctgctttgccgtggcggtggtgctaagggcctttccatctgagtgtttctgattctgagttgtaatctgagggtaggactagcagaacaattcctggagtctacagttggacaaactgcacaacagctactaaaattgaattcagaaagttgaatacagtaacatccaactttgggggtagaaaggatggcaggcagatgagtgaaagaaagtagtcatcaatttcaaggactgagaggaggtatgcaacttcttagagaggaccattctgttctacgttccatctgatagggtaagaaatagaaccacaccccattctgtctctcatggaccacagaacacagacagtacccatgctcattttataaacaccaaacctaagccatggggagctaagccctttgtcctaacatgcagctgtacgtgacaactgaatagtattccacgtccattacttgatgcttcccatctctaagttttgtatttttcttctctcaagtcagccatttccagatttattcatctaataaactaatctttaaagatccacttttggggtgatctgctcttcaaagtcctctttgattcctctgctcctagttaagatctcttctgggtcctcctcaacagcctgcacagacctctgtggattcattgagatgtgactgagtacctaatacggcccaggaaacatgtccagcaatgaaccgctggacaccagcgtatcttcaatcactgagattaggtggaacatcccatgccattgttgactttctacctaagaaattactactagagaacaaagccttcaaaattactgctagagaattaagccttaaaaacaaagctgagtttttaagaaactaaacagacacaacatcttcatctttggggaagattttagaaaactttatatttgatattcttatgtaattgctcattactaatcataccagggtcagaaaaactaggtaaaaatctgaactttttctttccaaacagaaataaggtcatggtacacgcttaaattgcatatagaaattcattaccagaaaatataagaaaccctgtttctgtctcattaagaaacttagccatatgatctacaaattcagtgcaatccctctcaaaatcttaaggtcatttttttttcaaaaataaatatattgcaagattcgtaaatgttaagagatccccaaatagccaaaactatattgaaaaagaacatagttagaaatttcatactttctgatttgaaaacttacaacaaagctactgtaatcaaaatagtgtggtactggcataaagacagagaaacagaccagtagaacagaatagagaacccagaaataaattcttgcatatacggtcaaatgatttttgacaagggtgccataaccatttattggagcaaggacagtcttttcaacacacagagtatacccacatgcaaaagaataaagttataacattaccttaaacctgtaaaaagaaaaattaactccaaatgggttagcaacttaaacacagaggctaaagctataaaactcttagaagaaaataggaaggatcagcttcctgacattggatttggcaatgattgattggatatgatacccaaagtataggttaaaaaaatgtctaaattgggcaacatcaaaacttaaaacaacgaaatgtttgtgtgtcaagggacactaccaacaaagtgaaaggcaacccatgaaacagcagaagatatttgcaaatcatatatatgataaggagctaatatctataatatataagaattcctacaactcaaaaacaaataactgattaaggcaaaggacttagacatttctccaaagaagacatgcaaatgtcccataaacacatggaaagatgcttaacaccactaataatgagggaaatgcaaatcaaaaccacaataggatgccacttcacatccatcaggatatctattatttttaaaaaagaaaaccacaggaaagagttaagtgttggcctggatatggagaaattggaatccttgtgaactgtggcgataatgcaccactttatggtgcagccactattgaaaagagtggcatttcctgaacaaattaaaaataaaatatgatctacatgatccagcaattccacttctgggttgatgctcaggaaatgtgaaatcagggactcagatatatatttctacactcaagctaataggagcataattcacagtagctgaaaggtggaggcagcacacgtgtccactgacagatgtacagtggactattattcagccttagaaaggaaggatgctctgacccattctacgacatggctggatgttgagggcattatgctaagtgaaagagagcagtcacaaaagaacagataccgtacaatgccactcacatgaggtaagactagtggtcatattcacagagagagaaagcagaatgctgggacccagagagtgtgggggaggcctggggaggtagtgtttaacggggacagggtttcagttagggaacgaaaaagttctgaagacggcaggtggtgaccattgcaccactatgtgaatacacttgatatcactaattgcacatttgaaaactgtaaaaatggtaaatttcatgttatatgtattttacaattattttgaaaacaaaaggccataacctgaagtttttcaagaagcatgactcccagagcccacagtggcagcaagggacgtttgtcaacagtaactgacagaaacctacaggaaccctaggcaatgcaaaacaggccctaattaatgaccttcttaatttcctcaaatataaaatatcccaaaatagaactaataatggacacagggatctgattttaaaggggctttgtacaagggagcttctctatgactgctgaaaggtgaaccaggcctattagtatgcttatcaattcttcttttgggtgatgttataactagataacagaaggctacttgagtctatgtttaccaagagattacacattctgactttatattgaattgtttattaaaagcaagaggtgttgtattctttatcaaataaaatgctgcttcattcacaaacctatatttatgccttttcaaagtaacatattttaaggtaaatatgcaaaacacctgtctgcatgtaaagcttaaaatattaataccacatagagttcctcacctttaggtggctcctcggatatccatacgtctgtgagaccaactggaacctttcttgatggaattttgttgatagcttgaaagatgcaaacacttgattgaattcaataactacatttttttcttcttccaccagatgtggccactctagagaagaacaaaaaggcagaataatgaggctgatattcacagtaaaagcaaaactctacttgagggacgtgattgtcaggtctttaatgcatctgctgcaagtaggcaatgaggccacgctgggtgcacagacacatggagatgatgagacatacagagatgagatgcatggggatgatgacacaaatggagatgagacacatggagatgatgagatgcatggacatgaaacactaggagatgagacacatggagatgaaatacacagagaccataagacacatggggatgatgaagcacatggagatgaaacactcagaggtgagatcatagagacgcatggggatgatgagacatatggagacacatggagataatgagacacagagatgagatccatggggatgataagacacgtggagatgagacagatgcagatgaaacacacggagatgagacacatggagatgagacacaagagatgataagacacatggagatggaacacacagagatgatgagagatacggagatgaggtgcatggaggtgagaagcataaagatgatgagacacatggatatgatgagatgtatggagatgacaagacacatcatgagcacatggagatgagatacatggaaatgagatgcatgaagatgagacacaagagatgatgagacacatggagatggaacacacagagatgatgagaggtatggagatgaggtgcatggaggtgagaagcatgaagatgagacacatggagatggtgagatgcatggagattatgaacacatggagatgagatacatggaaatgagatgcatggagatgagacacaagagatgatgagatgcatggagataagatgagagggatggtggtgacaacaacctcgtatcacacccaattaatttccaataaatcattccttatagaaaaaccttttaagaaaattaatgaaattactctttgtaatataaaaaatacacaaaactatattcttataaaactaagggaaagagtcatttttatgattgagtctacaaagtattaagactacaaaatgtgtagaaacaaattacagaagcatacgggatgtatctgcacatgtatttcatagcttatatcatcagcgggttgtcatgtgtgtttgtatttttgtccttctcagttcaaaggatagcaaataagttgtgatttccacataaaagattttacaagagcatgttattaattaaaaagcaaaacaaaatgcaacatcttgggtaataatttaaaattttttatttgttatagctataaagcaacatccaaatagtgtttaaaatggggcttatgcataaacttctgtgattaatgtttatatagtaggcacagttatttccaacacattctgagctattacttactaaattgactaagaaaggttggaatggtattcgacatagtggttttataaaaatgcaagttaattctcaccatttgaaagacaaaaaatagacaaatttaaataaatcttataaacaaaccaacataaagcaaaacaagtgattgagaaatagtaggattggacattaataatcaaagccactctaatatattgccagtactatgcttaaaacaatcataatattttgctttcataaaatattattacgttaatttacacaatgacttactctactggtaatcctaaaaattcatctctatcactttaagcttgttagcatgttctatagattcatcgtgttgtccatcgttgttttgggaaaagtgttttttctattcttcagtgttcacaaaaggtaacaaggaggaagacctggagaccatcaggccattcctgtgggagcagccgcagtcccagtgcctcaacggcagatatgactgatcattgtcaggagagggacaggtttttcattaaagtgataagtatctacaaaacagaattttgtggacaaaatgaaaggttttatttggagcgtgctctgttctccaggcgcacattcacaaatcatggagtcaggagtgcccttcccattcccaggtgaaacagcaaagcaccttcagcctctcatcagggctgcttgtccaaatactccagtttgggtgctcctggctcctttcctgggtccctcaggctctccaggcgtgaggacacaccctcacaaacatgagaacccctcttggaggaaggggagttagagtaattgctggaggtgagactacctttgttccaagatgcattcccgtctgggagtaatttatgagatgtagatttaaaagccactgacaaatgaactataggctaaatgcccttgcagggtatatgatgctgctgcttactaaatgtgtgtgcacatccatccgtccatccatccatccatccaactacagtgtgcttttaacaataggtcctcactaggtaaagattcacagaacaattaggtaaggagtgagtgagtcagtgacctccttttcccagttcttcaggtgcggtaggaaggaatatgcacccacggttctggctgctcacagttccctgtcacagatgctgcttgtgatcactggtaatggaattcccaggatgaactcttaaacggcatgtttagcaggcagcttagctgcaaaacaaaaataacagcagccaggcggaagctccttggggctctcagtcacactctgttctcagccaaagttttgctggcctttctcctcatccacccttcctctaatctcccaaatgagaatgagtgggtttttctttacggcatttgtcattatctgggattatatcacacagattttggttttaaactgttttgaggtaactgtagattcacatgcagctggaagaaagaatacagagatcccatgcacccgtctcagtgtccgccaatgacaacattttgcagaaccatagcacatacaggcagaacgacattgattcctcccaccgatgtccagatttcctacttctcttgtgttcatatatgtgcatgcgattttagcaccagtgtaggtttctgtgtctatgaccacagtcaacatgcagataactatcaccgaaggagcaagagttcctctgtgtccttttatagccccgcccacatcctgccctttcatcaccaagtccaccctcttccctttcatagccacgcccagccttttcctgttcatcaccacgcccactccctgccctttcacagccacgcccagcctcttcctgttcatcaccaagttcactcctttccctttcatagccacactcacccttttcctgttcagagccacgcccatccttttcctttcataaccatgaccaccccattgtctttcattgccacgtccatcccccttccaattaatagccacgcccacttctgccctgcacatagccacccccaccatcttttttcataaccaagcccagcctctttcctttcagagccacacccatattccttccctttcagagccaactctcctaccctgaactcctggcaaccactcatcagtgtttcctgtcgttttgttatttcaagaacgttctataaatgaagtcatacactgtgcaaaccttgcagattggcttttcttattcagcataattctctggagcttccatctgggttgtatcaatagtttattctttctaatggctgagtagtattccatggcatggctgtacacagtttaactcttcatgctctggaggccatctgggctatttccagtttttggctaccatgaataaagcttctgtaaagatgtgtgtgcaggttttactgtgaatgtacatttccatctctctgggattaatgcctgagagtgggatagctgggtcatacagcaattacatggctagctttaaaagaaaacgccaaactggtgtgagtggctataccatttcactttgcctcgatcaatgtaccagtgattcagtttctcattgtcttagtcaaaatttggtgttttctttgtgttttatgtcactcattctaggtatgtagtgacagctcatcatggttttaactggcatttgcctaatagttgatggaattaaatatcttttcatgtacatttaaatttcatctttagtgaactatctgcccatgtcttttgcccattttcttactacattgttttaaatcgttgaatttgagatttcattgtatattctagatactagttctttgatgaatatttgatttctaagtatttttgctaccttgttgcttgtcttttcgttgtcttaacagagtgttttgtagagcaaaagttttaattttagtgacatccaattcatcaattttcccttgtggattatgtgtgtgtatatacctgtttatgcattcatgttctgtctttccccacggaaaagctacattccattatggtagacactttgctatctaacttatttgtaaatcacaagagtctagaattgtgcctggcacacactaatgatcaacaaatttatgctgaatgaataaataaatgaataaacactaatttattaggtaaaaacattttaagtaagtcttttttctaacactggggaatgataacagtagtaaaagtggcatattaacattctgcaaaatgattttaaatccattattctcttgggttttcatcatcccctgtggggaggacagttcaggtatgattctcttacttcagagatgagcccagggatgtgaggctccttctcagtgacatctgtgtcttgtttccactctagtatgtttctgcccaggattccctcaatatttagaagcgattgaggatgattaaagaaagtgttcattcatatgggggcaacaaaactatagatcttactaccttcaagtggaatatgaattgaaaccatacctaagtgtgactgcagtttatataaactcaaggacaattgggtcatgtctgctgtttgagagaaggaagaattcactcagtcttatagacacagtggtcttgttattcctcaaaaggtctgcgtgtcacccacactggcgggaactgaatggccgttcccatttctctgaacaaagggtgcctggctgagtgggcctgcagtggccatagcatcccagcttcttactctgggtgagggcatcaacggggtcgcaactgcttttcgcaggattgttttattatttccagtgactttccatgaaagcacatgccatcttgtcccatgcaacacaaaacatgcagggcaccgcagtaagcacccgacggtctcgtggcaccatagtaagcacccggcggcggtctcacagcaccgcaggaagcacccaatggtctcactttccgtttgtgttgatgagcagagccccctggaaccaggtgcattgcccagtgctggcggcacttcatccccactgagggtggacatgcatgcagtgagttctccacacagtccctgccaaaggccttgcaccaaagcacaaacggacgcaggactgcagttcggcagggggcacacaatgcatgggtgacatttctatgaaaaatttctctctgaaagtccttaattatgtctgcgtcgtaggctcttcacctttcagaatcatcgcagttaaaaaaagaaagaataaggaaaggcctcagtacagagaaaaattgttctatagataaataattataaacggatgactgtcactgaaaatgtggtgggtttcctagaaagagttttgtaggaagctttggaggctgcaacacatcttgtgttatggttttctcttgactctgtcagagaatttagcataccatgctgtaactgtagatctcctaagcggcaccccaaccccaccacgagctcgtcagggcaggggacagagcccattagattctaaaccccagaactgggcccactgcagacatagagcatgtgtggaactgaagtttgctcaatttcatgagtgaaccaaagacgaactaaactaacaaacttctatctgtcatctcatggccagccacaacacctgggcacatcagatagcgtggcagcaaggaaggactgcagcttcaggggtgacactccctgctcttcagtttgggactgtagggtccctttcacaggaacttaggccatttcctcattttcacatcgtatagaacaaataagtgattgtacaaactcagttgtagatcaatgaattattcatagctgtattataaaattcattttaactttgtcattattaatattcatgatatatgaaaaagatttttactttccccctttaacaagggtacttgctgtttaatttattttgagttaattatgtagtgaataaaaaatcattatttgtccaaaaattcaagaatgatctattactttatgtttagttatttagacagattatatattaagagacagactgaaatttaatgatatatcctgtaatgaaaagtaggcataaaatgacattctgtttgaaagttttgcatttgaggctaaagaaagccaaacttgtttattcactttttctctcctttcttctctcgctgtctctctccctgtctccctcccctcccctcccctcccctcctctctgcccttctcttcccttccctcccccctcccttccttttccctccctcccatctttgcccacttcctctctccctccctctctattcttcctttcctttcctttcctttcctcttctctctctctctttccctctctctctctctctttccctctctctctctccttccttttttttggttcttaaaaaagtttgttgccaaataatgaggtagaagacaacattccaggctgatatttgtaagcacttctccatatatatattataaatagtgatttttattcttaatatataaaaagctaatttggttatacattttactgtaaattgtttttccttttaacatttaaagaatcagagaaatagtgatctgcaatgggaaggttttgattaatagacgtgacttagagagtgggtacagataattttgaggcagatttgatccttgctagtttgtattttattctcagggttccttatgcttcttgttttcactagtggctcattgtaaatgtgtggtttaactcgtccatggcccagcattagggagctgtggaccctgcagcctggctgtgggggccgcagtggctgaggggtgcagagccgagtcacggggttgccagcacaggggcttaacctctggtgactgccagagctgctggcaagctagagtcccatttggagcccctctaagccgttctatttgtaatgaaaactatatttatgctattcagttctaaatatagaaattgaaacagctgtgtttagtgcctttgttcaacccccttgcaacaaccttgagaaccccagggaatttgtcaatgtcagggaaggagcattttgtcagttaccaaatgtgtttattaccagagggatggagggaagagggacgctgaagaactttgatgccctcttcttccaaagatgaaacgcgtaactgcgctctcattcactccagctccctgtcacccaatggacctgtgatatctggattctgggaaattcttcatcctggaccctgagagattctgcagcccagctccagattgcttgtggtctgacaggctgcaactgtgagccatcacaatgaacaacaggaagaaaaggtctttcaaaaggtgatgtgtgttctcatcaacctcatacacacacatggtttaggggtataatacctctacatggctgattatgaaaacaatgttccccagataccatccctgtcttacttccagctccccagagggaaagctttcaacgcttctagccatttcttttggcatttgccttcagaccctacacgaatgcgtctctaccacagggggctgcgcggtttcccatcatgaagcactgaacttccacgtctcatctaggggaacagggaggtgcactaatgcgctccacgcccaagcccttctcacagtttctgcccccagcatggttgtactgggcaatacatgagattattaggaaatgctttactgtcataactatgaagagactattgccagatgaaccacacattaatactatgtttcttatctgcacattactaccctgcaattaatataattgtgtccatgtacacacgctgtcctatgtacttatcatgactctatcccaaattcccaattacgtcctatcttcttcttagggaagaacagcttaggtatcaatttggtgttctgtgtaaagtctcagggagccgtccgtgtcctcccatctggcctcgtccacactggttctcttgaaagcttgggctgtaatgatgccccttggccatcacccagtccctgccccatctcttgtaatctctctcctttttgctgcatccctgtcttcctctgtcttgatttacttgttgttggttttctgtttctttgtttgatttggtggaagacataatcccacgcttcctatggaaaggttgttgggagatttttaatgattcctcaatgttaaaatgtctatttttgtcttgacacccaactaatatttgtctgagcaaaacagtctagatgagagagaacttccctggaggtctgatggcgtttctccctcgtcttcttacctcttgaggattctttgaatcctttcccctagaccctcatgcccagagtcgtcataattttctctttgcttctagtgttttagtatttcccaagaatgagggggtgtgtagatctgttttctcccatcatgtgacatatccttcagcttttcaagggccatcgtcttccctgctttcttcagtggttgttttctctccattttctctgatctctttctggaacttacacgattcagccaatggtcctgcgggagctggacagaccctccaatcttattttccatccctttgccattttgttctaatcagatttcctttatcttctcacctctcttgtgagattttttaaatttaaatttcaacactcatctttaaatttctaagtgatctcttagtgattcaactcatcttctccttcttctacttaaaataaatgtgttctcattcagcaaacccaatgtagcttctcttctgtgactcagacaaagtcaatgataacttctttgtttctcttcaacagtctttattttcttcttttttgtttgtttgggtcctttttatattacagggcttgcacgaacatctagagatcttcattatctgttcatatttaacaagacagcattagaaagcctcctggaaacccttttcacatgggcggggccttctgacctgtcgggggtctttgtgtgctttgcctcctgggctcctgactaggggtgcctgtgcccccagagcatacagccaagaactggattctgagccagatgacatgaacttggattaaaaaaaagaacatggccaggcgcagcggctcacgcctgtaatcccagaactttgggaggccaaggtgggtggatcacctgcggtcgggagtttgagaccagcttggccaacatgatgaaaccctgtctctactaaaaatataaaaattagctgggagtgatgacacgtgcctgtaatcccagctactcggtatgctgagggaggagaatcgcttgaacctgggaggtagaggttacagtgagctgagattgcaccattgcactccagcctgggtgacaagagtgaaactctgtctcaaaaaaaacaaaacaaacaacataaaaaccacgtttccttgataattcctaacatatctctacaggtctccttgcttgaggctgtctacactaaagatgttaacactagatattcatgccatgagatcggacacataagaatctctagaaatttaatgtagagagccttgaacaaaaggttgtttaatacccattatttaaaactaagctctttagacacacaggtcagtttgtatgtgatatctgtattctttaagtattgacagcagaactgaggaggggagaagcccagagaaaggggctatagaaaatggcaagtgtgaaaccacatacgatgggcagacttcacattattcctcttcactcccagaagccacttggggcaaacacgaggtcagtgcctagacctggttgagttggagccagctcaagacctagcttcagaccccctgagtaccttgcttgggagactgtgtcctaacagcaggtgaaatggagtccacaccatcacagtaaggtttgatgatttccagttgttaacaggatagaagttgtccaggagaacatggggaagtgaagttttcaagatcaggtggagggaaggactctgacatcctgaaatgtagatacggtgtaggtttcccaggatgaacacatcaaggacataattatcatgacctccctgagggagactgaaagtatctgtgtacagagaggagactttaagatattgctcagggagttttttgtgagttttttcagtgcaataatctatacaattctgaattagaaacaatataagttattgacaatcttcaactgtttagatgaaatcactgagaatattatgaaacatataacatatctaatagaattaatgtagaaaaagacagatatttctattttagtgaaataaaaatacatttcagaaaagcttgttggaaagtaaaattttcaatgaaataacttttcctcatttattttcattatgaaatatgaaacgattcctgattaaagtattttggtgtttagatgtaataaagtcaaaattaagaaatgagtgtatgaccaggtacagtgactcttgtgcctgcctgaaatcccagcactttgagaggctaagttgggaagatcacttgagaccaagagttggagaccagcctgggaaacatagggagaggccatctctagaaaaataaaaatggtagccagtcttggtggcacacgcctgtggtcccagctacttaagacactgaggtagaagcataacttgggcccggaagattgaggctgccgtgagccatgatagtgccactgcactccagcctgggctacagggcaagatcctgtttcaaaaaaagaaaacaaacaaaaaaatcaaatgtacttctaaaacctcatcacattatagtagtatagttatagctacactattcaaatcaaagattaaaaaaattttaaaataattataataccccaaattaatggctacaaagtcacaaatatattcaaagttagaatttatagcaatataaaaaccttgacagcacatctcctctgttaccttgctgtatgcattaatcctttcaaagaggcagtccttcccaaagcaattgcactttgattaaattgatcagctgcctcaaactcctcatcattttaaactcttcatcccgagtagccattttaatcaccctcccctaacctgaaattaccagcctcagtaacccggcatggtttcctgtaagattctacaaagggagcacatgtctaccccgcacttctcagtgagcgtcttgcttccttgcaatgagttcgcactcagaacagcagtgtctccatgctgcctcccattccaatatgatcatgtgcatttttcacctacttggagcagatgacactttttaattaacttataaaaatgctgctaattttggaacttaataatttcctagggcatatcaatctctctcttttatacacacacacacacacacacacacgcacacacacacacacacacacagagcatctagaaccaaagttggaagttaaaacagaaagaagaaattgggcataaaataacagcaagaaaactaaaattctgatgttttctaggaatgatttatccttttgcaaaaaaaagtgtgtcttcctgtctccttgcctcatgacgtttttcacaccagcccttcccactaaatgtttaaattttattcatttaaaaaagcccagctcaaataccttctttcaatttccaaaaaaagtgatctataatctttaaatatcaaacacttttaaacttcttctaatgtggcaccagaattatatctcatgttaggttagatccacatcctacttctcttattaaataagatcagcacagaggaacggtaatgataatagaaaagttcatatgtccttgctgggcaccaggtgtgttctaagaactttataaacattaattcttataaacctcagcacaacttccagtgaggcaggaacccctggcatctcagtcttcaggaacacagaccctcaagaacagccccgcctcttccctgctgtgtgatcacagacactcgcttggcctttgtgaacctcactttcctcatcattaaaatagcatggctcataaatattctctgtacatttgttgtgaatttaaataatatttgtttctcattcttaccaaagtgctgacctacaaactactgattctacagcaagaccaattccaggagaggctatgggggcaatgccaagaaacgaagaaaacaggggtggggcatggggaggaatgagaggtgacctggtcaggggcaggtagctgccccttgcaagcatgggggaaaggagaaaagttgccgctgtcctgtccttgctattactccatcctgtcctcagaagaactgaccaagaaatatctggaccagatggcggagctcaggaagccttggcagtcagggtgagtcagtgtcattgcagaggagccattcagaaaagcatttacatctggtcagaaaatacaaaaccagtaacacatttaacaaaaggtgtgtgatgcctctagagggaaagtcacaaaactttattaagaaatgttaaaggaggcctgaatcaacggagagataaaccacatcgtgattaggaaaacttaatatggtaacggtctcaattcttctccaatagataatgtgatttcaatcaaaatatcaaatgagacttacaaggagctttataggtgtacacgaagaagtaaagggtcaggaatatctccaacatttgtaaaaaggagaatcaggaaaggggggtagttctacctgacattaagaattattctgaagctgtagtaattaaatccatgtggtgttgacttgggatacagaaattaatctataaaatagaataaaaacctgtcaataggcctatgaatattgcatgaggagacttcggaatagagaaagtatgccacaagattaaaaatacatatattccttaacaagtagaatgaaaaaaatgattactgacaaaagatggaactgtattctcacatcatatgcaaagaaaatttaagatggattaaggagttaaatatcaaaaactaagccttaagtctaggcacagtggctcacgcctgtaactccagggcagaaggattgtttgagcccaggagcttgataccaacctggataacataacaagatcctgtctgtaccaaaacaaaaacaaaaacataaaactaaagtaaaactcttcctagaaaacatagatgactatgtacttaaaccttggagtaaggaaaaataaacaggacccccatagcattgactataaaagaaaagatgaattaatttgaaaatattaatattaaaaatttgttcatcaaaagacatcttaaggaaagtggaaggtcaagttataatctggaagaagatatatttttgatttacatgaagaatatataaagcattaaaaataaataaaagcatactcaacacaataaaagatagtgcagaaaatgttaagcatttcacaagcgggaacacatacaccacaagtgtatggaaaaataatcaacaattatttgtcagagaaatggaaagtaagcccagatgagatactgtcccctgccgtttaattacaatgttttttgaagtctgacaataccaaattttggagagataaaaagtgacaacatcctagatgtttaatttcctatcaagataatggtgtcggggcctgctcacacgtgaaagaacctgaggaatcttctggtccaatgaactttacatggtgattgctgacgtcccaggggtttggaggagacactttagaagccacccagggagaatgtggggatgagctgaggacatgaggagctgataccctggccagcagagccctacttgcacacatttccatagagggcttcccccagcagaaaggagagtccgaggttgcagtggctgaagctttctccaggaaaacaaactcagtgcatagacaaactgggatgaggtcacagagcaggtcagccatggcaagatgagacccggaccctccctgtcctgacacccaggccagggaccctccagttcacaactggcttcctgcaaagaattcacgggaagagagtaaaccatttccctgcacattccatattagctaaaattctgaaatgccatcatttaaatcctcaataaatatagatgtaatgtattactcactttgtaaataaacatattgctaaacaattcaccttaaggaaaatatctgaaagataatagtatttccctcatctataatgacacaaaatcatatgaaaataatctgaagataaaaattatgattttattttaatgatccaacagtaatactggctttttttttttttttggacacagacacctgtgttcttcttgtttttttttttttttttttttttttttttcatatgtataagttcaagtatgtggaggaaaaagagagaaagggagggggagtcacaattacttagctattattacccttccttggtaagtaggataagaacatttccctctatgaatctgattttaaaattcatcttatctgaggccacgggtgcctggagtctgtggctattggggttagcctgggactggggcagatttaagcctggggctgcagagtaaaacttttagaaaaacacacaaggagaaaactccttgacatttgggcaacatttttttttcttttattatactttaagttctggggtacatgtgcagaatgtacacgtttgttacacaggcatacatgtgccatggtggtttgctacacccgtcaactcgtcattgacattaggtatttctcctaatgctctccctctcctagcccccgacaccctgacaggccttggtgtgtgatgttcccctccctgtgtccatgtgttctcattgttcaactcccatttatgagtgagaacatgcggtgtttggttttctgttcttgtgttagtttgctgagaatgatggtttccaacttcatccatgtcccttcaaaggacatgaactcatccttttttatggctgcatagtattcatggtgtatatgtgccacatttgctttatccagtctatcattgataggcatttgggttggttccaagtctttgctattgtgaacagtgccacaataaatgtaggtgtgcatgtgtctttatagtagaatgatttataatcctttgggtatatactcaataatgggattgttggctcaagtggtatttctagtcctagatccttgaggaatcaccacactgtcttccataatggttgaactaatttacactcccatcaacagtgtaaaagcgttcctgtttcttcacatcctctccagtacctgttatttcctgacttttaaatgatcgccattctaactggcataagatggcatctcactgtggttttgatttgcctttctctaatgaccagtgatgatgagctttttttggtatgtttgttggctgcataaatgtcttcttttgaaaagcgtctgttcatatccttcgcccactttttgatggggttgttttttcttgtaaaatttttttaaggtactttcaaaagaagacatttatgcagccaacaaacatatgaaaaaaagctcatcatcattagtcattagagaaaggcaactcaaaaccataatgagataccatcacatggtacaccataaatatattcggtttttatttgtcactaagcaaggaaaaataaaacaaaaatctagctgatccttttttgctgttccatttctactacatccccaaaatataggaaaaacctaatttgagtaagagagattagctgtaatagtaaatttatcattcttacctactttttttgcaaaaggaaagttcatatttcctgttaaggtaatctaccccatgtttccattttgccatcaccctgccatttgtctatccatccaactgtctaacctgcgttgcgacaccacctctcaccccacgtggaggctctgtgctgtggggtcgctcagggtgggggaagccactcttgcttctcagctcacagccttactgggaatgactgagtgcccaaagcaatgacaggacatggaagaacttctaaacaagttccttctggcttgatactgaggtttgacttttgttgcaaaccctttttgagatttgatgttgacccaattcgctttaccctgatgagcaagatgaaccaacaactgtgtttgtctggacatatgtttattgtgtcacgtacaccatgcattcagcaaatcctgacatgtctctcaaattcaaaatattaaagcaggcaacatcagttataataatttattcacttgataataagtaaaaaatcattgatgtaaatattcattttaagaaaaagacaaagggctgtgactggactgagcccaggacatcaatatcggctccatgtacatcattacttatttgagtgtccttggaaaagtcatttaatatcgatttgaatattcatgtgtgggaagtgtctacatacctgcattcctaatgacctattttgaagataaaatgagacaaaaattatgaaaacaccttagaaagaatgaagtgatacaaatacaaggtaagaatgattatcctagtagctgtgttaataatagtggggaaagaggatatggggtgaagtctaaaaaataaaagggaatggtgctgtagaatacaatgtacagataaatcctgacccactgggggctttctgatttataccatggaaataaaaaatgttaatatgtaataaagcctcataaatcctgactaactggggaaaagccaatttggagttctgaaaggttttaaagaaatgtagttctattaccttaaaatgaaaatagtaatatgagctactggttaataaaaatgtacagacctccattaataatgagattaggataatgtttaatcatcactgattcattaatttggtcagatatccaccaaatatttgtgtgttctactacgagctcagcacaggggaaaaaagaggaaacaaaatgtgactctgtactcaccaagtttactgtctggggtgtgatattgacaaacaactggatgagtaccatacaatacgataaatgtccttacaatacagaaaagctcaggacgccatgggctcaccttggaaagacaagagttctcagtttgagggggcactgatgagaggaatctcataaaaattaatactgacactgagacataagaggaaagtaggaatagccaaaaataaactggtgggaagaaacatttgaactttgtcctaatgaaagtcaggccatgacagattttaaagtatggaaggataggtgatataatttgcattttttgaaaatcactttggctggaatgggggaattgataaggggaatgacgtctagaagaaggcaaactaattaggaggctactgcagccacccagccatgaggtgatcgtgacctaaaaccaggctcaggcgtgagaacagaggtgtacagagaccagaggcactgaagagctgtgggcgaggagggagagcagattttagtttggcacaatttgattttgagataaatctggaacatccaggtggagacttgtggcaggaagataaatatatggaattgtaaatatagatttttaacatttgggttctatgtcatgacatcatcctcaaaaaagactccgtgtcaagcttcccttgaaagaggagcccaatgattcaaatgaccccgtctttgaaagccgctctctgctgactcctaaggcagtgctcggcagagcccttgtctatatgtctttggtgggctcttgaaagctgttgttctctgacgttttactgtctttataagccattatcattctctcttggaaacagtaccactatgtgggattttgcctaccacctatgtgctggcaattcttaaatgtatgctgagcacttcaatgaatttcatatttgtgaatccaaatgtctaaagttatctactagaaagtttcacagctgcctcaaaggttccatgttaagacctgagcaaattattacccactgccccatcactcagaatcgtcttcctgtcctcaattctgccagaaaaaatgcatgagatgtttgtcttagtccattttggttgctataacaaaatagcataaccttggtagcttacaaataacagtttatttctcacagttctggaggctggaagtctcatatggtttggctctgtgtccccgcgcaaatccgatctccaattgtaatccccaggagttgagggaggaacctggtaggaagtggtggatcatggggacagtttccccagtgttgttctcatgctagtgagtgagttctcacaagatctgatggttttataagtgtttggaagttcctactcgtccttctctctcctgctgccctgtgaagaagctgcttgctgcccctttaccatttgccatcattgtaagtttcctgaggcctccttagccatgtggaactgagtcaattaaacctctttcctttataaattacccagtctcaggtagtgtgaaaatggaccaatgcaaactccaagaccaaggtttgggcaggtttggtatctgctgagggcctgcttttggtttgtagacagtgtcttcacacaacagaaggagggagggagctctctggggcctctttcataagggcactaatgacattcataagggctttactctcatgccttaatcatttcaaaggcccaacttcctaataccatcaccttacaggttaggatattaacataaggatttttagaggacacaaacattgagtccatggcaacattacagatgaatctttcttccccctccctcactctcatacttacgttatatttctgcaccatctcatctcccatccccccatcactgccttagtcctgcccccaactttctctcactagaagaagaagggccacctaattgctccccagcctgctgtatctcttactgtaagaagattacagaaagaagacttcatcctaatgaagagacttcatcctgatgttgatcctaatggagagacttcatcctaacattgatggctctacagaggctttcctctctctcctacggggaagagagaggcatcaacattaggatgaagtctctcctcacttaaagacctttattgggttcccattggctgcagaagaaataaatctaaggtcctcggctcctagtccaagtttctcgtcgtgtgactacaggcatttctcgcctccgcatcctgccagtgcgtatcttggacgttgtatgtcggtgactcccacttttaaggaacccctgcatgttctgtgttgtgaggctcccttcaccttcatgtccacgtttgacttcctcttggagcgttctttctccctcccactatcggacatattcttcaacacttagcttaggtgtccctccatttccaaggaaggccgcctaactttctccctgttcctcatgggctgcaggcaagagcttcagctcttgcttttctccaccctcagcactctggcctcctggcttactgtacacctgccttctgcaggaattgcccgtctcacccacaagactctcgaggccctgtatatggtcattttatattctccatgcaaggcacaaggcctagcaagaggaaatcattcaatgaatgtttattgagctggctctattgaaaatgttaagagaaacataaataaaataaatcaattgtttaataatttcacttgtgtggtttattagaaaacttttctatgggcagtgatagagaaatttctaccttccagagcctgggtcagttaaagatcctttttctaactgattttaaaaaaaacatgccacttttatttctggtttcacacaaaagttgtattcttccttttaaattgtgcctagtcagtcttaatcaatagaaaagacactctactgaagttttctaaccaaactgactggctgccttaacacatccactgtgagtctgagcttagtgtgacacacattagatgtgctcatacctttaccaaagaagtgcattacaaaaggagtggtaagtacaataaattgtagataattccagagaaaaagatatcaatttacagaattaaaataccagttaaatgaagaccatttgggggattaaaaaaataccagtgaaggcttgaagaaattcacacccaacgggatatggttaaaagcaaaaatgaaatacggtgtcaatacagtaagaaagagcacactgaacaaggctagagaggtggacatgagctaaaatgaccatgagattaaacagtccagtcttctggactgagatgaaacagcccaaaagaatgagatgttggttttgatgaacaaaaaaatactcagttgaagaagaacattaggagtcagtctgttaacttttgatctcatgcaggggtttgttcaggacatttggagacctgagccctgaaacgatctaataataaaagctcacatttactgagggcttattttgtgataggtgctattttatataatctttacaacaacccctttgaggtaccagtagttacgatccttatagacgaatcacaaccttacacataaataaataaggcactctgaagtgaagaaacatgttcacaatcccacgggtagtagagctgggtttcaaacctgggagtcaagcccaagtccacactctcaaccactcccctggatagagagcatttcaggagagaagcctgaatgcaaagtgcagaaagaagcagagggaatggagatcacaggccatagactgtttatcagatggcatggtgatcggcctttttggggcagaggaaatataaagaaaggattatttttccttgtgatagacgttcttagagaggattctacccttttgtgggtctttcttttgaaaatttgatgaagctatgattcctcttgatgggtggaagatgtaccacacacatctgacaccctcaccatgtgcatgtcttccagcaaattcacagtcatctggacccctaggttaagagttgccatctgaggctgtagaagtaagaaaagaccctaagatgaacgagaggttttgaggaatgttcattctggtagggaggtggaagactgaggtctatcacaatttgacagatatgtaaggccacatgtcattgtaagtactcaactgtgagtttcaaactgtaagaatcattggaggagggatgaacaaaactttgctgaataagattatgttattcaactacatatggttcaaaggcagctgaaatatattatgaattacattgttaaaaatcatgaaaatctggagcattaaaaaagcttatgggttggcaaaacaataaaatcaactacttcagaatatgacaattaatcaaagccacagattaaaatgaaaattattcacccaagagaaactggaaagtactggattttgagataacgatgagtgtgactttttaatttggggccattcccatccccctcttcatcccggctaaaagccggtgacattgaaaacaaggaaaagaattgatgggttttggagttccattaaaagcactgtcctcagagcacagtcaatattttatctgaaattgcagctcttaggaaatctggactctgtgggcacagtagtgagggaaagacttaccttcagggaatcatggagacagcaaactgctggcagcatcccagctgcccaaggctgtggtttcagctgggacaaacagaagcctggctgggagttgaataaagaaatcctagagaatatagacaaccacagagaactttggaaaactctctcacactcttgggaatctacaaggctgtgtgcatgtccaggaaagacaggaaaagaaaggcaccaggcactcattcctgggtgaccccgaggctctttacaagcatggattaagagttaagccctcctggaaagggccaggagtttaaggcaacgccttctcacatagatccccttggcagatggtagaagctgttcaggaaaggcatttaataaaatcctctggctattcattggccgaccactaacttatcctgacccaggcataatacctacaaagccaggccttaaaaactaaccaataaacagacaaactacaagctccaagaactcgaaagaaaaagaaaaaaggtaccagaggaatcagtaaccaaacaatgcacaatactcagaatctccagaattttaccaggaaagttactaaaaaataagaagcaacaaggaaaacaaaactaaactagtagcaacaaaaatctagcaacaacagcaagtcttggggaatgtaagaatctgataccagaattgctataacatattacctaaagatttccagttgtcattacaaaaagcatgagagatacaaagaaacaggaaagtatgacacacacacacacgagagaaaaaagttaactgaaaatgtccctgaaagggctcagatttgggacttggtgaagactttaaactaattattataaatacatttaaataactaaagaaaactgtctgaaaaattcaaaggaatcatggcaattttgcctcaccaagtagaggatttcaatacagaaatagatattataaaataaataaccaaataaatattctggagttgaaatattcaataactgaaataaaaagtacattagagaagctcaataacaaatttgacccttaagaacaaagaatccaaaacttaaaaataggttaatagagagtatttagtctcagagacagagaaaaaaaagaacagaaatgaagatagccttacagatctctgggacaccactaactctatccttatatacagaatgagagattcagaagaagagaagaaaaggggggacaaaattatttgaagaaataatggctgaaagctttccaaattgatgaaacatattaacctacacaattaaagagttcaatgaattcaatgtagaatatacataaatggatctatatgtagacatatcaggatcaaattaacaaaaggcaaaggcaaaaattttttttgaaagttgcaagataaaaaggcagagaatagatttgaaacaaacaaacagacatgattcaattaaatggtctacaaaatgtacttttaattcaaagccacaaataatttgaaagtgaaagcatggaaaaatattctatgcaagcaataactaaaagagagctgaagtgactacaaggcagagtcaataaaattactacttgacttttcatcagcaactatggagaatagaaagtagtgtgatgacatcttcaaagagttgaaagactatcaataaagttctctatttagctacactcttcttaaaaatattaaaacattccaagataaataaaaacagagaatttattgctagaagacgtgtcgttttagaaatactaaagggagcccctcacgctgaaatgaaagaacacacaaaaccacacgaaaatacagagcagtggtgacgataactgcatagatgttataaaagatggtataagcttatcatttgtaatgctttcgttcttctatacgttttaaaagacagcggcagaaatcaataattataaaactgtgctaatagcttataaggtataaagaagtaatttgtatagcaataataggacaaaattggtggaagaaatggaagaatatggtaacaaagtttttaactatgtttgaaacaaagttagtattagtctgaactaggttgcttcaagttaacagctaactgtaatttccagggaaattaatgagagagaaaaattaaaattattaaaagaaacaacaaaggaactaaaaggttataccaggaataatatttttaacaagaatatggcaaaaatagggaaatagaggaataaagcagacacaagatatacagaaaataaactgcataactgtaggtgtaaaattaccatatcaataattacattaaatagaaattgattaaacatcccaatcaaaaggcagagaatagatttgaaacaaacaaacaaacatgattcaattaaatggtctctagaaaacgcactttgaattcaaagccacaaataatttgaaagtaaaagcatgaaaaaatattccatgcaagcaatatccaaaagagagctgaagtgactgcactagtatcagacacaaaagactgaagacaatgtttcaaaattaggtgcaaaaaaggatattttatgatgagaagaggttcaatgagtcaagaagacataacaattataaacatatgtgcatctaacagtacagctccaaaatacatgaaacaaattctgataaaattaaggggatagacaataaaaataactggagacatcaatatcccacattccttaatagataaagctatcagaactaacaaattagtgcagcccatttgcagggtagaatatcagtacaccataatcaattgtattttgcatatgaattctatgatttaaacgtttgtgtttccccaaattcatatgttgaaattctaacccccaaggtaatggtattaagggatggggtccttggaaggtgattaggtcatgagggtggagcccatatagagtagcctcagaaagcttccctggcccttccaccatgtaaggatgcagtgagaagacaaatgcctgcctatgaggaaatgagccttcaccacacacccaataatctggtgtcttgatcttggacttcccaggctccagaactgtgcaaaatacatttctgttttttataagccacatagtttatgacattttgctatagtatgtcaaatggactaaaacaactagaataaaaaatacaaaaataaaaattagaaaacaagctcattaataaaattgacataatgaataaaacatctggaaataaatttaacaaaagaagttcaagacatgtatactaaaagctatattatattgttttaagaaattaaagattgaaataaatggaaagacatgttcacagatcagaatatttaacattattaaggtagcaatacttctcaaattgatctacagatccaaattctaagtagtatttttcaatgaaattgctaagttgatttaaaaattttcatgacaatgaaaggacccagtataagaaaacaaatcttggcctggtgcggtggctcacgcctgtaatcccagcactgtgggaggccaaggcgggtggatcgtgaggtcaggagattgagaccatcctggctaacatggtgaaaccacgtgtctattaaaaatacacaaaaaattagccaggcatggtggtgggcgcctgtagtcccagctactcgggaggctgaggccagagaatggcgtgaacccgggaggcggagcttgcagtgagctgagccgagattgcgccactgcactccagcctgggcaacagagtgagactccgtctcaaaaaaaaaaaagaaagaaagaaaataaatcttgaataaaaaaaataggtttaggaattagtcttctggattttaaaaatctactacaaataaacaagtaagtgaataaataaataaacaacaaacagtaactgagagaggatggtaccagcataaggatagatactgatcaatgaaatagaatggggaatctaaaaataaaccatctcacttattgtcaactgatttttgacaagggtttcagaacaatttaatgggggaaatcaagtctttttaatgaatggtgttggaacaactgggtatccacatacaaatgaataaagttggacaggtatcacaccatatacaaacatggacgcaaaatgtatcaaaggcctaaatgtagaagttaaaactatataactcctagaagaaaacctattagtaagtctttgtgtccttgggttaggtgacggcatcttaaatacaccaccaaaaacacaagggataagagaaaaaaaaagcaaacgcataagtttagcttaatcaaaactaaaaagttgatctgacaaaggccaccatcatgaaaatggaaaaacaacaaaaagaacaagaataaatatttacaaattacatatattacttgggacttgtatgcataatatgcaaataatccttacaaagcaataagaaaagacaatacaatttaataatgtacaaatgatttgaatagacattttcccaaagaaaatctacaaatggacaataatctcatgaaaagatgctgaacatcatttgtcagtttgtcatctgggaaatgcaaataaaaaccacaatagatacctcttcatatttactagggtggctattgcaaaaaaggaaaagaaaagaaaagaagaaaagaaaggaacaaatgttggtgaggatgtggagaaactggaactctcatacattgcaggtgggaatataaaatattgcagctactttgacaaaaattttggccattcctcaaaatgcaaaacataactttaacatgtgacacagcaatttcactcctaagataatgaaaatgtgtctacatggacattatgctaaatgaaagaagccggtatcaacaaaacccctcatattgtttgattctatttatgtaaaatgtccagaataggcaaattcacagagacaaaaagtggactgtaactgtcaagggctgctgggagggcagaatcaagggtgaccactaatgggtccattgtctctttttggagtgttgaagaggttctaaagttagaatatggtgatagccgcatagctcagaggatataccaaaaatcattgaattatgaactttaaatgggtgaattttataatatgtaagataattctcaattaagggtaaaaatatggacttccactgtagagacagcaaagggaaaacaggccgtctctcctgttctgtagagagagcaaagggaaaataggccccctctcctgttagttgcatcttcagttttatttagtttgtaaaatttattaacggctgtataaatgttccaggagtgggtggcagttctggactcctacttccctcttggcaaatgcacctccctgagaaatctctgcatgcttgaccaaattgctttctcaatggtactgatatgactattaagggactcagcatggtggaactagagggccaaatggctctcaaagtaaattaatatactctattctattgcttcctgctagccatttgctagaacatttattcactaatttgccctctcattcttcatcatgtcattcaattgtttacaagcatgtactgaaaatctgtcctgcttcatttggaaagatctctggaaaaaatgcaggaaactgcaaggcaagtcccagaggttattctttttaacctcttcataccttagttagtttatttatttatatttatttatttatttatttacttagagatggagtctcactctgtcgcccaggctggagtgcagtggtgtgatcttggctcactgcaacctccgcctcctgggttcaagcgattctcctgcctcagcctcctgagtagatgggattacaggtgcgcgatgccatgcttggctaatttttgtatgttttttagtagagacagggtttcaccacgttggtcaggctggtctcgaactcctgacctcgtgatctgcctgcatcggcctcccaaagtgctgggattacaggtgtgagccaccacacccagcaaccttagtttattttaaagcataattggaatgaggatcaaaaaggctgatagaatgatagcatccatcagtagggctgttgaaaggatctaccactatctacaccacactacatacatatacaaagaacttatgtgtgtatagcataagacagcattatataaaatgctatggaaacacctggggcagttttacaaatgaagaaactgagatgtactggcttggttcagttgctcaagctttcaaaggaaatgtcgatgtggggattgaactaacattgtttgaagttatggagaactttagtaccataaaagttaagtcaaattcatgtgttaatctttttcagagtcactgaaaaacagtctcatttcttcaagttttacacgagcaagtgatgctgttgtaggtgacaagggcagttgtcacatgccttaagccaagccacacatcagaagctctgactggcattccatggccattagttgagaatgtttgtttttttctccaaatgtggcatataacattgtaacatttataataatagaatcatcatgtgagaatgttttatgggaactaaaaaatcaatagccatgttagtgaggggacagagttccaggagtaatgcactggaattttatcataatgctgttcacatagcatagcttcttactggggatatatataaacccttcggaaaacaaggcaacctctttgaaatttcccaagttgtaaagggaagactattgcatgattaggaataaaaccagtggctttcagatatgctggtcagcacaaacaccatagcccacctccctaagcaatctcctcatcgcccaagacctcatgcctgactagaacagaagaacatcaggcagatgctggcatcttgtaagccaaccctgctctctcctcccaatcaagatgcatctcaaggggcctgaaaggagtggaagggatactgtgattcctcagcatgggctctgaaaagtgagtcaccatgagaacccagagaccggtgcacacaagctgtgagcttgcacacacctagaaagctgccaatgtcactgctagggatgatgtggaaggtgtcttcactggttttaaatgcaatgcactctaagccagttggaatacttttgctttgaagaaatacctgcccttcctaagtgctgcggcttttctcaaccctttacgcctgtgctcacttgtagatgcaaatcccccactcagctcttgccctgggtagcaatcaggtggttcatgagtggtgccaaccagttacatttcctgatatgcaatacagctggcagcaggatggcctgcacatgcgcaggaatggccccaatgagcagagatcccacagcccgctgtcacagctgtcttcacctttttccaggtgggaccaacacaggcctgcagggcccaggagctcatctaccacacagtctgaagtgactgaattaatcaggtcacagtggccaaaagcctatccactgccactgcaagccacctttcctgcaaggcgattcactctataggaaaccggtttaaccagaatctggaatcgtacaatttttcagaccagcaacaaggaagaggactgagaaatctgacactttggagaggagcaggactgattagaacagaaaaaagaatcagcactggggccagggatgtgggcaggaaaccgggggaataaaagagcttagaggggagggagaccactccatcagtaagcccatgtgctgatgacttcctatactcattttagtatagactgagagggctaacaaggaaaggaaagttcagttcttagaggggagggagaccactccatcagtaagcccatgtgctgatgactttctatactcattttagtgtagaccgagaaggctactaaggaacagaaaattcagttcttagagggagggagaccactccatcagtaagcccatgtgctgatgccttcctatattcattttagtatagactgagagggctaacaaggaatggaaagttcagttcttagaagggagggagaccactccatcagtaagcccatgtgctgatgacttcctatactcattttagtatagactgagagggctactaaggaacggaaagttcagttcttagaggggagggagaccactccatcagtaagcccatgtgctgatgacttcccatactcattttagtatagactgagagggctaataaggaatggaaagttcagttcttgtcctaaagaagggagcaggcagctcttccagagttcctgcttaccccatctcctggtcatgcctctcttcggtgtaaccggatgactgccttgtgtgtgaaaaacaggatacatcaacaagtgatgggatgtccctcccatgatcaggttagaaaacactgagagctcccctgcaggtcctcaccccactgccccttgtgtttgctttgactggccctgggctaggagtggagagggctcctcagccagcagccagcaaggggcagcacctccatccacagcctcagagaaaccgagtcctggcaacagtcgctgcagaaaccaggaggcaatcggcctgctggaaccccgagagaactgaggtcccaagtgaccatgggctgcagcctgtgagagaccctatgagggaggatccagcccagccaggcctgaatcccaaacctacagacactgtgagatactaaatgagttattttaggcaactaagtactggtataatttgttacacagacatagatgatgaatacaaggatttaattgggaaaggaatgaattagcaaaacaatcatctacagtataacctggtgtaaacgttggaggaggaaacactggttattatctgacagatgtgcactcagcgcagccatgtgacaaagcccatcagaggcaaccaggccaaggctgcatcccctggccagccctcctcaccctccaattctctaagcagctctgcccaccctgtggtcatcagactttgtggtcaggaagcttctctgaccatgcattctcctttcacctctgccctctcatggtgaaactctgcaggccctcctatctgcacagtttcttttctccatcagctgtctccaccttctccaagagcgcatttttaaatgatggcactggagctgtctgcatgcctcttggctttctgattattctgcacatgtgctcaggcaagccccctgaactcagctctggctgtgtgactcccctgccccaaatcctctagagacccccactgtctaagcagttgagtacacctgtccctatttggcacaaatatttccatcttgtgtgtgttcacaggcacgttcctgggaatttgccttcatgcttctctgtctctccaactcttgttcaactcgtaagacttgcttcaaatgcacccttctacattaagtctatgctgctccctttcccacccccagaatagtttctccttctttggattcttatcaacctgtgggatacctcccaaaggcttgtcatgctctgccatttgtcacggttgtttatgttcctgttcttcagccctatacatttctcaaagtcccaagcagaatgagtcttattcataatagtatccccagtgcttcattcattgcctggaacataatgagcactcaataatgttggcaaaattgaatttgatccacacagtcctactgttttatgccctagctggagcccagatcgtaagatgctgaagcagcttggcttccacatggggtgctggaatcgacccacacgcacctctctctgagacaccgcgctctcaggcccctctgtccccactcggtttcctgatccacagactccctccttttcatgaagaatgcgtttgggtgttcccttttctcccagcccctccataggtgggcttgacccagggagaagggaatggaatctcaacctaccgctagtatttcttataaaaattctgtaaacaatggttattgtttctgttggatctcattctgatttcgaagaaaaatgaaggactacatcactgtgatctcacttcttagggtcttcctgcttataacatgcctctgtcttgataaagaagactgaaattaagggaacagtgagtatggagggccagacctcacagtttactctttagtaaggcaacatgctgttaggaagagatgcgctaaataatctagataatatagcaccaaagatcaacattgtgtcaacggagcactccatcaaagtatggggccgttaaaccaatctgcataataaggaatatgcatttaaactgaaattatttgtataattacattactttaaacattatttttaatactattcattttatacttgtacatagtagttatggaaggcggtggtgaaacactaaagccaacagttgaaaaataggcagttaatctcggaacagaaaaaagcctgcagcttgccatcatacccatttgttctaccattttaatttgtactcactttgtaatgaataaaacctgagacatttcacacatagaatcactctgcaatcctgacaacctccatgccttatcacccccttagctgaaggtccctggcttctgcctgccctgctgttggttctgaggctagcaaaggagccccggtgaccgaaccccaggcctccgctctcttagctgctctctgctgattggatctcacacaaagggcttgtttacgtagtttcttggaacttccccttaggaagattctctccttatttgttagacacctttggcttcttctttttcctcctgaagttcttattcagctggtgtcccacacctgcgccactgctcctgcctcacagctccggggatgcctgcccctcagatgccccctgccaacctcatgcaggccacagcattctcaaagcaaaatcaatttattatgctgaaaaagaagccaaacagcattgtcttaggagaaaatatccctgacttcccaagctccaatgccctctgagttgaaggatgaattatgtcagcccaggctgaccccactgtcccctgcaaccaggattccacacgtaactccccgtgacaccacggtcagagcccacagtttatcatccgcctgccgctgccttcagtttctctttcagtcttgggtgcattacgggagtccccctgattacaggtagaggccaggtactatgagttctgggtaggctatgcttgtcttctttttttaaaaaaaggataggtttgcaatgccaaataagctgaaagccttcatgtgcatgttttacaaaactcttaatgccattaatgttcttccctttttctttgtttgggaaatttcttatcactggagaaaggctagggtgccacaggtaataggcaaagtgaagctttagggtcaggcttctgaggtcagccctgaaaggacacccaggaggggccctgcaggttcatctatgctgctgaggggatcacacagcatttggcaaattggcgggctccattaattaacagaaacatctcatacagcttcggcaaggttggcttttcaaaagtattttagaatctgttaaataagagcttggtcctaaataaaatatgatttgtgcttattagtcttggtttttaacaaccgccatgtgccctgtccatgaactgaatgtagttcctattatccaaacacgactcattgacaagggactaacccagtgcttctctgggaagagctactacaaatagatcaagtcaaaagaaaaaggaaacaaaagaccatgacattcaaaactaatctataatggcttttaagcacagaacgggccagtgacagcttgctaacatgggaaccattcgctataaacaccacacgtggtctactggggctccatagccttgccttgaccatgcatccactttgtgatcacggctgagttggtcagactctctgagcatgtttctccctctgtaacacacgagtgtaaatctctaacttgcaggatggttaggaggggtcaacaagaggtcatgcagccaacagcacagagaagagtgcccagcacatggtgagcggcacatgagtgtggctcgttacagcactagagctgagccacatacagtgtgatagctgcctgaccacaggggaaaggccgtgtgtgaaggggacttctctgacttggcatgggcatcaccgaagagaaggtgatgactgactcgctttctctagaagacggaaaataaaatgcattgggagagcagcactggcaccagtgggaaaccatgagcccttctcctccatggaaatgtcacacacagaaccagaagcctgaggaattcagtgaggattcctatctcaagagacagtgttctatgaggtgtttgcagtcctggtggtgaggcctgtgctcatgaccctaaactcacagtaggctgttggcctgggcatcactagagcgaccagtggatccagtccttcccctgggccctgaagtgagacaatcccaggcactggtggtggatgaggctgatggagcctgtgggagcggggccagctgcgtccaacctgcactaacgggtctgattcaaaaggggttgatttactggaaaaaaaaaaagatagctagttctaagtactagtataaaaaatatgtaattttcctctacttgagcttcaatacagattagtgtacccaaagagacgccatgcttctaacctgaataatacttttaaagaaagaatgcagtcagcaatttgaacgaacaattacgaccagttttatgaggtttgtatcctattaaaagcaaaagcatagagcctgtctcattttttaaaatcaaaccataagaaaacagcactctcaagtatcctacaaatacagactgaatcctaccaaaaaacattttcctgctttttgcttttttaaaaagtaaatttgttaaaagaaatagttgtatcatttctgttaagttttaaaagacatttaccaaataatgaatatgataaacagtgggatactaatactgttagatacatcagtagaacagatctacaaaaactgatttcacaaaaaagaaaggagccctctggctttacacatggaggaaaatatgaaatgtgcggttatttggaatttacaataagagggtcaggtctaaagtaatttaacttcgagcaattttgggggatctatttgctctattgttaaggcaatgtcaatctcattttaaatacaccaggtacaatcaggcttgcaaatgaaaactgcaccgccacccttcaggaagtactgcagaagggctttacaaagtgtttgctattgtaccgaaaactgctgtaagcactgaatgcctggggtagggaatggctggaggagcagagcctcaggagatccatctctcctgtcttcttaggtctttcctaataaagctacacacatgaaagaaacagaaatctcgatagtgtttcatgaaggactgttgagaggtgggatctagagaggacttggaaaatgactgtcatttatatggggtgtgcagaaagtcttaaacatcagcagagattcagaaatataagagctgcaaggactttgtgcaaccatttggtccaatcttctcattatacagatggacggaggttaatagcacagagtaggaggaggaaattgagctggaaggtacagacctggttcagttattatcttcctctctctgtctctgtcgctgtctctgactctgtctctgtctctctccttttcatccactcctctcctctctcccctctctatctcctcctctcctccactgattcattaaatagccttggacaagtcacttgaccttttcctggcagtgaaaatatgtcataacacccttgcactcagtccctgtgaacataagtgagataatatacacaacacaccagacacagcagttcctgtccttcaaacattaaatgagacaggtgggatagtctgagttagaatctatgttgagttcaagcttgtccccatcccatccctctgcaggtatcatacacagtctgctgccattattcatgggagtcacatcctataaagtcagagcaaacagaaatgaaggattctgagccattgctcctggagtaaatgcagggttagtttcctgagatgctctgctcacaacatctttgtcaatcaatcaaaacataaacttgttttatgtgtgtttctgtttaaacacaccctgtttaatacaggcatacctcagagatactgcaggctcacaccagaccaccacaataaagggaatacggtaataaaggaagctacacaattttttcattccaaaaaagtgcatataaatgatatgtttacactatactgtagtctattaagtgtgcaatagcattatgtctaaaaatgtacatatcttaatttcaaattgctttattgctcaataattctaaggatcacttgagccttcagggagttgtcatctctttgctggtggagggttttgcctcaatgtcgatggctgctgactgatcagggtggcagttgttgaaggttgggtggctgtggcaatttctttaaataaggcaacgatgaagttttccatatctattggaaaacttctattggaaaactatttccacatcttcctttcactaaagatttctctgaggcacatgatgctgtttgataggactttaaccaccttagaaagtctttaaacattggagtccatcctctcaaaccctgctgctgctttatcaactgggcttatgtaatattctaaattcttgttgttgattcaacagtgtttacagcatcttcaccagaagtagattccgtctcaagaaactacttcctttgctcatccttcagaagcaactcctcatccattcaagattgatcatgagattgcagcaattcagtcgcatctttaaactccacttctaattttagttctcttgctatttctaccacatctgcagttatatcctccactgaagtcttgggtgaacttaaaatcatctatgagcattggaatcaacttctccaaccttctgttaatgttatttggccctcctctcatgaatcaccaattgtgaattctttccagaaagttttcaattgactttgcccagatccatcagagaaatcactatccatagcacttattgtcttcaaaatgctatttcttaaataataagacttgacaattgaaattactcctgatccatggtctgtagaatggatgttgtgtttcaggcatgaaaatgacattaatctccttgcacatccccatcagagctcttgggtggccaggcacactgtcaataagcagtaatattttgaaagaaatcttttttttctgagcagtaggtctcaacagtaggcttgaagtatttagtaaaccatgctgtaaacagatgtgctgtcatccaggctttgttgatccatttatagagcaagaggagagtaggtttagcataacaattaagggccctaggatttttgaaatgatatgtaagcattggcttcaacttaaattcaccagctgtgttggcccctaagaagagatcaacctgtctttagaagctttgaagccaggcattgatttctcctctccagctctgaaggccctagatggcttatattcttccaatataaggctgtttcatctacactgaaaatctgttgttaatgtaaccaacttcatcagtgatcttacctggatcttctggagaacttgctgcagcttctccatcagcacttgctgcttctccttgcacttttatgttacagagatgacttctttccttgaacctcataaaccaacctctgccagcttcaaacttttcttctgcagcttcctcatctctctcagcctttgtagaattaaggagagttagggcctttctctggattaagctttgactgaagggaatattgtggctgctctaatcttctatccagaccgctacaactttccccatatcagcaataaggctggttccatttattattcttatgttcactgaagtagcacctttaatttcattcaagaatattttctttgcattcaaaattggctgtttagcacaagaaatctagcttttgacctgtcttaggtttcaacatgccttccttactaagcttaatcatttctagctttaaatttaacataagggacataaaactcttcctttacttgaatatttggaggtcattgcagggttgttcgttggcctaatttcaatatgcttgtcttagggaatagggaggtcagtttagaagggggagatagaagaatgactggcggaacagtcagaacacacacatttatcaatcaagtttgccatctccaatgggtgctgtttgcagtgccctccagaaattacaatagtaacatcaaagatgaatgatcacagataaccaaagcagatatgatgataataaaaaagtttgaaatattgtaagaatttccaaaatgtgacacagatactgcatgagcaagtgctgttggaaaaaatggcatcaatagacttgattgacgcagggttgtcacaaacctgcaatttataaaacatacacgatccgtgaagcacagtaaagggaagtgcaatgaaataaggtatgtatgtttgattcatcaccactgaactcatggccatggacctgcagctctgcctgaagtcataacacacgtatttttctatgtgctgcacatcctagcctccttgcacttagaaacactagacagaaccacagcactgcacttgggggctgttgtaagcagcaaaatcaccaaaaagtgacacacagagcagtaaccagaccttgaaaaagacccttgtttatggtatggagctgaagtcaggagaccgggcatcgccctgccctttagcagctgaaggtgtgtgctgggcagctcaagcttttgcctctccacatgggtgtgtgtgtaactttgaatgcaccacaagcatcgattttcaggttacaatacatttttgtaagcaggcaaattcacagacataaaatctgtaaatacagaggatgaactgacaataataaaagcataataaaaatattttatttttgctaccttcttaaagagcgttttcattagagtttgtctccctcaaatgtatcatcccaaatctttttaaaaaagattatgccactgaagatttctttccagcaaggagactgttaagatgttaggatacctggagtggagaaagtcaatgagccagtatgcaagacacagaagggagaaaactgacagcggagcagggggtggggcgggggggctttttttactcttaggctgaagaattttaaagtatttctcacaaacatgctgtgataataaaatgaaaacaatgtacaaaaaaaaaaaaagattatcagaaactaatggccagtgatgatgagcattttttcatgtgtcttttggctgcataaatgtcttcttttgagaagtgtctgttcatatcctttgcccacttgttgatggggttgtttgtttttttcttgtaaatttgtttgagttctttgtagattctgaatattagccccttgtcagatgagtagattgcaaaaattttctcccattctgtaggttgcctgttcactctgatggtagtttcttttgctgtgcagaagctctttagtttaattagatcccatttgtcaattttggcttttgttgccattgctttcggtgttttagacgtgaagtccttgcccatgcctatgtcctgaatggtattgcctaggttttcatctagggtttttatggttttaggtctaacatttaagtctttaatccatcttgaattaatttttgtataaggtgtaaggaagggatccagttacagctttctacatatggctagccagttttcccagcaccatttgttaaatagggagtcctttcccaatttcttgtttttgtcaggtttgtcaaagatcagatagttgtagatgtgtggtattacttctgagggctctgttctgttccattggtctatatctctatttcagtactagtaccatactgttttggttactgtagccttgtagtatagtttgaagtcaggtagcgtgatgcttccagctttgttcttttggcttaggattgacttggcaatgcttgtcatcactggccatcagagaaatgcaaatcaaaaccactatgagatactatctcacaccagttagaatggcgatcattaaaaagtcaggaaacaacaggtgctggaggggatgtggagaaataggaacacttttacattgttggtgggactgtaaactggttcaaccattgtggaagacagtgtggcagtgatttctcagggatctagaactagaaataccatttgacccagccatcccattactgggtatatacccaaaggattataaatcatgctgctataaagacacacgcacatgtatgtttattgcggcactatttacaatagcaaagacttggaaccaacccaaatgtccaacaatgatagactggattaagaaaatgtggcacatatacaccatggaatactatgtggccataaaaaatgatgagttcatgtcctttgtagggacatggatgaagctggaaaccatcattctcagcaaactatcacaaggacaaaaaatcaaacatcgcatgttctcactcataggtggtaattgaataatgagaacacttggtcacaggaaggggaacatcacacaccggggcctgctgtggggtggggggaggggggagcgatagcattaggagatatacctattgtaaatgatgagttaatgggtgtagcacaccaacatggcaaatgtatacatatgtaactaacctgcacgttgtgcacatgtaccctagaacttaaagtatataaaaaaaagattatcagaaactagaaagttctcatgtctagcattcagccctgttgtcacctgctgctccttcaagcgagccgtgtctccaaggaacccagtccagcaggggtctcaaatttgctttgctatgtaatcaaaaaatgatcagacaatgtaaatgtcacaaaacctcctagactttagtagagacaaaaacagagaccaagaagtggagagggagaagcgctgtgtcccagggggtgcccccaagttgtgacagaagccagggctgagtttcccgttagtccctggggaaaaggggctttctgggacacagcaatgcagacaacagagaggacagcatccaggccacctgatcccacctctgccaactctcctttctctctccaggtgaggctgagtttatctggagagccagcaagggcctggtatcatcaatgctcctcagtatgggcattgttgttacaagagttctatgaaaagggtcatgtaggccctgaatacacaaggactgtggcgtcataagaaattaagcgtatgctatccgacaagaccctgcttgggttggagacaccccagaagcagtgtcagcacctcacatcaggggagctatcctgcgagcccccacctgtggccgcggggggtcactacaccaaggaattcttggttttcactgtgtctaagtcagtgaggaggagaggagagcagtcgttttccatctgtgagtgtctgcctgtggcttctctctgcaatctatgggccaaagggtttttgacaggacaccaccatcctcacctgaataaatacatgagcatcaggtctgtgtggtgactccacggctctcctcatcgccccgggcaccccctgaccgctcacactcagcactttactctgtccagctgtcatacttgggttggaactgtggtcagatacggcgtcctctgactatcatgcccagggggaattgcacagaggggcggagcagagctttgctttgcgagttgggccccagatgccgctgaggaggagccctggtgaacgtggacacgcgtgggatgttcatgggtgggtctgtggcgcccacctgtgggttttacacatggttcacgcatgcttaataattgagctcataatttaaaatttttattaacaattatcattgcactttcttcatcacaaaagaatgaccacagcgaatatttaaaaagtgatttttatttttgcaatatcagaagaaagagacattgaaccaggatttctattcttctttcctttttctgttcactgagtcacccaaggcaggtctgtccagggtgccacgaagctctcacttgctgctcacaatattcctgctgtgcaagggacatgcacacagacagctgtgggggccactgtgcttggcagccttggagggcacaggagcccccgctctgctccctttcagaggcagcagtctggccttgcctcccctttcttctttctcatgggtggtctatatcaaacatgagttcattcttttcaggttgttcaggttcctagacatgctatttacaaatgtctcccgtatccaagtcaactcaggggagatcttccaaataaccaaaatgcctcattctgtgcactctaactttaaatagtgccatctaaaaagccaaaacaaaatgcagtaaacacccccttgtctattctgatatgaggagccttggtgaaaggctctctgaagacaccaggtatctctgcttttgttcctttcaggggtgagtccgcattgcaggtgtggagagtgtggagttatcctacccccagctcaccttcctgaggatggactgtgtgccaggcactctgagaataccgaggccacgctcccaggcagaggccccagggttctcttcttgaacaaaagtctgccgtgtccatttcttttgagaaccttctccttttagagccatttgccccatcttgctttggggccctgtgagactgacatgggagcatcaggataaagtgtcgtcttcacagtgtgggctagggggcccagctcctctcacgccagcggcggccaggctgcagcgtccttcatccttgtggtcccagtctcccttaacctctgttctgccacctcttccaatctccctgcaaccacagggagcaccatctcccccagcctccctccccagcctcttccctggcctccttcccattgctttaaacccagtgttcattgctccgtggcactttctctattccgtgggactcccaggtgaccgaggcgctgcagcaggaactccctctgcttctcccctctgattcctgctttgctacacggcagtgaggctggagtgagctttcttgtgtctgtgatcaccatcaggactgctgcagcccctggaacccatgcattcagcctggtcccaccctggccctcaggtgtgtgctccgcaggctcttcctgtgggctctttgggtcatttaactcctttagtttcctcttcctgtcaacacgtgatcttctcaagtagaggccaggcttctgcagggcacacagggcactcatgcatcttctcatctcattaggccacacacaagattagcaaaagtaacacaacacacggttattgtacagagctgtggagttgacagagggtttttacacagtggaaactccacctcataatgacccaaataagcgatggagatgcgtggtgaaaatttgcatctctgtgtccatgagacttacctaagttcacagcgatcgagaggagggcaaggatgtgaggggagcatcctggctgcacagtgtcatggttgccggtactcatcgggtatatgatgagtcatcagtgctcatcgggtatacgatgtagtgtgcatgtgtacctcctccacatctcatgtttaaatatgattcccaggtggaggtgatgcctggtgggaggtgattgtatcactggggcagaattctcatgaatgacttagtcccatacccttgttgatgaatgagttcttgttctgagttcatgtaagatctggttgtgtaaaagtgtggcacctccccgcttgccctcttgcttccactcttgccatatagaaatgcctgtttctttaccttccaccatgattggaagcttcctgaggcccttaccaggagcatatggtgccatgcttgtgcaacctgcagaaccatgagccaattaaacctcctttctttataaattacccagcctcagatattcctttgtagtgatgcaaacacacacacacagtgtagatcatactgcagcacattaacagattgcttaggcgttcctgtaggcttctttcctcatggcttttataagtcaacttagttttcaggagacagatgtcttttcaacaacaccaataatttatgctttttaaagggtctgaacattgaataagatcatgtggagattaaacccaagtaccacctgtcttaagtcacacagtgttggttcttaacactgtatgttcaacaaactaacttaaggcagagtttaaataatttgttgcattagattatcctgagccatgagtttggctgttttctagaccagtaggagatcgtgcctcccagagaggatttggcaatgtctggacacatttttggtgtcacactagggaggagggtgatctggtatccagcaggtggaggccaggggtcctgctaaacgccctgcagacacagggcagggggcagctccacagcaaagaatttcctggcccatcaacttcccagttaacctttgtaaaagcaaacaaaagaaaaaaagaaacacaaacattgatgtgacagactagtttgctatggttgagatattcagtcatgtcagaagcagcagccagcagagaaaacagggtctgtaaaccatttgtgtttgtgccacaccctacggtgaaattaagtgcagtctggagcttctaaagataggtggtggggtctgcagtgaccatcctgggagctggacaacccaccaacaactttatcccctgcacctcccaaaaggtgtggggagagacagaaataggttttggatccacaggaagcaagcccagcccagcacggagcacagaatgtagcacaagcaccgctaggcagcccattaaaagcatgagggaggtggaaacagagacaaatgcattgcagatcagccctgcctgcttcttccaaaggtcttaaatgtatttcttttgtccattttttttttaacaacatgatttctttggctgagatgatcagtcccagaatgtaagttgctgctgcaacatggctgacacatgtactgattttgttttctcagactctcagcaaatcatctgtgtgtgtgcaacaaaataaaagagaacatgtagctttcagtcttcccaggggagtttatgcttcaatttttaaatgtcatttgttttttttttttctcatttaagaaaaatgggctgatagaaaattaggaaactaagggctaattcataaaagtttctgaaaggctcatggcaaacaggtctcctaatggaatgcccttaagagacacagcacagagactaaaaggcttcccagagaaaattttcagcacttgccgttctgggtccttctctaagaaatgttattaccacacttatttacattgggtctcaaaacctaattgctatttaatgtggtgagaaggtagaggtacacacatttacttagcaacatcctttttgattcattttaagctctggttaaaatgtcctaacaaagagtgaaaacagtatagctgttatccataaccaactccaagatcaccagataccgtgaagacgtgaaaaggtacttctgctgcaagtcaaatagtacagccacgcattttaaggtatgaattccgttatcttcacagaatcgcattaagactaagaagtgtagcttaagttataccatttgttttcttccagtaactctgagtggggaggcttgccaattattaacatacaggctaggctattctgaaagacttatgattgacagagagagcagaatctgttgagtgggaatgggcgccataggccttgtccatcctcaccctgtccatcctcaatatattgttttatattgtctgtgtgtggttgcatttatgttttccttgtcaattaccaaaagtgtggcaggtatattaaacttaagtcaacatttaatccaatcttaggttcaatatggagacagaaggatgtatgttatttatacatctctggcaggagttttgagccagggttttttttaaagagagtagtgagtatggtttggttgagaaaaagcaagaataaacttcaaggacagaagcgggcaccagtgagggtgggatcatcagatataatcacccttggctctagagaataaccaaagatgggaatcctattgtcttttttgtttgtgcaaatatagtaacatttttttctaaactttaccttaaattttattttggtctcccaacccactgagccctccttttttccagatttgtgtctgagttcccagaggcccacatattactgatgtgtatttctgtgggtaggaggaggcgataccctttcttgggaacctagtccttgatgtcatcagaaataacactcaaacccactgaggtgcccattgtccatggacactggtctccacagagaatcttgttcttgagttattaatatttctttcagttttgttttgtagtgaagtcttctctgttcccctaagtggtttaaattcaaaatcctggaagaaaaatttcccctttcttctgctagtcccctgggtaatggtgagacatcatcctgcttcttctcaaccaagccatactcactggtctccttaataaaatttgggctcaaaactcatggcaggggtgcatatataacagacatccttctatctccacattgaaactaagactggatttaatactggcctaatttaataatatattttccacattttgatggtaaaaataagtagaatagcacgtagataataataaacagatgataataaaacaatattcagaatttactcacacctgtagcagagttatcactcctcaaataagcagtttgtttctagatcagataatggcaaggattcctctctttcaacctggttgcctgagctttgattgaatttgacctagaattattgcaatcttaaaaaattctgattaaatttgattgatttttatatgttatatacatatttcctgataagttttgagagaaagtgaattttacatcatatttttttttaaatgcctatttgtagtagatacttttttctcaccaattggcagatctcaccagcactaactcttacgtggtgaggcatgaaaccttcagcatcatggacccagtccttcctctctcatatgccattcacatgactgtatgctggctgcttaaccctttggaaccccattaaaatatacgcaaaataaagatttaataataaaatagctgtgagttacttcaggcattaaatccactcatcaatctaccacccacccacccaccaatctatccatttatgtgttattaaatggatggatgcatacatccatctatccactcagcaacccagccacccatccatcaacccatccatccatcaactcatctacccaaccacccatccatccaaccacgcacccttctacccatccatcaaatcatccactcatccaccaattcatccaccatccacccatccactcatccaccaattcatccattcatccatccatccattaatccatccagccatccatccatccactcacccatccatccacctatccatctatctatccatttatccattgatagaggtgttgtaaagattgaagagacaatgcatttaaagtacttcataaaatgtgcttgaaatagcatctgttctataaattgtaaaatggcggctattactgttttaccttatgtgaaagggatcaccagtcataacctttcttgaaaagcaggacctatgattaggtttctccattccaaacacttcagtggtttctgattgccgaacaaattaagcacacatttttcatcttgctggcatgccctttcctgaatacattatctcagaaaccttccttatctccaccatggctgtcaccttgtcttcctccaaatccctgcagtcccctacttataccactggggggaagctgttttagagtgatttttaggcttcttgtggccttctgagcttttttttatgtaagaaattatatatgttttggcaagatactggcaaactgccatgtgcataattggtgcttaataaatgtttgtatatcaaacattttgatccctccaaactgttatgagaattatagtttaataattagttcaagaaccactaatggaacataggtaaattttcttttcaaatgtttataggtaagttgtttacatggtttaaagctataacatatgtagggatctactagggaaagacttttttccttctaatttcatctgccgaattccaagccctcttaaacatatcaatattgttctttgttgtttacagatccttcccaagattttcccattctacctttcttattacagaaaaggttgtctgctacaccgttctactgtttacactctccattttggcaatgcctcttgggaatgtgtgtgtgtgtgtgtgtgtgtgtgtgtgtgtgtgtgtataaagttaactagatctctatattgcataaaaacatgatagagatctaattaacttgatccgtgaagcactgagtgctggatgggtggaatcaatggtctgaagtcactatggagcctggatttcctgcatctcggtagcactctcatccctatctggtctctaacttcagcccacacctattagaatagccaagatattgctccagtagaatattgatctatataaaaattctgggcttaataaatataagcagcttaaaaacaaattatattaatatataatgtcataacacttaaaaaaaaaagccttgaaatccctgtgaaagtgagtgctctgtgcagggaagtaggagacacagcatgcgtgtatttagcgctaattgagaattccttcacagaacagccttctgttgccatggacaccatcctcaagaggaggttgagaaaattcctccacatgcttacatgtgccagagaaagcctgcatgtttccctctaattttcaaagaaatctctgcacgtgggtaaaaaaaaatattcagcgctgcaaccatccagcaatgaaacaaatatacttacaatggcctctacatgggcccaaatttgaaaaattaatcatccttggtcacataaaatgaggttatcccagcctttgccagggctcctctgcagtgcttaatcctggtgcttgtcctgagagctgtgcagcaggaccaccatgagattctagatcaatggagccaactcccccatggcaacacgtcctcctcttctctaaatacagaatcagccccagatgccagccagttagtggtggcatgtctgcggggcagaatggaggcggccattcaacaacagcttggccatcggccagcgagagtgcagagatgccatctgatgcaccgagtgccacagcgtcagcttaaacggggaactcataggtaacccagcatcccagcacagccctcatggcacccacgtgcagaggtgggctctgcaggtgcacagggcacgttccccacattacatgaggggcctctgcctcctggtccatccccagtgcagctgcttcttttctcacttatgccctgggatgctccgcagacatactttctccttcacgagaaacaacagcaagatctcacggtgacaagcaggtgttgtcatgtcagatttgggtgacatacatggaattgtgaggggcatattaacaagaagcttcaacagagcagatgctgtgagtatagaaaacggtttctccacagctcagtcgaaggcaagctctactcagccctctcaggagctgactccaagcctcccatgatggactcacctctgagccacctttctctatcaggggctctcagtagcatttgtgagaattatttgaagagagttcaggatagttgacaatacagactgaaagtcactaatgtggtttaagacttttgttacattcatgaacatgagaacaatttgtgccattcaagttacattaataccacagtatgtcctcgaaataggtactaggcagctggaagaaatcattgaaatgctcaaaatgcatgaaataacaagaaaaagggagtcaactagcaaaaagcaaacaaaatcaacgcaataattctgtaacacatttcacagaggtgttaatctcaattgatgatgataagatactttgaagttggaaagaactacattctgagtaatagcatggtactgcagtcaaccacatattaaagatggaatcagataaaatgttaagtggcaactgaataacaatttcagggcaaaaagctagaagaaaaactgcacacactagccctttagtaagtgggtcagcactgcatgcttttcaggcgggcaggatggctggagaacggcacaaggcggtggctacctggcaacagcggctccaaggctggctcgccaggggccagagaggcatccctgacctttatggtctctgcgtccagttacatatttggcacgaagtgctttctgtggtctttgtccggctcactggccatccctctccagttgtaacaacaaagcctctgaatgttaccttaggaaacactcgcccctgctttattcccaccagcatccttctctcaggcactgggggactctgagggttctgcatggttgggggagggcaggagggaagttttccatgctgtttctggcctttgctgctagaaagactcctgttctcatccgaagttctgaatcattaacagctgttactcttctttaaggagaggtcacaccactctagaggaatcttaagtcactcagcccaatgagaaaatactccagttggacacattacattactactgaaaataatagattggatcatagcagtaacctttttatgattggaaaacaagctactaatttcctcgtgttctgtaatatcatctacttttatttattgatgattatatttcatatctaagacaagagtgactccattaatcttcagagaatgcagtttcacagtgtagttttgtagaagctctgtgtgattctaactgaagagagtaagtgtttcggcctagaatgcaatggatccccggcagcgtggacaccccctctctgtgctccgtggaccacatgcaatgtgctcgtgggatactacagaccagggaatcagagatactaggaggaggatttgctttccacactagcaactgccatgactgcattatggcatgagaagggtataatacataagccccagactgttctagaatgagtgatatctgttgccccctcttttattattgtgaactttgtaggaataataaaattctgtctatactgtgtttttctcctctttatttctgctcatgacataagaacaactgctttctctccatgtttaatatgttcttttttaatgacaaaatgctaattttaaaatggatgtgtatcagtggggctgggttactagtgactggagacaatgttgtccttgcagagatttcaaacacgtttaaaaagtaaggcgtcatacgttcacaaaaatttcttataaattactggtatgcatttttatatttgcaaaatgaatagaagttggggttactcaatgaagctaaatgtaccaagtgttcagagactcttgccagatctgagtgcctgaacaaattaccttatgaaacagcatggaatcaaaatgaggtttacgtgtatgtgttttgtggttcattttagaaggcaggggctcaatgcatttcaatacaaatatcaggctaaatatgtgtgatgcatttttattcccgagacagggtgattcattaggataaccagggactgtgcatttctttaaagcacgtgctggttgaaaagaaagtcaaacaccttcaaatcagaagccagctctgatttgtaccctgtttgaccaactcaaaggaatgcaccactgcagtgtggagcaccacgcagccagctcatggagggaatgtggctcacccgggatcggacgaccagaagccccgagcaaagacagggcgagcttcctttggaagcctttcaacttttataaaaataaagataatatgttagagaaagtgagataaagtctttattgtaattggttgcattcttttctttaaatgaggctggacatttagtatagctttaataaagagggccctgattaaaatgaaatttggtctggtgtggtggcccttgcctgtaatctcagcactgtaggaggccgaatcacttgagggtggatcacttgaggtcaggagttcaagatcagcctggccaacatggtgaaatcccatctcaaataaaagtacaaaagttagccaggtgtggtggcgcatgcctgtagaaccagctgttcaggaggctgaggcaggagaattgcttgaccctgggaggcggaggttgcagtgagctgagatcatgccactgcactccagcctgggcaacagagtgagactccatctcaaaaataaataaataaatacataaataaataaataaaattcatctccatgagggaagtctctcacgttcctaacaccatgacttgaacaccagacacaagcattcaggacatgtcctctcagtttcttgcaaatgaaatttgaaaaatgtaagcatttgatgcatccagtatcttagaggcattttcaaattcagtatgtccaaggtggtggttactatgtgcccccaaacctgtccccagagcagacatccagtgtccagggctgtctactaatgtctggagacagcttccacggccagactagctgtggtgggggcagacagagcaggtgagattctcagccgagctggatcctttgtggctttcgtggggttagttaaccttccagagctggaagtacctcatctataaagtggagatcaacacatctgtctcccacagctgttgcacgagtatgtcatattgtacaatgcttacagaaaccagcccaggacctggcacacagttcagaagcagtcagtggtggcaaaaaaggaagcaaatgataacgaactttgagaatgtaagactgagacgtgggtttgggcagggaagaccatcaccatgaagccctgccggtgacgtcgagcacaatctccttcctctgtgctcgggcaggattcagcagaggatggcccacttgccaaacctggcccacagccgacctttgtgaataagttttattggaacactgccacagctgttcatgtgcatattggctgtgtctgcttttgtgctacaacagcagaggccagaagttgtcagaaaccacctgcctgtgaatcctaaaacactagctctctgacgcattacagaaagcatttgcgggactctggtaaagagctaagtgcccagaataatcaagaatagattctcagagccattgatcccgaaaggtaggagctaatgcctaaagcatttggccagataatttttacggagttttttttttatgttacttcttctcagcaatttttgtctccattgtacttggcaataatgacaacaaaatattttaaaccaaatcaggattgtgcactagttttcaaagagaataatgggctgtgtttaatttgttgctagtttagagggaagaggattctcagaatagacgttgagccgcgaatgagagaggacaggaagtttcagcatgggagaataggcgcgtgcacccagaagagcagaaggcgggccgctgctctgcctttaccccagagacgcagttgctgcacacacggagctgcttgttctgaaacacggtgctcagaacccaacgctcagctctttcttgaataatatctgttcaatctagaagttcattagagtcaatatctaagaaatcggggcatatgcttgaataaacctcactacctgagcaatgaaatttatttttaccaacagaaacgaacaccttggtttgtctttccagacaaaccaggaggagatgggcagaaaatcaaagcccccttattcggagggtgtccgtgctgtgaacgcctcacctgagtggccttctagactaacccactgctagagtccctccaaatgcatcccagtgtaccaactctacccagtgtgctatgcaaggcagaggaacagacggagctgtggccacactgcgtatgctttcattcctcctgaacatggatccgatgagttcttaggaatggactcagcagccaggctcctccccacagcttacccttcatacaggggcatgattaaccaaggcctaactctattctatggaggtttttcctttcagcttcatcctaacaccttgtctgctgccatatttatgcaagttcttcttaaagcaggaggatcttccctcacactgaatgcaggtttctcagtgagtttttgagacaattcaaagaccttcaaatatctttgaattctcctatcacaccaaatgatgtcaaagccagtaaaaggcatttcttagcaaaggcattagaaatcagcattgcttaaaagctggttaactgtaagcatcttatgatccatgttactgcgaagatcacagtatacattcaggacatttttttcttaagacttctcactgatgcttattatttttattttgttttattcagaaagatacagcgtttgatcttggcagtatttttttttctttttcgatgtggaatatctattttgttacttagctctatgcaatatattttctacacctcctgcagttttggtgatgttgtacattacaagtcactgcagctgagctgctgaccatcaggtgcctgtgttgtctggctgtggctggctgcagccttctgcttttcctcctctcctgtcctgacagcagcctggccactccctgtctataccccagcctgatcccaacaaggccaaagagacacagcacacattagccaatccttagttgctaaaagtctgtggattcctcttcactgaggtcaaaactgtcctcacagatcattccaataatgatggatcagtatgggaacaccttgattgtggacagtcatgaatataaagatttttcctcaatacctgtgagtgtttgctgggtatggtcctgtttgcaacagtctttggaatgtttgctacagaagaaaaacacggcagtgtgtcccaggagtagcaggaacacacttggctgggaagtcccactccctgacagcggatccagccccctccagattcctgtggtaattctggaaaatccagagcttctgttagagaacagcgtgggaaggggagccggatgggcgccagaggtaggaggtgaattgagatgaaccaggaaagggatggaatgtcgcagcacaaggcacctgccgggcctcagaatctcaaagtacaaagagaaagaggctgcagagcttgccctttctttagctttcttagaaatttctggaaaaaaaaaccactggtataaaaaaagaaattttaagttatgtcctagtcaataccacttcttgtagtacttggggttttggggaaggatggagtggagagagactaagaaagtaaaaggaagtctctagaacaagtatttggatattattaaaagttttcaattaagaatttaatagatggccacttgatgatgtaaatgaaaattggtttgtaggatttctctctcacacacacatgcacatgcacacaaagaaaaaactagccatgtgtggaaataaaatttcagggaggaagattcacaaaagtgctgattttatatatatatatatatatatatatatatatatatatatatatatatatccctttcagaataaattcggagctaagagattctaaatcaatgcatgcttaacagttctatatccatggaaacaaacagtgaaacacagcgtatgcacgcatggcatggagtgacgcagggagtactgtgctgggcagtctggttggacgtgcctccatggtgccaagtccaggggtccaagcctctgaggacctttgtcccatttgatgccaggagatacctgaggtcgtgccataaccagtcatcgtacagaggcactactcatcagaggagaagtcaattctaaaacctgcccctattgaatgacttattcacatacagtgctccagtacctcctactataatataatatagaatataatataggtcttcttttaaccttattatttaattcgagctccatttatctgttcccctttataggaaatctaaaaccacagaagaattgtctgtagcagcctgtagcccacttccctcctcatattcatcctccaacccatgttagcttctgtttttaccacttcagaataacctccaagtttcccaaagccaggggtcgcttttctgctctcactcgattggctcttctctattagctttgcctgtccctgcctccctctgtccctgtccctccctccctccctccctctctccttctcttcctccctccctctatttcctcctcccctctccctctccctcccctcattctttccttcctctgccaccctgtctggtacttttccatctcctttgcttgctcctgtgtctcactcagtctttcatggtcaaactctctggcaccttctgcacttttctggctctgtcatggggcccctggaagcaggcatggagatggaggtcacttgcagaaggggtgtgaggatgctgtgtagacgcttatggggggcagtatggaggcgggagtgagtgctggtgtgaacagcaatgtgaccacaactgaggtctcaggccaccccagggcgggccctggagttgagctggtccttcaaacttgtccctgtggagcacgcagggtggcccttccaccccagcacagccagctatggggcatgggctcctcctgggaggaacgcggccctggagccatttcccttggccaggagctattccctttgagggacacagcagtgggccctgggcagcccatgttcttagaggctggaagtgagggtgtcagctctaaaaaggaggcctgggagagtaccccagcgtcagcacagcctagccctgctcactggtccctgtaacagcaaaaagactctaagctgtacacctcaagccctaccactctcactgagctccagacattcatggtcaaagatgtccttggcatccccgcctggtgtctcacaggcatctcgatgtaacagagcacaagtcctaggagcgtcctcccatcctccccccgacggcactcacacaacgtgctgctcctccagagatggacgagagggaagtggtaacggcagaggagattttagcaaacccgatgaattcgaagaacagggactagcaaccagcattacaaggtggttaagaaactgggagccattttcaaatactaattttgagaatttagggaataagaaaggaattcttgaaaacagaggctagaaatgtgaaggatctttctaacaaagaggaattgtctgtagtgaatagggcagttagtatgacacacagaaagacagggcaacagatcatcaaatgatccatttgcaatcaccaggaaccaggtaaagaccggaggagaaacctactagaatagttggattgtgtgtgaatattttctctttctttatctcaaaacgtgcaggaaaaaaaggacgaagacaagagtgagtgaatttgccttgggtgttgaaagtcgagcctgggggtcctcctgggggtcctggcctgtgccctgtctcctccattggctgccatggtgggcgttgcccccgggcagtatatcattcacttgcttttgccatcactcctgtgaaacaccagggtgaaacaatttgcgtcaggtaaaagcctgttctatattgttctttgaagcgtgcaaacttgggaccactatttttttgccagcttcctgaggagcgtcacaagaaacaaaccccagcttgtaaggaatgagcgagatgagcccagagccccctcccgtgtttgccctgtctgggaccttgtgctcctcagcgtgattaagattcttagtgtttcatgctccagtcctgctttcctgagaccaaaatattctgcatcccctttaaaacaaggcatctctctatcgaagctcacagcaggcttctgtgaccaaaatttcaaatgaagtaagaacacattcatttacttatttacaaaaccaagaaatagttttaaaagtttttataaaaagcagtgcttaaatgtatcaccccacaatttactggtcaaaggaaagtattgtacgtttgaaacactttaaaaatgtttccttaatcatttgcctaaaactataaattcaaagaaaaagagttaacacaattgtactgacttccttctgcaaagagctcatgcacacgatgcagtgtgtggtggggcattgagactgtagccacgtggtgacctggtcccaggcaatccccattacagctgtgttatctgatgccctggagtcttgatacaatgcagtttctggggaaaggcctggcttctgtgtttttatcagcactcaggcaacactgacgctgatgaccccggaccacactgaggatgctcattaggagaagaactaacaccaggagcactctcagaactaagaaagcattggccactctgctgaccactgcatggcctctccagtctgtgttgaggaaaacgaattcattatgaaccttaataccatggctccaatatcagctctgaaccatgcagcctcccgcgagtcgcacagtggtgcttgggttaggtttcatcatctgcaaatgcctgtaatgctgatctcctctgcagagctggcttcataatcatgagacaatggaggtaaactgcctgatacagtgcttggaaggcagcaagtgctcagccactgggtgctgctgtggccacgacgaggagcataaggagggtgctgatgaccacgggggccctgccagcttcactgtctcctggctgggagaagaagcagattcctaataaccttgtctcccacctcctgagttgggaactaatgaaaagtaaaagtgaaacagatggatgaaaaccaactattgctttatgtttgatagaacagaattggagagtgacttgggattcctgataaacaagcatcctaaaaattaaactttggtcctccaagctgcaaaacttccatgtgggggaaaaacctgcccactaagcctgctgtatgatccaggtgcaaaaacaaagctgccgtagcagggctcctccacaacacagagggagaatgaagcgacaggcacgcgctccgtccaacagctccaccagccagccaggtcactcctgcacctggaggggctttctgggaagactcctacgtgctcccactttaccactgcatgcagggatttccacgtggaaatgtaaggtggggcccgcaggcttccccagcctggtccatctcactctcctcattgttctgttgtatgtgctgctgaaaactgggccacttttaagtggaaaacttgctcaaagatctgttttaactgccagctgctgcctcgggtgagttcaaagtcattgtttcatttaaccttcaaaaagttatgaaaacattaccgcctccattacacagataggaaaaaagttatgaaaacattactgcctccattacacagataggaaaatagttatgaaaatattactgcctccattacacagataggaaaatagttatgaaaacattactgcctccattacacagataggaaaatagttatgaaaacattactgcctccattacacagataggaaaacagttatgaaaacattactgcctccattacacagataggaaaatagttatgaaaacattactgcctccattacacagataggaaaatagttatgaaaacattactgcctccattacacagataggaaaatagttatgaaaacattactgcctccattatacagataggaaaatagactcagaggttttatgtgtcagatcccagcataagaagggagctggagctcagagtaatacgcccagtcatgcagtggattgtaagtaggcaaatgatcatctgaccttcaaaatgtggtgctatttcctggtatagactagaaatagaaaaccagcattttgattttcagtgcaagtattttacttatagcaccctcttagctccctcgtgtaggaaaaacaagtcccaaggttaccatgaagtctgtgtctttctgttcgtttgttctggggagtccgtcctatgttgacaaatgaaagaccttgaacatttttgtctttcctaccttctggctttagataaaaagcaacctcctcagagagtccccttataatcgcccagtttaagataggcttcctgcagctctgtcatgaacaccttcctttccttcatgatatttgccacactttgtaattagatagttattgacttttcaggtgtttaatatctgcttctctcaggagataatacttttttaaaagcaggagccatgattttagtttactgtgatatacccattctgaaatataagaggtacccaataatgattgtcaaacaaatgaatggatgagtggatgaatgaatcaagagttggccaatgagtcaatgctacaggtggccagacccaggatcttcataaacaacgcaaggagtcgaagagatctttgaaatgcagctcaactgctgcttcagtctgggcttttcaggtttccgtcatcacgtgcataaatcacagtgattttcactcagtgtcctgcctgcctggaagcccagccccttgctgtgtgttgttcaatcagaagatccacccactattccaggtccaaaagtcctacctccgtagcatctcacagactgttttctgttcgtcatacacagcagagcgttcagggctttaccctggatctcccctctgcctggcacgcacatccccatgcagccacggtgcttcctcttccccacagtgagtccctcaccacccggctgttaacacttttccctgctcctcctgacaggtgatctgttgatcactctccatctgctttagtttcctcccttgcattgaaatctttgtaaaatacagtaaagtgtgttcatttcgaatgctatcatgtgagtgcctctaccagatgtaagtgccacaaggccagtgtttttaccagtttgtcccctgctatatctccagcacctaatacagagagcacatagtaggtgttaaatagattcgcttttgaataaatgaatttatagaacccccacaataaaaatttcaacagggattaagggttctctcacgtttttataaatccatgagacagtgacaggcataggaaggttctcgtgcttccgtattgactctatttatagaaaaagaaacattagaaagcgaagtgacaatgaacagaatgcaacttttgccaaatgtgtaaacttaaactaaaaaggtcaaaggcatttactttgccaaatgtttgtggtgtgtctagcacgtgccagggcctgggtgacatgctgaataaactggtgagtgagatgcccctgcctttctgtggctcggtcttgtgcggcatctagactaggagggcgctgccaaggcaaggcccccgcgggagtgtcggggtggggacagcgggagagctgtgctgtgcagttgaggaagctgaggctgagaagtaggatgcaccacgtccagtcgacgaaaacaggacgagcctgctgtgcagttgaggaagctgaggctgagaagtaggatgcaccacgtccagtcgatgaaaacaggacgagcctgctgtgcagttgaggaagctgaggctgagaagtaggatgcaccacgtccagtcgacgaaaacaggacgagcctgctgtgcagttgaggaagctgaggctgagaagtaggatgcaccacgtccagtcgacgaaaacaggacgagcctcaacattcctgattcccgaatgaccatggttccactcgatgttcaatgaacacgttctgtcctcatgaggcccatgctgagggctaggcacaaaaccacgaggaagaaaaggccatccagggactggaatgctgcggaggagatgcctttgtccttgtttgccttctggaagctcacgggtctcctgtgacaaagaagcctcctgattccatgttacgttcttgaagaaaatgtctgtatttcactcccttcactgagcaccatgctgagtcgtcaaatacagatgttcttcccaacctgcattcttgcctctcttctccattctctgcccttgctcccaggagatctcaatcacagtgatgacttgaattctcaggctagcaaaccttggaatcatgagcaaacaaacctccttccaccttccacatttagcttatctacacatcatggaacttgtctccagagtgggtccccagtgagccatgccttgtgatatgcacggccttctgccatgccttctccagaatctctgcccgtcctatgactctcttttgatcaacgcaatgcagtgcaattgatgccatctgacttgcaggactgggttagaagatgcctctcagattccatataggtctcttggaagatccgcccccgggaaagccaggccatgtaagaccattgaccaccttaggaccaccaggcttggaggaagccaagacacccacgtggagaggctgtgcagggagtgagggaggtgcagccaaccctcacctggctccacttcaaggcccgggggccagacctgagcactggagccatcctgggcatcagcccagcagttgtcagaagactccagacacatctggcatttgtcaccaaccacatgaaaactgtgagtggacctacccagtgagggcagtgggagagctatgagaaagaagctcaagtggtttctggaggccactgggttttgggtgggtttccacatggcagcagctcctggacctctccccctgcagagcacccacagctgcccacccttgcgttccctctgcccctgccttcagtaagccctcagggtctcttgccagagccacggaaacaattttgttttcccgtcattgatgtctttcacttctaatccaagataaatacagcagttatcttaaaaaatacaggtgggatcttctcatgacttcaaaataagatttttgttgaataaaatgcagtagtaaggatttgtgaaaaataaaccagagaaaatgtgttgcagtagagaaggaaggaatctgtggactccgtctgcatgttgtcctggacgtctccaccctcagggatcctgagggtctctgcagaatcaccgggacttcagtgggcatcgttggatcagcaggcggaccgccgtgtagggtctatgatggaagacgtgtgtcactcccaaggaagcctggatacaaaaagcatctgtgccaagacgcagccctcactctggtattgggcagaacacaatccatgttgtgagacccatgaacaacacgtgacagggactccctttagaatgcaaatgtttccctaatccttatattctaaacagcataatacgttcattaattatattaacttaacggaataagaaaaccatgactggggtaggatcatcacaataaaaactaacaaaaattaggaaacatactagaaataagagctgcgtctccactagatagcaatgaggaagctgctgagagaggaagaaactggagacaacccccaaaataatgagacagagccagagtcggtaataggcggaacatggaaagtgaaaatcttcaaatgcttctcatttttttaatgcatgtcatgattcttatgcttatgtttggggtgtaaagttgatagaatgacaaaatattatattatatatgtacaaaaacacacatatactcacatgcccacactatataatggatatatttgctagttgtcagggttttattctatatttatattcaataacatttttatattattgaatattatttatatttttatatataatattttatattcaataatattcaataataatttttgaacatctatgtcaaacaaaggccaagtggagagttaagacaataggatggaatcaaatgaaggtgggaaactgacaggctcctccaggcggtgtgctccaaaccatcttagatatttaatatgaagaattgcttaaaatttttcaagcataagttgaagtatattaatcaataaaacaactgagataatcctattctacttgaagtcctaattgaagataacttaagcaaaataattggtgcataaacactgatattaatgatttctccaataatattatgtggctataactaaggttgagatatcaaaatcagtgattccagaaattcccagagaaactctactcagatatcccatagccataaaatcaattacaaggatgcctgttacaaacatagaagggttataaatgtggttatgccttgtgcttgtcaaaatatttgaaaattcctcaaattttaaaatcgacaacaaaacaaattctgttaaggatagtgccttggatactaccaatcaatattaaataattccagtcattttgcttggattttttttcagtgaaacttgaattattatgacaaaaggaattttaaaaatctaaatttaacaattatccatcaaataccacttcctccctcccagactaaactaccacaagaaaacatcaagtacattctactttctcaacaatagttttatcaaggttggaacactgacattttcataatgagaggtaaatagaataaggcgccatctcctaggagaacagtgacggaattaagagctctctgtataaatgacagcgtgcgccagggcgcatggttgcttccagttttcctgccaccatattcattaggttaaatattcaaccatgtggttaagacaaacatttgaagatacagaatatctctagctactggttgggtttgcatttacactgaaaccttacgctacctctgaatcacagcttcacgctaacaggacattttcacgtacatttttcaaaggtgtgaaaacatgtttgacctggccaaaaaaaattagaaaaatggtgagaggacaacctgttaggcaatttgctaggaataaataacacttgtaataatatattgctttaaaaattacagagtgcttttacctacataaataggcacttaagaattcatgcttacagtaaataaatagtaatctatgaaaaatgtagtctaaggtaaaaactcataaatatctcatcttatttgggagtcattacccaaaagtaattaagggaaaataaaattcagtttttgtgtaatgaatatattaaaaatttatctcaatgcagactactgaattaagtatttgaattctaaaacaagttttcagaattaaatgatcatatttccattttccattttccgtaagaaaaaattcatcttaaaacctggagtaggagaagcatgctgtgcatttcagggtacatccctgagtgcagctcagcccaggtttaacctcagttccttacttattcttcccttgctagtgacaagagttaacatcatgattcgcattaatacaagacacaataatattaatttcatagtgttagaaatactcaagtatacaaaactgtatgtatgcattctctttctaattataaattatttcaaatgtccaaactaacatacattaccttttaaacatactaactgtaaagtgaaagtatttttttttaatcatagctatcttacgtcacttacaaggaaatttggtttgcggaaatatgacagagaaaagaaatatgtatgtgtgcgagtgagggtgtgtgcctgtttaagagaataaaggagacttagatgactgaaaacacctaacattcacaaatgagggaaatggagatcaaccttaggagatttgcccagctcgttacaaaatctgggttaggatgccgttctttgccccccatggtaacagagttttagtctagatcgccggcatgcctcactacaatatgatagtgttaatcgtcaaattagctcaatcagctgagttttctatgaggaatggacactggttcctttgcgtctacattcacagccctgggagggagtggtcgctgcccttgcaagctcagcttagggtaaatcacaagccagccatgtacaccttaaagctggggatgaacgtcatctgcctgggcctctgttttctcataagtcacgtgctgcttgtaaaatgcataatgtgatgactataacttaacctgtttcaaaaatagtacttacctctctgcttgtctcttctttccactacattaagcttcctattaaggccttttttatttatttttatttttaaaaatcattgtaaagtcagtacagggcttgttctccatctcactcttttaaacctaaattattgtgccctgaaggccggctctgtacgctggtacactgtgagggatggatgtgaagctaaggggagtcatgctcttacaaaaatcaagctgttggtgaaactcaaacaagagaagctaaaaatttataattaaggtaactcttaaggtattacttgttcctataaagcagtttgtaaattacgaaagatgatcccatgctccccactccgcactgtggatacgaatgtgcgcattgcacacacgtgtgtgtgtattatcctcatctctgaaccgtgcaatacctcgctcatagcgaccaccgaagattcctaccagctgtccccattgagtgcgcactgtgtggtgggtgttttaatctcaggaatcctgcagactcccccgaagtccatttccagtgaacctgtgtgttagacccacggccaccaggtggcgatggcggtcaccgggaggccggcgcggaggaaccagcgcccacagacccttgctcggcggaagtcaaggaggtgccccccagcccgtggatcgaactgccggattttcattttatagtgcaactcttttaaacatgattccatgttaaaaataattgtgcttgtaagtcttttaaactcgctctccttcaatcatattggcgaggaaaacattttctaatttgcagcccaggctggagtgcaacggcgcggtctcggctcactgcaaactccacctcccgggtccgggttcaagcaattctcctgcctcagcctcccgagtagctgggattacaggtgtccaccatcatgcccagctaactttgtatttttagtagagacggggtttcactatgttggccaggctggtcttggactcctgacatcgtgatccgcccgcctaggccacccaaggtgctgggattacaggcatgagccaccgccctcaacctctttctttgttgctttttgttttttgagatggagtttgtttcgctctgtcacccaggctggagtgcagtggcgtgatcttggctcactgcaacctccgccttccgggttcaagcaattctcccgcctcagcctcctgagtagctgggattacaggtgcgcaccaccatacccagctaatttttgtatttttggtagagacggggtttcaccttgttggtcaggctggtttcgaactgctgacctcgtgatccgcccacctcggcctcccaaagtgctaggattacaggtgtgagccaccgcgttttttcaagctttcaggaattctctattatgaatgcagtcttcgtcctcccactttgctactggagcccaggagggggctgcggtcgcctgtgatctcagtcccttcttgctctatcaatgattgtttctgccacatgagaccacccgggaaggaaagggttgcttggctgatgccggccccgatggcagggaagcactgctgctccccgcacccctgaccagggaaggtgaggtcttcctacgctcttgttaaactgtgcgtctgtcagcagggcggcaccgtcatctggcgatgatgtgcacgtggacctgattatggcactggtgagatcccacactatccaatgtgactagcaatgccgtgcagtcaactgcctgtatctcccactcactttaagagtgtgggcaccggctccagactgtctggcttggagtctgagtgctacttcttcctgtatgtgccatcttggacgatgtatttgacctttctgtacctcggtttactcatctgtcatgggaacactgcagcccctctctcctggggactctcatggggactctgcaggtggaatgcactgatggatacgaggtgctcagagcagtggctggaacacggaagcacccagggcatcagagccaccatcatcacagaatgtctgcctgtgtctggcattagactacacgaaggggtaggaaaaagcccaccttcctccctgtaatggccggcgtaggcacataacacatgtgtaacacgctatcatatacaaagtaattcatgtacagggtccaagttcttaaagaactcaagtcctccaaacaaaatagacgatttaaagctaacagccattacttggacattgttgtatagtcttgggccatgggcaaaatttaccaatgtgtaagagtttaaagttgttcctcttcgcttctctgtcacagagaacgctgggttggccatacaacttactgtccttccgcatcagtggagggttctgtctctgccaggctggttcctggtgttttgtacagaattgtggaactgggagggaggataggaatgtgtgtgtgtgtgtgtgtgtgtgtgtgtgtgtgtgagagagagagagagagagaccaatgagtagaagacagaactggatccacacagggatttctatggggaggcgcagacagggacagtaggagagagagcttgggggcagtcacacagggtgagggaatgaatgcaaactgagagaagccaggagattgaggggttttcagggcacgctggctcgcctgaccttgtgtttcctccccaacattctggcacagtgggggatcatctgacccatttctttgggcacagcatcactgccggatgaaactctgaaggctcaggctatgttgggttaccctgtttttctgtaatcctaggatttaaagaatttgatttgtttggggctgtttcagcatcttagagcctgtgggaggcggaataatgctcttctttccagaaaagaaatccctaaagcgaatccctagaacctggggataaagtatgtgagtatcttacatgacacaggagactctgcaagtgtcattaagttaaagtccgcagatgggaagtgctatggtttggatctgtgtcccgcccaaatctcatgttcaattgtcatgccaagtgttggaggaggggcctgctgggaggcaattggatcatggggcccattttccccttgctgttctcacgacactgagttctcgcaagacctggttgtttaaaagtgtgtggcaactctcccttttctctcttcctcctgctctggccttacaagatgtgcctaattcccctttgcctcccgccatgactgtaagtttcctgaggcctcttcagccatgcttcctgtacagcctgtggaactgtgagccaattaaccctcttttctttataaattacttagtctcgggtatttcattatctcagtgcaagaacagactaatacaggaagatgatcttggatagtggagggcccagtgtcagtcctcacaagggtctctgtaagggaaagaggaaggcaagagggtcagagaagtagacgtgatggtgaaagcagacattagcatgtggcggggccctgagccctggaaagcggctgccgctggacactgggaagtacagggaacagcctctcttggagcctccaggaacacagccctgcagacccacttcagatactgacctccaaagctgtaagccaatcatctgtgatgttgaaaccacagagtgtatggccaatgttaccgcagatgtaggcaacaatacagagacttttcctaagactgcaaaatgcccttggaggactcccagccacccactcgcttttgggttctgcattttcttcctcagtttctttggcctgaagagggccctgaagaattcacatgtggatatgatgtgtgtcttacacacaatttgaaaatacaaccacataagccaattagggataggcgaatattacaataaaaacaagctattctttttcttttttttttagatggagtctcgctctgttgcccaggctggagtgcaatggtgcaacctcagctcactgcaacctctgcctcctgggctaaagtgattctccttcctcagcctcctgagtagctgggattacaggcacgtgccaccacacctggctgattttggtatttttagtagagatggggtttcaccatgttgcccaggctggtctcgaacttctgacctcaggtaatgcacctgcctcggcctcccaaagtgctgggattacaggtgtgagccaccctgcctggcccagttattctttatatttgcatatttttagaattttagtagctttgattatctgctatatctcattgattctttcttaagaccatgtgaggtaagaataccaggatactatttccattataaatgcagagacagatgtaaagaggttgacttttctggagaacaaggggtggtcccgacacaaaggctgaagttgtttgaagtatggccagacactttgctgaggcacagacatgtccacctgtggcacaggtggggctgcctagaagcctccccgactcaggtcggtgctggcctctcccagccacggtttcacatcacatcatcccgtatttttttcaacaaatacaatttaccacttaccttgtgagtgactttccatagaacttaaacattaaaggcaaacctttatccatagttagttgaggttttcttaactgaataagcaatgtataaccattagagaaacacagaaggaagtctaaaatatcacataaaaatctcagggcctctcatcctgcttttctctttaccttcctgtctcttctgcccttttactaaactacccaggggcagttcgacaccttggtgtctcacacacacctgccagtctccctcactgctggggtggtccaggccttagtgagtgggggtctacttgccacagcctcctgtcttgccttcccacatctggatccaagttttattatgccacaaagatgagctattgaagatctatttctgattctacttaaaacctttaacaatgctacacatcaatgaataatttctggagattatttctagaaaaaatgtacaatatgatgatttgactcccgtatgtatcctttactaaactgtaagctccacaaagcaggaaacaggtacattctgctcacctgtgtattgctgtggttaggtgttaggcacatcaaccttaataaatatttgttgaatgcgtgagtggggcatgaaaacctacacactcaggtgtatgaagacatggtccttgaatacccaagctcaataaaaaaggcaaattagggagtaattagaaataatacaaaatattgtaattttggaaaagaatcattatgagtatagtgcaatggcattcttttatggtacccttttgtgttgcagaagaccataggaaaaaaaatgaaaggaaagagtagagaatgaaaatgcttaaaaccattaatatcatcaacctaaataactttaaatagtataaagtaagtccattgaagaactgtatttccattaacttttcaaacacaccaagagatgtagtcattctagcaacaatgccgcaatgcaagaatcaaaagtaagaacagacggcttctgtgtagcttcacagcattttcctgtggagcacactgtttcattctcattatcacccagatcatggtggacacaacattcccctcgtgggccatggctaacccaggctccaggccttgcatttggaaaggggagagtaggggcgggataagagctctcttccctttcccagatctccaactgttccaccagcttcagggtccctgtgtttacctgggagggaagttgcttacatgtctttctggtcaagctgctctaagcccacgactgcctttttaggggattattttgagatttagagatgggatgtccatgctcaataaacaatgatcctcattatcataggaaatgcattttaatgtttgcactagaattgttccaaattaaagcaatcccatagctccaactgtaaagaatgcttctataatttaaaaaatgccccttgaagtaagcattggaaatccgccatgtgttcaccaccacccctgctgtttcatagccatggggtctggggcccagaaagaagagggtcatgaccatgttgtgcttatcaagataacctcagccccttgccatagggtgggtagggattggcgagcctgaggcagtcaacacaagtgttctgatcagaggaaccaatccagagaggggtttgtaacctcaactgagacaaggaaggaaaaatggaagtctgctgcaggactctcgctctgatgagctcctttccaaaactggccttctcctctactgggcatggtcatctgggaggcaagggctgggcctgctgccacagaagtgccccaagtgccaaggctccatccgcacattttatcaccagttcctgtttgtgtatgaagatttcttagagcatggaccacccagatgaacactaatttttgagtaccaaaattttcattccttgagtttcagaggatttataaccagcatacactgctgctccatttcacacggatcacagatgtgtccatgtattttagcccagcaattctctttcttcataacggaagcctccagggcttttctagcctactcaattctctgggtttatgcatttctaaagagctgaattgccttatagtagtaaccaaactagtcaacccacctttaaattctacatgcattttttaaacttttattttaagttcaggggcatatgtgcaggtttttacgcaggtaaacttgggccatggggtttgttgtacaaattatttcatcacccaggtattaagccctagtacccattagttatttttcttcatcttctccctcctcccagcctccaccccatatgtgttttagaattagacttcgctgcaggtacacgtgtgcaattatgcacacacactgaagcagctctcacaactagccaaagagcctcctcggtaaagacaacactttttatttaaatacaaacaaaaggctctcttaaaacctgttttggccttgaaagagcatccatgttgtcaaggatataaggtgacctaatgttaattttgtaactctacaaagctccctaggtgcataaacccacaccgccatctcaatctagagatcctgctaccaaatagagccttgtcagaactccagaatgttcccctacacccctcccggtaagcagctgctcttctgacttgcactagcatcccttcgtttctctccgtcctgagtgttatgtaaatgaaccacgcagcatgtgcacgtctgtgtctggactgagctccgcagctctcatgcagtgctccactgagctgctggaccactgagcaaagatgaggaaggaggcacaaaggctcacatttgtgactctgatgggaaggctcctcccagaatcacatttccctgcatccacacaccaccacctccttgccgaataatgtaatcagaagattagggacttctgagtcaaagaatagggtttgaattcagtttgccatttcctagctgcctgaaattaagtcactgatcctatcttagtctctctaaaataaatgtattaataatgctacctaacagatttgctgtgatcattgaatgaaataatgtatgtgaaattactttaaattggaaagtatcataacaatgctaattatgaaaaacaacaactgtcctttcctgacgttaagaaagatagtgatgcaaaccagaaaggtcaccagctctgagatcgcttctaaaccttgaacttctttttatttttttgggcatcagagtctctctttgttgcccaggctggagtgcagtagtgtatttggctcagtgcaatctccacctcccattctcaagtgattctcctgcctcagcctcccgaatagctgggattacaggcacccaacaccacgcctggctaattttttgtatttttcatagagatggatggcatttcaccatgttagccaggttggtcttgaactcctgacctcaagtgatccacctggctcagcctcccaaattgctaggattacaggcatgagccactacacccagccttaagcttgaacttctaaatgagaagagtattatctacagtgcctaactttatgggatgcacaagaatcaagagaggcatgattcatacattcactggtgaaaggtagagttggtggcaatggggattattctatgtaaaaacatagtctaatatatgttaactacataaatacacatttgtatttaattaaaatttataatggttattatacctacaaattaaaggaaataaatggaaaaacaataggaaacattctatacccatttcaaataaagagtgtacataaattcccaccataattcaacagcataggtcatattaaatggagaaatgttaataacactgcattgagatcaggaaaaagagatgtccttcatcatcccttctagccaacattatttaggaggctccagttaacatagtgagataattgcccaacattatttgcataaatattaaaagggaagatgctttgtttgcagatgaaatgatttcatgccaaggaaacagaagagagactcttccaaggaatattaaaattagtagaaaactgaatacagtggttggagacaaaaaacataccaaaattaatggcttttctttctattatcagtcgccacattgacacagaaatggtaaagaaaacctcgttcactgagaagacagacgctaatccacaaacccagagcaagaccttaatgaatgtggtgatgcagcagatgcctggaggagaaggtggtcgggaagaagttacatccacaagcacagtttcacgtgtctctagtctgtctccagataggttaatttggggatcttcaaaatttgaagatcacttggaaaaataaagatatgataactgctgaacaattaggcaaatatcatgctcttctggatattgagggcttactataaagctaatgctatgaaaccagtatggtattgacatagaaatgggaaaaaacagtttgattgaaaagaatgaagagcttagaaaaagttccaaatggcagaaagtgtgtgataaagaaggcactgccctagagtggaaggcagctgtccccccagagtgcctgtcaggctggagcccacacaggagagaacacagccagctggacaagtgaccgcagccacaaacaccaattgcatattgagtcaagaattaacttatttaggccgggcgcggtggctcacgcctgtaatcccagcactttgggagactgaggtgggcggatcacaaggtcaggagatcgagaccatcctggctaacacggtgaaaccccatctctactaaaaatacaaaaaattagccaggtgtggtggcgggcgcctgtagtcccagctactcgggaggctgaggcaggagaatggcgtgaacccgggaggcggagcttgcagtgagccgagattgggccactgtactcctgcctgggcgacagagcgagactccatctcaaaaaaaaaaaaaaaattaacttctttaaagaattgtaaacttaaggaacataagaaacaggccacagaactgaccagatttgactacataaattttaattttctacgtgggaaaaggcaccataggtattcataaatattatcagcaatctaatggtagattgagagaaaacatttgcattataggacagaaaaataatctatatcccccaaatattaagatagccttaaatttgaaaagagaaagacaactcagtataaaaggggttccgaatagggacggcaagtcacagaggtagcagcacgaggagctgaggtaatgcccagcctccttagcagctggaaaaatgcatattaatataacagaagagttccaccgagaacactggccaaaactccaaagattgatcacatccaccgctggtggtaacataaccaattgctataacattgtctgcagaaatctggcattactgatgaaaactctgaatggtattcccctggatccaatgatccaatacacaggcatccctcctacagaaataaaggcgcaggtgtccaggtgtgtgtgcacaaacacgtctgcagcagtggtctcgagtggaaaagcctgggaacccacattcatgttgatggcagaggaatggtggagtcaattcaggctaaaatgcaccatgggatactctgctgctattttaaaaaaagtgagatagggcaggtcattttgacccagagaggcgtctgtatacataatggagtaagaacaggttgatgatgagaacttcatagtacaaccacggaattcgcaggaaggaaatgctttgtgtcaacatagatgcttttgtgagtggatacaagtgaacatgaacctttggataaaatgaggggaataatattagcttttttctttgtgtgctcttgtttgcttagtttatgacaattttatttgtcataaacaattttattcttgaaatttcaacaagaaacccaggcaagaaaaaaatctttaaagctcctttcatgagtgtgtttataaatccagttagaaatttccacattaacaattctaaaaaggagcagtcaatatttaaaggaaaaatgcatgacccctaaatagtttttaaagctgaaagagagggaaatctgtgttgcgataccttatggaagtagagacgggatggtcttcaacagcagcagctgtccctggggaaagctactctggttctcctttccctaagtataaaaagctgtagtaaccaaagcaaggagcccaccaggtacacagagctcacctcgtgcagctcggaggaaaagacaggaaggggtcaatccatccacattaggatgcacattacttaggggacttggaggaaacaccacttagtgcacagatgcgcataaatcaaacagcctatgatacaacagttatggcaaaattatgcttgtggctcctagtttagaaaaaggcaacacaagcatattcataatttccagtgcagatgtcaccttctctttttaaaattgcttttgcaattttaaaatgtcattttattggtgaaaggggctgcatggagagtttatttacttactgattagattgataaatgtgatgcccaccattagcctttggacatatggttacagagatgacaaagcacattagtaactaaatgagaggttagtagcttggctaatagcagactttagcctgtaatgtgggggtgaggtggggccatggacacaatatattcatgacaagctgtcccatggaaaacgggccactggggaggacttgcaagagcagtgattgtgagacgtaaccgtgaggttttggtgcttctgacagctcttcccaagtgggaactcggttttcccaagtgagaactcggtcatgtaacctcactctgtgctgcacagagactactctctcagacaccacgttctctgcaggaggtacatggtctctaattctggaaggggacatgcaagagagttcatccttttttttttttttttttttttgagatggagtctcactctgttgccaggctgaagtgcagtggtgcgatcttggctcactgcaacctccaactcgctggttcaagtgattctcccacctcagcctccggagtagctgggattacagcaggtgccaccacgcccagctaatttttgtatttctagtagagatgggggtttcaccacattggccaggatggtctcgatctcctgatctcatgatctgcccaccttgacctcccaaagtgctgggattacaggcatgagccactgcgcccagccgagagttcatcattttgggcagagcttgagggtctcttaagaaatcgttctactataaagacacatgcacacatacgtttattgcagcactatttacaatatcaaagacttggaaccaacctggatgttcatcagtgatagactggataaagaaaatgtggtacatatagactatggaatactatgcagccataaaagagaatgagttcatgtcctttgcagggatatggatgaagctggaaaccatcacagcaaactaacacaggaacagaaaaccaaacaccacatgttctcactcataagtgggagttgaacaatgagaacacatggacacagagaggggaacatcacacactggggcctgtcggggggtgggggcaaggggagggagagcgttagaacaaatatccaatgcatgcggggcttaaaacctagatgatgggttggtaagtgcagcaaaccaccatggcacatatatacctatgtaacaaacctgcatgttctgcacaagtatcccagaacttaaaagtaaaatttaagaaagacagagagagacaaagagagagaaagaatctatgtgatatgaatagactaagtctacagaaatatatgaactaaaaaattaagtcctttcaaggcatctatggaatcagaaatgctcacggtggcctgttggaaatttattgggtgtcttggtaagtcagccttaaaagcagtcccctgtcctgtccttaaaaactccagcccctcttctttgctggagttgtctcttttcatattcactgacaattgctaagttttgaaagatgtcataacaaggaggagaggtatgcttctctccttatgttcctcctgtacacaccgtcttctttgggggggacgaagacacacgttaagagacggcgctttttgaatgtttagggcaaaggctcgcatgccagcattacccaccttgtgcttatctccaaatatacttttaaaagtttaggaagatcacaggacggcagtgtaaagcgatgatctatacaggcacaaaaaccaagagactgctcctcctacatacagttagtgtcaatcaagcgcaacttctcccaacatttgcaaattagggacacacggaacaaggcacatcacaaaacagtgaacttagcaagaaaggacagtaaattcagtgaaaacaatcaaagtcactccccctcatgcttctcaagcatgctaatctcttatgttgttatttttaagttactgctatttgtggagattaatcccacagcagttaatttcctcatactcacccagtgtaaactcaaaagcataaaaacacaaaacagcatagcacaccttttcttgggaagctgatatgaaggcaaaatatttttattcttatctttaacatgcttaattttaaaaggggataaatagctgattaattttttttccagtttgtctccaaatcacaacacacttgctgctttctgaatggtcccttggtgctgatctgattcagtggccaacatgtccccgtctaaaggtggtacccaccctcacatgaaagggaaatgtttgcagtgaggtcatgtgccctccttccccaggctacttttcctgactctccactatgcccgggtgcttagggacacaccacatgccctaattgtacaaataaagcagatgctttaagagaaaaaaaaggacacgggaataatttctttaaacttaacagcacagtgttcatctacgtatggtggaagagaatgttgattctctttagaaactgccacttgatcccccagccattttcacctcttctagtcccttgttccaaacagctgaaagtctcctgatggtggtgtggtgatcaaacacaattcaacgtttccaaaactaaactcactatctctccccgaaaatccatttgccctcgagtgcacccagcccagtacattgtgtgtccatggcttcagctctcatgctggcacccctgggagtctcacctccctcctggcttccacatcaggttcattgtttcttacatctccctaccaccagatggcttctctatcctcattgctaccatgccacgaagatgcctccaaactttgttcctactattgtaaatctcctaagagatcttattcctccagtctggctccctgaaatccacttttacagatagaagctggatcattattattagaaaacaaatgtgactatgtatgtcccttgctgaaaatcatacatgctgctattaacagaatgtctgtgtcctccccaaattcatttatgttgatgccctaaccacagtgtgatggctcttggaggagaggcattggatgatgaggtcatgaagatggagcctttagatggaattagtgccctggtaagaagagaaagagagaccagagctctctctctaccacatgaggacacagtgaggaagtgactgtctgcaagccaggaaatgggcgcttaccagacagacaacagatttgccagcactttgatcctggacttccagagtccagaaatgaacgttgttttttaagctacccagtttgtggtattttgttataacccaaaggaactaagatgtatctctttcctcgtctgtggctaacagtccaaactccttaacatgtattgcaaaggagggcaccacccacctcctatctcactttctcttcatcacaggtagctgcctacccaggtgaaactcttgcacctcttcaaaggtaccatctgccttcttgctttcaagtctccccacattccattctggctgcctttggtcctggctatttctatctaatccactccaccaaattcagttcccttctctgcacctttccagctccctgctccctcactggtgcagaatttctgagtttattctaattaataatcaagctatctgtgtgatatggtttggctgtgtccccacccaaatctcatcttgaattgtagttctcataattcccacgtgtcatgggaggggcctggtggagggtaattgaatcatggaggtgggtcttccttgtgctgttctcatgatagtgaataagtctcaggagacctgatggttttataaaggggattttccctgcacactctctctctttcctgctgccatgtaagacatgactttgctcttcctttgccttccaccatgattgtgaggcctcccagccatgtggaactgtgagtccattaaacctctttcctttataaattacttagtctcaggtatgtctttattagcagcatgagaacaggctaatacactgtgtaagctactaatttcttacctgagcagggcaagaaatttcctgtctcattgaccattctgtcccaaagtatgacacatgttctgaagtatgtttgttgatagaatatagaaatgtatacatgaacgaatgaacaaaagagaggaagaaaggcagagtggacggatgaagagagaaatcagtggaaaaggaggctgggtcttgtactctatggaaaaagccataatcatgccatgtggtggtgacagcatgccatcatcaatgagtgaccaaagggccagagaatgtgctaagatggccagaaaaagaggaatgcgctgtctttcagtctgtcctcccactctgtggacctgggcctgccgggcttggcctttaaccctggtcctctctcgggtctcttaagaaaacgttctactataaagacacatgcacacatatgtttactgcagcactatttacaatatcaaagacttgaaaccaacccaaatgttcatcagtgatagactggataaagaaaatgtggtacatatacaccatggaatactatgcagccataaaagagaatgagttcatgtcctttgcaaggacatggatgaagctgggaaccatcattctcagcaaactaacacaggaacagaaaaccaaacaccctagctctcactttttatgttcctccagtctgtgactctgctgggaaacagaataatgagcaaaggagagaaaatggttcatctcagagcagccaatttgttctttctgtcccttagcagtcctttcagaaactgcatattccagcatacagatgcctttgtggtttgaaagagttaatatgttaccaaggagcgaggaatttaaattcttccgctcctcaccgacaagatcaggtctgatatccaggaaactgttaaattcttcaaaccaaggctgagaatcttcttgacaagcaaacacatttctcagctctgggtaacagtttctgagagatgtagatatgagagattatttctctcccttccctcgccctcaagaggagggagcaagtcaatcatggacacgtcccagcctgttagcagagctcaatttctttgatggtttaaaaatcaatgtatgttctttctctattaatttttaatcatgaaatcttcaattttagtaaatccatattattcttactgtttagattttctttcttgtcttcaaagaaatcagtaatctatcacacatcctcgtgaggcttgtttatactgaattggcataaactggaagcattccctttgaaaactggcacaagacagggatgccctctctcaccactcctattcaacatagtgttggaagttctggccagggcaattaggcaggaaaaggaaataaagggtattcaatcaggaaaagaggaagtcaaattgtccttgtttgcagatgacatgattgtatatctagaaaaccccatcgtctcagcccaaaatctccttaagctgataagaaacttcagcaaagtctcaggatacaaaatcaatgtgcaaaaatcacaagcattcttatacaccaataacagacaaacagagagccaaatcatgagtgaactcccattcacaattgcttcaaagagaataaaatacctaggaatccaccttacaagggacgtgaaggacctcttcaaggagaactacaaaccactgctcaatgaaatagaagaggatacaaacaaatggaagaacattccatgctcatgggtgggaagaatcaatatcgtgaaaatggccatactgcccaaggtaatttatagattcaatgccatcctcatcaagctaccaatgactttcttcacagaattggaaaaaactactttaaagttcatatggaaccaaaaaagagcctgcatcaccaagtcaatcctaagccaaaagaacaaagctgaaagcatcacgctacctgacttcaaactatactacaaggctacagtcaccaaaacagcatggtactggtaccaaaacagagatatagatcaatggaacagaacagagccctcagaaataatgccacatatctacaactatctgatctttgacaaacctgcgaaaaacaagcaatggggaaaggattccctatttaataaatggtgctgagaaaactggctagccatatgtagaaagctgaaactggatcgcttccttacaccttatacaaaaatcaattcaagatggattaaagacttaaacattagacctaaaaccataaaaactctagaagaaaacctaggcactaccattcagaacataggcaccgcaaggacttcatgtctgaaacaccaaaagcaatggtaacaaaagccacaattgacaaatgggatctaattaaactaaagagcttctgcacagcaaaagaaactaccatcagagtaaacaggcaacccacaaaatgggagaaaatttttgcaacctactcatctgacaaagggctaatatccagaatctacaatgaactcaaacaaatttacaagaaaaaaacaaacaaccccatcaaaaagtgggcaaaggacatgaacagacacttcgcaaaataagacatttatgcagccaaaaaacacatgaaaaaatgctcaccatcactgtccatcagagaaatgcaaatcaaaaccacaatgagatagatatcatctcacaccagttagaatggcaatcattaaaaagtcaggaaacaacaggtgctggagaggatgtggagaaataggaacacttttacactgttggtgggactggaaactagttcaaccattgtggaagtcagtgtggcgattcctcagggatctagaactagaaataccatttgacccagccatcccattactgggtatatacccaaaggactataaatcatgctgctataaagacacatgcacacgtatgtttattgcggcactattcacaatagcaaagacttggaaccaacccaaatgtccaacaatgatagactggattaagaaaatgtggcacatatacaccatggaatactatgcagccacaaaaaatgatgagttcatgtcctttgtagggacatggatgaaattggaaatcatcattctcagtaaactatcgcaagaacaaaaaaccaaacaccgcatattctcactcataggtgggaattgaacaatgagaacacatggacacaggaaggggaacatcacactctggggactgttgtggggtggggggaggggggagggatagcattgggagatatacctaatgctagatgacgagttagtgggtgcagcgcaccagcatggcacatgtatacatatgtaattaacctgcacattgtgcacatgtaccctaaaacttaaagtataattaaaaaaaaaaaaaaaagaaataaggactgcctccgaaagcctggtgtggtttcccgcctgggccgcagtaaaggcacactgtgctagctgggcaggccacttgccatgccattctgtcttctaggaactgcactaccaacggcacatgcaaaacaatcacgttccttcttatgaaggagcttggattctagcagggagataattataggaccctgtattaggtgccagaataggatgaggacaccgagaccagcatctggtctaccaagaggcgtgaatctaagaggacttcctgcaacagagcatatggaacaagtgcatggcgtctcctcctcccatacacgtcccctgactgctggaatgccatctactagaaggggagacgtggtctccagaaacctaaattcagccatgaaatttcatcttctttatttaaactgtagctgccagagtgaagaatgcaggtgagttacaaatgaatgtgcatgtccaggccaggcgtggtggctcacacctgcaatcctggcactttgggaggccgaggtgggtggatcacctgaggtcaggagttcaagactagcctggccaacatgatgaaaccctgtttctactaaaaaaaaaatatatgtatatatatacaaaaattagctgggcgtggtggtgcgtgcctataatcccagctactcgggaggctgaggcaggagaatcacttgaactcgggaggcgaaggttgcagtaagccgagattgcaccattgcactccagcctgggtgacagagcgacactccatctcaaaaaaataaaataaataaataaataaatataaaaaagtgcatgtccaggcaccgggagacgtccgcactgcacaagaggcagttctgttcctcatgttatggctgaagactgagtagaacagaatcattggcaagtgctgcttactcttccatggttgtagcaaacaaaactataattttgagaaaaatattttctttattaaagttactcacattcttgaaaaataaaaatgtgttttcatttcctcaggtatgttggtttattcttgtttgttctattcttaagaatggcatttcagattggggagcaaggatcggtcaaaacttttgcatcatgtattaaaaattataaagcacaacatgatatatcacataaactaaattagaaagagatttctcacagcagaaataaaatatgttgcttatttctttcttgtatttaatcatctgccataacacatgtatatcggcagattgaaattcctaatttaagagagtcctataaagcctttcaaaacaagaaagttgttgacatacattgatgagcattactgttaaatgtaaaatcatctcaacttagattaaataaaatgttttttaaaatgtgccatagcaaatttaaaattttttacacattaaaagtcaggaaccaataagaatgttttgaaaggcaatttattccaattgtttttgttaaaaaagctgtttaacagtgcacttattctgttttgtagaaatttgctctttttgcaagataatggatcaatgtctttattttttttctttctttttcttttttttttttttttttttgagacagagtatcactctgttgcccaggctggagtgcagtggcacgatcctggatcactacaacctccgcctccctggttcaagggattctcatgccttggcctcccaagtagctgggactacaggtgcccgccaccacgcctggctaattttttgtatttttagtagagacggggtttcaccatgttagccaggatggtcttgatctcctgacctcatgatccgccgcctcggcctctcaaagtgctgggattacaggcgtgagacaccacgcccggcctaatttttgtatttttaatagagatggggtttcactatattggccagtttggtctcaaattcctgacctcaggtgatccacttgcctcagcctcccaaagtgttgggattataggcatgagccactgcgcctggcctggatcaatgtcttcaaatataattttttgattgttcggaattaggcaattgcatattgaaattatcaaatacttttttttaaattaacccaaaactatataatcatagaaatttcactgtctttaaaaatgtctcagaaatctgcatattaattccaataccgcttgttttcattgtaaacattatgcatgctcttgtaagatattcaaatcccatggagaagtgtatggatggtatgaaaatcagtgaacatttcatccacaaagagataactactgtttgtttttattaaattgatatctttttattcattccttctgtataattaacgtacacacaggcatgcataatcataaaaatacatggttgtgtgtaaatgggatcccacaggtaaaccctttataatctgcctttccactaataaacatatggatttttatgtcaataaatttaaatttatattaccatttcaaggctgcttaggagttcccgtggctgtaacacatttcataagacttttaggatgccctacccacctgtttaaaccaatacagagaacacattcccttttcccatctctatctatgtattgcattatcccgtgagataatgaatttcagtttcagaagtcagatttctgggcctgagttctgctcgagcactctttttcctactgttgatagacagagctaagcttcccatcagaagaggtgcactaattaaacctctcgtatcaggagaagagacagtccacttaaaatgtattttggaaaagtctgcgagggccaataatagtttctggcatatcaagagtgctcactctttgaggatgtgtttggattttacaagtaaccctacgtcatggggccaggacagatgaataagctgtagagaaagttgggtgctagaacgaagaacaagactcagccaaacgccagagagctggagtaaaaccttagtccaggagcctcctttgaaggttgcagagaaactttaaacattgagaaacttctatgtagggagaccgactcagtcaatgaattttggaaatttaaaaaatgataattaaaaacccaagcacgtcctcatctgttattttgagattctccttctcccacacgggaaagcttaatgttttctttttagtcaatataagaaaatatcagctttcctttaaaaataattacttctgtctaccttttcttgaaagatcaaattcatatcaagttcatgctttctctcatatgacacaaaattacacggctgttgtccccctttctcgcctgtttgagccttgttcaggatgcacgtgaatcctttcctagactcagcaaacatcttgtgttacgagttgcaatcatctactctcaaggaccagagaagtgacctttccaaacgcttaaggacgcagtggatgtttagaagacagtgccgcgaattgtcatagcattcttcctcctaccatcctttacattaattttctcattatttcaatatcccacatgtcctatgcatcttatcaactttacagatattttaatagaacttttgctcaaacagtggtgactgagtttgtgagtttgttgttatgcgaataccaccaggatctctgcataagaccaactcaccaggcgtgaagcgtcaactccctgggctgtgttgtacatgttcccatctggagagggagctccacatccatgcacagtaaccgttcagaggtacatttgtgtgcagtgaacattaacaaagggttagagattctgttcccactgccttgtgagctgatgtatatagacaagcaaacccaaactctgataactatttttgttttttttgagaaggagtcttgctctgttgcccaggctggagtgcaatggcatgatctcggctcactgcaacctctgcctcctgggttcaagtgattctcctgcctcagactcccaagtagctgggattacaggcacgcaccaccatgcctggctaatgtttggatttttagtagagacaggatcttgccatgttggccagggtggtctcaaactcctgacctcaggtgatctgcctgcctcggcctcccaaattgctaggcttacaggtgtgagccaccatgcccggccataacttttttaaaaagttgtaggctgggcgcggtggctcgagcctgtaatcccagcactttgggaggccgaggcgggcagatcatgaggtcaggagattgagaccatcctggctaacatggtgaaaccccgtccctactaaaaatacaaaaaattagccgggcgcagtggcaggcgcctgtagtcccagctactcgggaggctgaggcaggagaatggcgtgaacttggggtgcagagcttgcagtgagccgagattgtgccactgcattccagcctgggcgacagagcgagactccgtctcaaaaaaaaaaaaaaaaaaaagttgtagattctgaagtttaaaaacaaagagaggaatgccctagaaaaacaggaactgacggaggaggctgtgcctggggccgaggtggtcggtcactctatgtgcacagcctgccttcaccccacatggccacacttcctgcaattctattggtcagggattcccttggaagccaacgtttatcttagactctcaagtcctctcagggggtaggagcctcacttactcacgtaccactgagcctttgtttaagagattattcttctcctgatgtctgtgttaggtgctaagaatgatgtgaggggcagaggtgggtcatttgggaggcccaggtgttagaggggacagaaggctgagacatggggtggcatttgtacccaggggatgggcacagctaaagaaaagaggagcttactctacacaaacttggtctgatttaaaatgcatgttgacatggaatactatgcagccatcaaaagaacgaaatcgtgtcctttgcagcaacatggatgcagctggaggccattatcctaagtgaactaacacaggaacagaaaaccaaatgccatgtgttctcacttataagtgggaatgaaacaccggatactcgtcggcataaagatgggagcaatagacgctggggactattagagggggagggagggaggggcgcaagggttgaaaactattgggtcctatgctcagtacctggatcaaccgtaccccaaacctcagcatcatacaatacacccagctaaaaagcctgcacatgtaccccctaaaatctaaaataaaagttgaagttatggtttacaaaatcctaaaaacagaaaaaccaatgtgcgttggttgcacctgcacctgggaggttaggccgtcaggtgggggtgggggaggttttgtccccctccctcctgctctgccctcagcttcccaggactaaggccactcacagtcatggctccccagccacccccacgcctgggccaccttcaggagggagaagctgctgatggaggtcaccagtcagcggcctcatctcacgtttccacctgctgggcttggccatctgtatggctcacaggttaaattcctccatattgtgtgctggaaaactaggcataaatggaattgttcacagtaacttattgttccttgtataatcaaatccatagtctgtgcagaatccctgcccctgaatctctaatactatggtttttctaagctgtgagtgaagtggaaagtaaaaccttatggactagtgtgggaaacggcagacactttaggtgctggatccaaaggaaagctcctttgcatcttccagcccctggttccagtgaaccatgaaagtccagctatgtggtcatcggacatgccctgggtagatacacttacatgtaatggaatcgtttgtaaaggattaaaggagctagaacgtttacaatgtgctttaaatgttatttttaatagactttcacaggctagccagcatctttctgcggctctcatcatgtaaaatcccgtttacaacgtccacacctcaccacctttctcttgctctgcaaacctcaaagaatattgcagtgaattatacctttaattatatcattattcttataaatcttctctggaaaaaaataaaatgggctgaatataaaatgtaattttacttgtaaaaatatctctgatcatgaagactatcttaatatttgctttgttgaaaagtatgtgtgtttgtgtgtgcgtgaatgcacaaaaacatacacacatctcttacaagggcaagaacctgtgagacgtctttcagggccattgaaggagcccacgccttaggaagctcctggcaggtgacttcatggaactggcatacacatggctctgaaggtgtggcctcattgtctgtgtacgacctgagcaaatggcccgtggggaggagattctggagaaagcaaaggagatgcctccatggccgtctggggcatagaagtgccgctgaatttgtgaaatggaatcagcaatgcatcttctccagcgcttcctgaacacgccgtccagcgctctaacctgtgtctgagacagagacctaagtggcactacagataaaagatgtgtcataaaaatagtcctgtctccatgtcttccttcctggtgtttctaaacttgccacaccatgatatcatggtgggatacaaagggtgtccacaaggccagatttaaattggaaagttaggaaggagagctcattctaaagtaaaaagggtagaagatggtgtgggaaagaagggaagaacacctttcagtatccactggaaaaaaaatacacacacacaagacacacacacacacacacacacacaaagacacatatacacacacacactgccagaaaaagatacctgtaatggtggcttacagcagacttttaaaaaaattaaaaactttgttataaatgtatagagtttaatataatgttttgacaaatatatgttaattatataaattaatttggcttaaaactgaaagcaatttagaaaaggtcaaacaggcagaaaatgcccatgcaagcattttataaaatgattgtttcaaaaaaatgatgtaatgttcagaggacttctatcctttctgcttagaatgtgaggaaacagaagtgttccccccgatctcatgccaatgctgacgatctggaacactgtgagtgcattttcccatcttaacaaagggaattattagtaccattgtctaaggactgtgtggtgcccaaggctgattccaatggccattatgcaagttgcacagaagtacataaatctgtaacagtaactaagcacatcaggatagagttttatattttttcaaataatgtttacaaaatattaatattatgcaatttgacttagttataaatgcatctttttcttttaaaaatgaagaaaacaggtatatggatttgttggcattacaatgaaataactgttctgtcatggagaccacacaaaggccaggagcatgtgtctgggcagagacgcctgagacgataggagtgagtgtggcacaagggcctggagagtgtggccgggcagagcacctgggacgatagaagtgagtgtgggtggtaagcaccatcctcctaaggtgagggctgcggaggatggagcatctgcaggggtcctgcctcccttcctgggctcagtgctgctgtctgcttctcagcccacccctggagacagatacgacccctagatctaaatgagcaaaaagatgcaacctaaaatgccaagctgctgtcccctgtgtccaaaggagggccggcttgttcaggagctattgttgagatccatgaataacaaataacttcagaattaacaagtgcatctacacagtgaacaatttcctattgtttccatgcttactcctaattttcttggtgcaattttcgtagattaatcaatgagctgacaccctattaaataggggccaccttagatatgcagtcactttacaatgcatctcctttggtgcttctgcagcaaaactccaggcaatgtcttgtgtgaccttgaacatccttcacagccatcagcactaaatataaggctttttgtccatttgttccacagagcagaaaggaaaggggtctggagtatttgttactctcatctgagatcatctcttagcttaggagttgcctcatgatggcatttctcagcaacaagactcagtgacaattgggctgctgcagttattagcattcaaaagccatgcaaagctgcagctgaactccagctgctagcaggcttgaaaagacccagtgccttgcaaatctctcagacaggcatttggagactagcactccatgaccaaatcatcctccccatgtaaacctcacatctaatgataatgaacagcaccacaatcagacagcctcctcagcctggatgcttgcaagtctgtgtcagagcgttggtgtcaaacaaaacctggaaggactcaggatgcatccataaatatgccactctgcatggctgagagggtgcgagcacacagcaggcacactgcctgttggcgatgtgggctccaagcccctgggcagaggcgttctgttggagttagcactcaggcaggactccaggaaggaccgttccctccatcagatgccattcggctatgtcccaagcgtggtttgtccttgaggaactccaagggtaaatgaggcacgagaacccacagctgactgtctgttcaggcacaaggcagaagccacatattctgccaccaacacttcagctcacggcctcacaagtgactccaaaggagcctgagtcctctgcacccgcaggacggggggcgggtgggtggctcagaggctgacagcgtgtgacaagctgccaacctgctcacgagagctgaaatggcagccaaaggcacaagaaggcagggtgtctgcgtcccagacgaggacagctggggcacatagcaagcagcccgtccacctgggagccccgcagcagacggcagatcactgtcacttaaagacacaggtccatctggtaccgtgtctcctggttaccaggatttccaattttgaattttaatacactttgtctttcactttcctgctcaagaaagagccacagacacctcagactttaaactgcatctgaatctgtagttctaggagccagatagagaatgctgttggaggagattggcgagaggccgcctgaggagagcctgcacctctaatttaagcaggatgcaggatcacacctctcatcctccagggctcaccagttccatttccctggtgcccgcatgacttatctggatatcaaggagactggcagagatatctagcaatgatctctttactaaaggcataaagcagtgctccccaacctttttggcaccaaggaccagtttcttggaagatcatttttccatggacagtgacggggtggagatggatggtttcgggatgaaactgttccatcaggcattagattctcatatacagcacacaacctagatccctcctatgctcagttcacaatagtgttcgaattcccatgagaatctgatgccacctgctgatctgatggggggcggagctcaggctgcaatgccactggcctgccactcacctcctgctgtgaggctgggttcctaacaggccacggataggtagtggtctgtggtttggggacaggggacacctggcataaaggaaagagatgagtataataggtgttccctttagatcctaagtcaaaccacagaaaggtgccaagggcttgaggggcacctgggattagagaatacggttgtctccagggcatggcgttcctgtctgtattcttcagagcacgaggtatgaacagacatctcacagaaatagagtccattaagattggaagcttggggtaaacaacatgaacaggtttctccactatgggattcttaacacttttagtaagttagtgcacagcatgagcctccaaaaggcagatattgtctttgatgcacccggattattttattatggaattcttcttatgtggcatataggttgctcaagaataaaatgctgtgtccttcttgtgaactcacagtcctgtaaggagccctgcctccccctgctccagtaagattcacatcaggctgttacaagccttgctcttattccatgatatgttctggaggcggctgtcaccaagagggaaaaatcccatagacaatattgctcttagtttgctctatgcaggtttattctcccttctctttctttccctccttccttattttcttccttccttcctctcttttgttcttttttctctcccttggtttctcaattatgttcttcagcagagcaagttcaataacatataaaaatcatgtaaaattatccttagagattcctgtaagcaataagggactttaatggaaaagtgtctttaaaaccagcggaaaagaataatgaattcagtaactagtgctgcatatataaacaccaagtgggaaggcaatcccaaggccagctaacatgcactgcatatgtgtgctgtgttaggcactgcatggagattatcaacaattgcatgaggcacaaatgaggaaagcaatggggactgacttgcccaaagccacctcggccaagtggctaattcattatttcaactctgagctcaacctcattgttctcagaaccatatgcagagctgggtttaccaagtttctgttcccttactcaaagtctgtcacagctgaaggaggagaattcagtcatgtctggttcagtggccacactacctgtcaggccatacagggttctttccagggctgtttcattctggcattgcaagcattctgctgagaacgcattgttaccctcatttgcagaagaaggaacagaagttcccgagagtgcattattaggctgcagacaagttggtctcaaattaggctgccatcccaggtctgcatttcaggctgcagacaagttggtctcaaattaggctgccatcccaggtctgcatttccaaaactcaactgccttttccctctccaactgcatgtgtgggatcctgaagtcctgtctctcatctggaccacagcttcctacctccactctccatgccctgacccagtcaccatattgtcaacatagtgatcacatccaaattcacatcccagtatccacctaaaaagtgcttttcctctctcacctcgcctctctctttgggctctgccatcttccacctccctttacaccggtgggacaggttgtcttagagtcagcctccagaagcccagatgctttgaatggagggagaggaagccgtggtgcctggcactgatctgtcttggggaagacggcctttgaagccaagtgaatgcaagataccgtaaggctctctaaggtgaacttgctctgggacttgcttattctctaccttcaagaagataaaaaaagcactaaaataacaccatgtcttcacatgtatgggcaatatatgtttcatcttgattttttgagatagtttaaaactaaacaaagacaatcattactaatattagtaagaaaattccatgtagatttcagttttccatctactgcagtaagttacataacttgaaaaaaataagtcagtgtttaacttgcaaagtacagtttgaacaccagggttaaagcagtctctctcttcatcctggctgtgctggtctctttccaactaagaccaattgctaccagttttgactaaattacaattttttttagaaattacagcacagatcatgataataatttattttgatctctaacctaaaaggatcatctactctttcttacaccttagattctctaccttatcatcctgatggctcaacgctttaggtcctatttttctacaaagattcgaaatgtacaactaggcttttgatgtgaagagcatattcttaaagaagaaagtaggggaggaaagaaggaaaagagaaagagagggagtgaagaggaaaggaagggaagggaaaagaagggaagggaaggagggaagaagggagggaaggaaggaaggaagggaaggagggagggagggagacggagggagggagggagatggagggaagacaaaagaatggaaaaagacaatgtgacaaatttcaaggctggctctgaggaaaactgtcagttaggatgtcaaagtttaggagagaagaaaatgctatactaagcacctctttacactcttgaagtaagtaaaatgacagtaaaaactttgagtctgtgccaagaaaactggtagaaatcactctttggatatgttaaaaggaaggagttataactcgaccagctttagagtctcttagtaaaaactcagtgcctaaaacactgcagcttaaaaaacattaagatttttctgtggtgctatagaatactgtgagaagagaccattgcttttatgaatattggactcctctcttgagtaggacaggaggaggaaaacaaaatctatagtcagtcagtaagtacatgcagcttacttagaagaaaaacagctggggagggatgtactccctcccaatgtccacaccgagagtactttcaggactactgagtactgaccatgtggcatgttcacagacgttaggggccaaagccaaacagaagattcattccacaccctaagaagctgagtccagcattgaaaaatagccagtgaaaatactataggaagtgcaatatgacatttgaaatccattagctcctcttgttcatgggggatatgttccaagacccctagtggatgcataaaatctcggatagtaccacaccatgtctatgctgtttttcctatatatacatacctaggataaagtttaatttataaattaggcacagtaaaagattaacaacagtaactaacaaaaaaagtagctaataaaaacagcacaactataggccgggggcagtggctcatgcctgtaatcccagcactttgggaggccaaggtgggtgatcacctgaggtcaggaatttgagaccagcctggccaacataatgaaacccggtctctactaaaaacgcaaaaaattagccaggtgtggtggcaggtgcctgtaatcccagctactggggaggctgaggcaggagaatcacttgaacccgggaggcagaggttgcagtgagccgagatcgcgccaccacactccagcctgggtgacagagcaagactccatctcaatcaatcaatcaatcaataaaagaaataaaaatagcacaactataataacatgctagcatcaccattcttgtgcttcggggccattataaagtcaaataaggatgatttgaacacaagtgctgcgacactgtgaccgttgacctgatcacctgggcagccactagggacgaactgctgggtagcccacagggcgtgcacacgctgggcaagggaacaattctggtccagagcaggatggagcgagaaggtgtgagactttatcaggctactcagaatggagtgcaatttaaaacttatgaattatttctggaattttccatttggcattctcaaactggggttgactgtggtgagtagttgaaacctcagaaaggaaccagaaactaggggagaataccgtaggttccagaccagttacgctgatccccaaactcagtctgagggaggggcagggtcagacgcagagatggtgagggctgcaggagacgattacatggttaacgacagagtgaatggaacaatgtcattctgtgcagaggacagaaaacaggtgcaggggcctggcaatcagaggcgtcccgagtagatgagccccgtgcatggtgtcaagctgcagcagagaggggcctgataatcatagcccttggacatgttaaataattcaattctactggtgatgagaaggcagtggaagagtttaagcagaggcgtggcctggataagttaagatttatgtagattattaaacaagctatcttagttaggagttccttggaggggtccatgccagggatgagggtgtgaatgtcagggctggtgaggggtaggggtggaagtttttgggaaatgatttcagaagcacacggccatctactgaacaaggggaatagatactcctgtgagcctggcttttatagcagtacagatattgatgccactgagctaaaaaatataagaggtccaggcatcatggcttgtgcctgtaatctcagcactttgggagactaaggtgggagggttgcttgaggccaggtgttcaggaccagcctggacaaaatagtgagtccctgtctgtactaaagatttaaacaattagccagatgtggtggtgggtgcctatagtcccagctgctcaggaagctgagatgggaggatggcttgtgaccaggggaaggaggctgcagctatgaacgagaccctgcctcaaaaaacaaacaaaaacaaagaatgcaagaagggcagccatcagaagaaaggtgatggccaagctcaggtgctgcatttgagatgtctcaggaatatcagtgttaagatcctgggaaacagataccacctggggctttgcccaagcagtcagagctggaggtgctgggccagagtccctctgcacacacacaggtggttgtttagacgtgagactggatgagaatcatgggagggctcatgtgggggcgcaggggctgatgcgggaagaggaggaaggcagaggctgggggtgggctggaaagtgaggaagaggaaaatctttactaagggatcgatggtgtcaggtgtggcttggaagaccatcaaaagtaattttaaaatgtctattggatttggaaattagaaactcaactagtgatgctagtgagttcagtttatactgagtttgtattccagcaagccagctgactggaggccggcctgaatagaggaaaggaagactctctgagtgggtttccatgagagaggatggtgggctcgccagcagctggtgtcgggtggcatctgaagaggttggcagcaagggctgagggagggaacagcagaacgaacacggaggaacccccgggtgcagcgtgtgagaggtactgagaagtgtgctgatgaggctgctggtggactagtgccggagagggacaaggccagacaggcaggcaagtgaagaagagatgggagagggcctctggaccggatggcaggaggtgctgcccgaggggctggctctggagccttagtccactgtaaatgttttgtcctcctaaggggctcagcgggcgttttgaagattggtgacacttccgcctgaggtttacgtccctgttctctactcctgtttgcactgggagggctgatgcccaatgacgctggggaggaagaagaaaccctcctaactcataggtttcttagtcccaggatttgaaacccactcaccatctgttgggtgagctactttacctgaatgatacctaggttaatgaagatttattaactcaatagctaggaaacttaaaacccgtggtgacatctaaaactaaggaataaagaatagatactagagtctattcattgcagcactattcacaatagcaaagacatggaatcaacctaaatgcctatcaatagtagactggataaagaaaatgtggtacatatacaccatggaatactatgcagctataaaaagaatgagatcacgttctttgcagaaacatggatggagctggaggccattatcctagcaaactaatgcaggagcagaaaaccaaataccgcatgttctcacttataagtgggacttgaatgaagagaatacatgaacacatagagaggaacaaaagacactgaggccttcttgagggtagagagtgataggagggagaggagcaggaaaaataactaaggtgctagacctaatgcctgggtgatgaaataatctgtacaacaaacccctgtgacacgagtttacctatggaacaaacctgcacatgtacccctgaaattaaaagttaagaaaataaatgcggccgggtgcagtggctcatgcctataatcccaacactttgggaggctgaggcaggcaaatcacctgaggttgggagttcaagaccagcctgaccaacatggagagaccttatctctactaaaaatacaaaaattagccaggcatggtggtgcatgcctgtaatcccagctactcgggaggctgaggcaggagaatctcttgaacctgggaggcagaggttgcagtgagccaagatcgtgccattgcactgcagcctgggcaacaagagtgaaactccatctcaatcaatcaatcaatcaatcaatcaatgccagagttaaattcatagaagttaccacagaaaaatttttctcttaaaagtgttggactgaattgttataattggtaaatttaaaaacttctgtgttgtgatcaccaaatatctaaagtatccaaagtggctcctggatagcacagatgggactcagggaaacgagagcaaagcctctgcctttctgaacattaagacaggagccaaccatcttcttgaaatcttgttttttaatataagccatgtaagatgaaaatatttttctgtctattaacacctataatttcctggtggtctattatgtgtcagacaccaaaccagaactatgatgtatgtcatctcatctattctcagcacaatccttcgtttattcatgaagtcaaacttgttcaaaccagtgtgtcctggagtcaagatttgaacccaggtcttgctaaatttaaaaccctcaatctccccattgcaatatgttgccttcaatttacaagctttattgcatgctaaatgggatgccccagacacaaggttactttctgctgatgactcaaggaattgctatgcccactgtgtcggggggatgctggacgtcctcatggagctgtatggagccactaataccaactttttaaatgttcacatcatctttcaccacggagccatcaacatcactccttactcctgtcatgagagttggttccaggcatctggaggttcaaaaccatgttccatgatttgctgtgtgtgcaactccaaccctgtgattcacctcgctaagccccactctgtcacatatgaaaaggagatgggatctaattctagggtcttcatagtgaccctatagtgacccatagtgacaaaaaatcactaagcactctcggctgcagaatagacaggtatgtaggtggataaataaattttaaaaaggtattattaccttaaatgtgttcttccttagtgtaaagtgagcttgtaaaatatatattaaaacctattaatcttgtaaaaataacctaaaatttggaatatcccggctgggaagctgtgctaggaggaggctgaattagagctcatagactcagggacatttacttgtttatcagaaacctattgatattccagtgacttcttacacttttagttccaacctgaaggcaaggctgctgaggagttatgttcttctagaagctgtgactatattaaacaataacacaggttgcagcccccaacaggggagagaactgagtgtgcagtcttaaagtcaacgtagctgccagctgtatcctcgcatagcaagagagcacaaggcactgactggccaaattatgtaaaatatgtttactaaatctcagcttattcctttctcataagcaaatttgaaaaaagtccagtttaaaaatttaatgtagattagaagtttattgtgctcaattcattggtgccattaaagtgtttttgcccttaccagaggagacgaaggctggctttctgcttttttatatctacgcttacgttggcagaggtgaaggaaggaaggaggtagcactctctgctgaacctcagactacactattggggcaatggcctccggggccccagggacacctgacatcacaagagggtccctcccagtgctgagcaagagctgtcatcttgggaacagagcaaagcggctgttggagagccctgctgagacagcaggatcatcggggaggtctcgagggagactgaggaaaaatatacatgttttaatgggaccttgtcaaggtttctttagaaaacaaagctgtttttgttttccatttgtttccatccgtttgggggaaaatctcaagatttcattcaagcccgtttaggcacaacagagttttgaccatgttacaatgggttcggcaaaataagtgtcctgctgaaatgctgatgacgtcacagtctgaatggcttattactcatttagaagcacagagtacatttttataaaataaaacaatcaagcagatcagtgaacctactgtctaaaattgtaagaataattacgttttaagttttatctcagcctgtaaaatataatgaaatcatataatctatgtgaaagcactgtaaaaatggtatatatagatataaggcattattattattcataactttgcttcattagtttaacaatgacatatcaggcacttcataattttaccaagtacttaaacaaacttaatatgtccatggactagacttttgtaaaataaccatttaataataatttctttattattctggagattttttgtcacttttaggggaaaagcagaggtgggagggagctgccattagttcaggttcaatggttaatattttaatttcattacaattttcacaaagtgcagtgacttgtagtatctttttatcttcattcttggcaatgtcagaggccagtgagaaagtcagatgatacatgtgctgagcatatgaggaaaggcaggagatgaaacattgagacacgcctcctgggccttccactggagcaaaactgccattgtttcccttcctatgcattcatctgcttcttttataggatatgcatggtttgctttgctctcatttaattttaaaagaaaatgtctgttgtcatagaaatatttttccacactgagactgcatcacaccagcaggtctttgggctttttggtgcagcagtcagcatctctcaaagggtagatccagtcttatgtccctaaattttcatagcagacaacggatccacagagccagactctgtggaggcctcgcaccagagagacctcatatctaggtcaggcttcagctctgcagggagcttctctcctggctcctttctccattcctaggtctcttgccctttccaatattttcttcagcaacattccttctggagactcagtttaccttccatatgggttgaagcctcatttcatctgcctttgtccacaatcacacagccttgcaagacaggaaccatgtgcagacacaccgagaccacacagtgtagcaagtgggttctgaagcaatatcagttagactaactttatatatgccctggcccttgctaggcagattttattttaaaagaagaagaaggaaaaaaaacccacttctgattccctgccattgtttcctagaaaaaaatctgcaaggaaaggtttggcagactcccggggagctgtgaaacagtgtgtttggcatgcagtcacctcagcagtaatttgcatgttccaggctgtcattcctgggctgcgcctgacaaggcctgcaggggcctatcacaaatgcgcaccatgagatcgctcctttcttctttgcacttaagtgactaaaagcagaaaccttgagctggggttggtcactgtcctgaatcaaaatgcaattcatatcggcacatggctctttattcagtcacagttctgctcctctctctcctcccatggcataaacacacacacacacacacacacacacacacgcgtaggtggacacgggtgcacacactgcacatacagatgcacaaacattcaagtacacacacacacacacacacacacacttgaaattggatataaagaccttaatatcaacatggaggattaggcaagcagaaagcaatggtctatgatgacacgtgtctttcaccgacaggcagacagcgcaggcagacccagagcctctgctccagggaaggggtgatggggtggggtgaatgctggtatttcctgctgaagggctccagggcctcgtgccatttgcacgcttacctatagggcattttgttgtgtaccttgtctcaggatcggtgttacagcacatatgcagcacttgtaggagaagaagtctaacctaacatctaaaacactcagtgcatcatgacaagtttccacctgcccacatctcacttccacaatccgcaggttgctgtagcaatcagccggcacggggacatgtgaagagctcctgagactcccaggaaaatacttggtgaagcagggggctgtcggggtgacggtgacagacctgcttttcagcctgtgctaaaaaggaagggaggcagcatactaggcaatccttattgagtccacatgggaatcgctaacttggaaatggggtcaagggtccagtattcatggtctcttcggggtcctcaaaactcttaggtgtcggcactgaacacaccctcctctccactgcaaatgcgtgttttaattaggtgcacagatgtgctttaaatggaggtgagaggcgctcaaaccaaaagctccggaaactcccttaattaacacacaccaggtgtggtgtgggatctcgcctggctttcctgccccatccccagacgctggggagcacctcgctgctgagcgcgggctgtgttcagaccagcaccctcttcacccacaggcctgtgttgagattgccgactaggaggtggccgatgccagcctgggagctgccttagcgagggggcgtggatccccctggatgcccctggagaattgaatatctcttcaaaggacagaaaggccattagcaacttctggccattaaagccctcgcagccttcggcccagataaccaagcagatgaccttgaaaagccctgtgctattaccttgcctagtacctttgcattaaattgttgatcatttgcatttcctctggggggctcttctgtttgctactttttcttctttctctccttaccctcataaacactcagcaggctgtgagtgaattcaaaagcccaaagtgctcaggtgctgggcaggagctccaggctggacaccctgcgatagcacccaggtctgtcacgtaacagctgtgtggccatgggtgagcggcaacccatgtctctctgtgtctcagtttcctcgtctgcagatgaggatgatcatagtatcaacctcatggggtgtggagaagtttaacgaggtaatacatgtgcctctcacatagcacatgacgatcttccacactcattgcatgttagttctgactttcatcatcgtgagtagcatgtgcacaagaaagacgatgtaggctttgcaaacaaaaacaaaacctcaggagataccaaatgtttgcttcagtacatgtctgttcacatttttagtgttggtatttctcattggaagagaaaaaatactattatttgaaaaagtggtaaagcaagaaaagcatttactttgatttttatataatagaaaccaaatggttgatgaaggaacgttttctgtagagaagtcctctgaataataaattaagaatgatagagtatcatctgtaaccttggataaatgctggatgtaggccatgggcatcactggctgctaaagccatgaggtgagagggttgaggggagacttcctaatagtttggtcaggctgacaacctgggcaacatgcgtccctgtgctgccaactgtaaggctacagaatgggaggcaaccagacattgcacgccatcttctcaagaagatgccacaagatcaaagctgcggtggcttaggtctctgcattaaccaccagtttgcaggaaactcagaggtcagaggaacatgttaaatggcaccaaagaagtgacctcaggaaaacacagactggggtaccctctgcccagcttattcaagaaataagtcacaagacataaagcagggaggagaaggaaggaaaggccatgtagaccaaagaagaggattcaaaacacatgtcagtaagatgccactgtggatcttatttagattccaattcaaaaacaaactgggccaggcacagtggctcacacctgtaatcccagcactttgggaggccaaggcgggcggatcacttgaggtcaggagtttgagaccatcctgcccaacgtggtgaaaccccatctctactaaaaaaaaatacaaaaactagccaggcatggtggtgcgttctgtagtcccagctactcgggaggctgagaattgcttgaacccgggaggcagaggttgcagtgagccgagattgcaccactgcactccagcctgggcaatggagagagactccatctcaaacaaaacaaaacaaaacaaaaaccaaactgtattaatatatttgtgagaccatatgggaaatgtgtatcctgcttggatatttgataacaagaactttttgtaatgtttgatgggtggttatgtttttgtaaaaagaactattatttttaggaatttatgctaaattatttctagctaaaattacatgctcacttggatttgcttcagagtgacccgtgcctgcacgaggaagaatggtcgggtatcaatgaaacaagtgaggccactctgggagcctgaagatgtatatttggggctcagccccacttgtgcctatgttgaatccttctattgtaaaatgtttttatcattttacataacataaagaacttgaaatgagaaggatgtgtcattacatttcccaggtctcagttgacaaaattaaatgaagaaacaaagacaaagaacccagctccctgggtatgcggcaatagagcaagatggtgctggggacgccagctcccagcagcctcagaggtggatgcatcagctcagtgaatgtgctgtcactctgggcaggaactctgcattaatgtgcatatgaatttgtggggtacttattaaaattttttatatccaggccctatactagaaattctgataccttaggactcgaatggagctccaaggagaatgaaaagcaaagttggggttctaacggaagtggtccgagaaccgttctttgaatactggtttagggccaggtgatcttcctggtagtttcggaagcaggcacacttggtggcgtttacgttcaggatagactcgcttagccaatgtccaatttcacagaccagtgtttccggccagaagtcagtctgtgcatctctgcaggaaacacaaatgaatttggactccaaactcagctcagaccagcaagctcaccagagtcctccctgaaggcagacctccatggggcgccagatgatattagcaacagaaccaagttagaacacgggaagtggggtgggtaggtagggaatgcagacagtgcctgcggtccacagagaaggtcaggtgggaatgcaggtggtgcctggggtccacggagaaaggggtcaggtgggaatgcaggtggtgtctagggtccacagagaaaagggatcgggtagtaatacagacagtgcccgcggtccacagagaaggaggtcgggcaggaatgcaggtggtgctcgtggtccacagcagctgagcccttgctgactcacccctcagagggcagcagggctgaggctctgctcatatccaggtcacccctcttcctgggcacacaggatgcctgcacctcccagtttccagggcagtggattggggtctggatctgactctgactaagggaacactgtggcctggcccaaagcgtgctgcacggttttcatggccctgctaatttctggaagactcagattccgcagggcagggccacacactgaaggggctgcccagctggcattaagttgtgacatgagcaaggaataaacttttatctgggttctgctttctgagttcatttctgaattcatgttttaaacagcctagtctattccaactcattcggatcctggccacatttacaggcgtcggaaatgttctcttgctctcaggtggctgtttgacttctacttttatcagtgctcgcagtaacttgacttgccaccctgtgacctcttgatctgtaaccccgtgaccttggaaaggtggcaaataaatttactgcccgcactgataaaagtagaagtggaggccttcattaccaccccattaggtcttcaatggagatcagagctccaggtagaatgtagaaataagatcttggctaagtgggtctatctgcagaataaactccacctagtacacctgcttctgaaactaccagcaggaccacctgaccctaaatgagcattgtttaaagaacggttctgggaccacctccattagaacccccaaccttgtttttctttctacatggggctctgatctctgttcgagacccgaggtgggggccttcatcaccaccctgctggctaagatgctatctcttaccctacctgcctcagttatacttattcatattttctgtaagagcaaatcatcagttgcaaatctgtgacaaggcattttgaagacttatcactgaaatacaatttatgttgcctgacagtagttgcaattaagtaagaaacaaaacaggccgggcgcagtggctcacacctgtaatcccagcactttgggaggccgaggcgggtggatcatgaggtcaggagatcgagaccatcctggctaacacggtgaaaccccatctctaataaaaatacaaaaaaaaaaaaattagcggggtgcggtggcgggcgcctgtagtcccagctactcgggaggctgaggcaggagaaaggcatgaacccaggaggcggggcttgcagtgagccgatactgagatagcgccactgcactccagcctgggtgaaagagtgagactccgtctcagaaaaaaaaaaaaaagaaagaaacaaaacaacacaaacaaaaagacttcgacctcctgtgctgtcataagatctgaatggattctttgcctcaacatgcccaggaaattgttagtggtccatgacaaagaggaaatgggaccaggtgtaaattttatgtctgtgagcaaagttcttgcttctctttttcattgagagaaataatttttttcctcataattcttattcatgcatgtttcttgtagtgaaaaatgacctcaatatcatcccctacagcaatacacatatttttataaaagaatacatataatttatataaatttaatttcttatggatattaaacagaaatagtgtacgtaatttagctctttttaatgaacttggctaattcagatgatttgattgtggtgatgcagtaaagctgttggagtgtttaaggccatatatgtgaataggcgtttgttttttgtttttcattgtgtttttttcttatagttatgtccatattatttgtcttctgaaccctcttcctctttccctttcttcatttcttccttcctgtggttttacttttttaggtcttttaagtattcccttggaacttatcatttcctgctgccatttgtgtttcattttgtttttatctaacacctgttttatgcatcctgtttggatgagggtggcttgcacgactatgaacaaaacacgtggggatcatgacatctctttgctgcttcatcagtgtgggtccgagctgtccgagtttcctaaacacctgacttctgagccactgagggtgtcaacactggctctcattttttggttactttccaagacttagcacaatgcctcacatagggtagccaccccagattgtcagttgaccaactatcctttttattttctgtgtgggaatgaatgagaagaaataccatctgcataaacttgtgacattctgcaacgtgctttcagggcatatgaaagaaagacacgtgctgtcaacagacgatagacatggttttcagaagcacatacacgccgttgctcaaagacagagcttgcctttagcccttgcctttaggactgcattccatgtacacaagtttccaaacacagtgtcctgctagaacagtttattttcatgaattggacatggaacacatcaatgcactgtgacagaaggaaagaagggcactcaaagttcacctgcagcttcaccaataaacactttggcttagaaaactgtttggcggggctctttcctcctaacctgtaggtaaggggcagtcaaggcctgccagctgctttcctggatgagtctctgctggaaggggggcctgcgccagctctccaggggcaccagaagtggagctcacgggcctccccagccaaagacaattagtatttccttaagttggaaaggagatttcaagttctatgatctacctctgacagtttaaagtatgtctgtaaggaaatggatgcagtaaggttactttgcaactttgtccatattagacaccaagtacgggtggggtacacaaaccaatcacacacacacacacacacgtgcacacatacacacatacacatgcacatacacacacacacacacgtgcacacaggtgaccacagacatccacatgccacacacattttcctgaacctcacagacattgtggcaagctcacacctaaatatgtcaacatttatcttctaagaagaaaacacattctctcacatcaccaatgcgtaatttcaacagaaaaggaagttaatattatttaaatcataaaatatacagaatattgggaatattcacatttccccaactgtccatatgtcctttatagctgttttaatgtataaaacataactaggatatataaaaggaaaataaagttttcctttattattctaaagaatttcttccacaattgctgctgttttctcacgttgtcatctcatagctgtttcttgaatgttgtattcaaaaatactttttagaaataattttgagattctgatctttattattgaagaagtaaataagtaataataaaatcttttatttttctactttgtaaatttttatttttctactgtgtaaatcttttatttttctactttgtaaataataaaatcttttatttttctactttgtaaaaaaataaaatcttttatttttctactttgtaaaaaaataaaatcttttatttttctactttgtaaagttttaaagtacagaattttagaaagaagagcatgcatgaaatattatgagagctatggggaaaactaaagtcattaaaaggtaattgtgtttattaggcagacgttgttaactagaaaatccgataggagaatttctccctcttcttatatttatttccttcctcgtctccttatttcctttcttaattatctagcctgcctccctgttttcttccttccctcctctctctcccaccgttataaactcatgaaccagcgaggctgttttgtctacaggtcactcagataagtcctcattaaacaggaagccctcttcaaacactctcctatggcctccctcccagcctccaccaccatcactgccattttgtttatctactcctgtcacttagctctgatcctatttagattgatacatctctatgttagcaataaatattgaataagactctacatgcataactgtgtattataatgaggggagaaggggtggcaatgcatgggtttcagagtcagaattgaaatccagagctgttattctctggctgcgaccttggtcaagtcatttaagctatggatcctcagtctccttatttgtaaaactgcatgaataatccctttctacctaaaacaaagggccagtgaggatacattagattggttatgggaaagtactctttcacgtttcttttaaattttgttttttgaatatgagatacatttacatcattcaaaaataaagaaacaaattaagaaatgaatgaacaagaacaatgaaaacatttcccctcaacctgcctttccctttagtaacccccacataaaaacatttttttagtttgtctatcctatattttttatgcaaatacaagcaaatacatatgtttgtgcgaagtcatagttttgcttctcttctgcatcctgcttttttctttaacaaaatgttcttaaaatctttctgcatgggttcagagtgcgtcattttccacatagctgcatagtaagtgaaggcactttgattgaatagcataaagcataacacagatgtaaatcaggtcacttccgcctccgtcttttatggcgaggcaagtgtgtcttgggttctttatgaataataatgagggtaaccagggtttaaagggctggtgcttcttgccagccgctgcgctgcaggttttacaggcattagtgtgtgtaaccctcaatgaccctgtgacgtgggaaacactcactgttttacatatgaaacccccaggttttgaggggtgagtgtagaatttgtatatgttttcaaagctgtactgtgaagcctttttgctcttctcctctgttggacgcaatgatgtctgaatcccacctggatctgcacagcgttgctgcactgtaagcccaccacacacaccttcaccttcttcaaaccaaatacctctgtcttcctggagaccctgaacaacttctcctggactctgtcaacagctccctgtcctccaggcactggcgttagctcctccaatccacacttcacactgggaaatcaaaccctgtctcctctttgcttaaactcacccatggtctctcaccatctacagagctcaacctaaactcaccacgcccaccctgccttccctcccgcttcccgctcccaaacctctggcctttcctgatgctgttaccacatctgaactgtgcttgtctaagtcagaagacatccttggagccagcctgggaggtaactctccagccctccacgccttctccaggaacactcagattctcccctttggggtggcttcatcctcctgactttgcagctccttctccaggtgttctcttgttgtggttgttgttatactctcacccttattaaatggctcaacaagaacagcttttctgcagaattctctgattccatttctatataacatctggcatgtagtagttgactcaaacatacgttatataaatgcataggttgtgtgtatggatggggcatttcaaataattcacttaacaatgcattttattttaaaaaaaaataggcatttacttcatttagatatgtgttaaaattttatcccttcacttgcacctacaaacaaccacaaatgagaaactcaaaaaaacaggtgacttcacatcggtgggatcagtgtgtgtagacctatgaggcacatgtagatctatgagtaactctgcagaacggtgtgggctcaacaggaggaggaagcacaggcatcccagaggctccaggtcagagggatgtgcagtaaaaaagacggaagtttgtgtgatgagggtgtgcattgtgtttcatttaaaagagtactacgtgtgcatgctaggaagccaagtgacaagtcatagccgaacataaaaagtaattctttctgctacttttgaccttcagttaaaagcacttgttaggtgtgttggggtgcatatggaaagttctggatcttactttcacacttcatacacttactgcaggtccttgcacatcagctgtttctaaattgtgagcaaatgaaaacaaggctttacacagtaaggtaacgcactcatccattgctgagactgatattttttgggtgtctctacacaatagacatagcaaacaatgtgctgagagctgggtacacaaataagccactctccaccttcagtgccccaagctctccaaatgcttcagatgaccctgaagtgctttggataaaagatgctgacatggagagtggtcagccctgagcgtgttttactccaaatccagaatcagtgttctcggttgtttgtgcttctgctacctgagagcaattctcctttttccaagagtttttacttccaagaaataatggaggccagacccaactcaaaactttctaatgctcagtcccgaggccctagagccaggtgatgcagttggtggtcttcactggggagctgctatctgaaggggaacctggtacctctgtccacttcttattttaaaaacaatacagttctgggaaattctaaaacatcttctgtgtttcaaggactaaatttagtgatttagacacttataacatgtaatccttgtaacagttctattaagaagcaattattatgtccattttactgatggggaaactgaaactcaggttcaaggagacaagcaacttctctgcagatgatggggtagaattaggatttgttctccagtctgacatcctataactttctaggaaatatctgctggacactgaactacttacaggaacagcagaccttttctctctaagctccttgggcagtgtggtaggagcacactctgcaggttgtgtttccgctctctcaatcacctcttttggctttttctgtaataatgtattaccatgtacaatactaccttaaagatacacagattctaccaagtcatctcagtggaaaatgtcaactaatactctgtgttttggctaaatcacatatgatacagattcacatgccaaataagattttttaaagtccgaggcaaacataaggaggctttaaaaacatctacggcatcgttaacatctttttcagcattaacctttttatcgagctggtggcatacagtcccctgcaaccggaaatcgttctcttttgtgtttggtattttattctccatgtttgctatggtttttttttaaattcacatgtttacatttttgttttgtagttgcagaggatgtgggaaaacaggccgaatggaatcccaccccacccggttgtgtggcctggtcctgtcaagtggtcacgcccggctctgccccacggactgctgaccggcatccctcacccttccgggaagatgttttcttttggcttatgcgcggttttatggacagaactccctctgtatccaggcgtggaaacaccccttccagttggatttagtttggtttcacatcccacacagttttcaggatgatatttctagtcagacagggtgatacaggcataaacgcactagaaacattttctcctcttgaaatcttttgagtctcttgaattctgctctgatttccacagaggtggcaaccttgctctcttcatccttctttcagactttgtggaagcttctgctagctccaccctgggtaccacgctcacgtatcagcaaagggcttgcctgggagtagcacatctgtggacagtagctttagactgtcatgcgagtttgcaaggatctgctcacccagggaggagtcagggaacatctctcttccaaaactgactgtggctatttcagaactgggaacttaagtcttcaccatgggttgacaaactcaagcccacaggccaaatctgttctctaccgacgctgtaaataagggttgacaaacttaggcccacgggccaaatctgttctctactgatgctgtaaataaagttttattgtcaggtggccatgccatttgctcgctgttgcctgtggctcatttcagacagcggtggcagtgatgagcagttgcacggagaccactccctccacaaagtctaaaatcatctctggttctacaaaaaaatgttggcccaccaggtctatgtaacacgatgatttacaaattgccattttatagcttattatgtgaagatgtattttcattaacatagcaatgtattcccattctataatgctaaatctatttatttctatgtactgttttacatatatttcattctatcacccatttactaaagtacttatgacatacatagagaaaatagatattgaccatcccctgagagtcaaacactaatctttaaaaaatgagaacatggataacaaatcccagaaatcagaggctctatgtctgcgcccttcacagtgtgtggctgtcatggtgacctttatgcattgttaccatagccccgaaagtgagaaatgattggtgaggactgatgaggactgaatgaagagagtgaggactgagtggaaagatcgacgtgaaatgcaagcactggttgtgcgtcttgctcttattattatctaattggatctggaggcccctggagacctttgggtgacaagcttgtcttacacccagaagggtctgctcacccggggcctggctggaggggtcccggcggacactccactgaggatggcagtctccagggcaaagcaggacaggatttcagctgctagaacctcgagatctcttttttcccctaaccaagtccaacttgctctcccaccctgaaaatggacatctctcaaaatcaaaggtgatgcctcagctgagaaccctactgaaagccaagtataaacatggatgttgcttgcaaaaccagcttactctttctccttgtggtttcatttaattctgggtgagatttgtatttgaatgctttatctcaaactacattgagcatccttatttaaatgtgaacatctaactcaatgccagaatgccagttcaacaaagccacatgtaaacattacacccttataaaatatttcactaaacgtccttaacttattactaaaattcaatgagatgagataaacaagatagcttggatgtatgaaacacctacagttcagaaactttaactgcttctgaagccaagtatgcatgaacactcaatgtgaatagcttcttttgtttttttctttttgtcgtcgtcgttgttgttgttgttgttttaacctcggggaaatgtacgattaaacataatgccttccccaaacggaaccaatgagtgcagtgagtttcttcagggaaaatgaatagggtatagatgagaaaataattagaacaactgtgacctattacagcagttcataaagctctcaaagcctgcagcacccacaagcttgcagcatatggaagacaatcccagcctctaatttctgtgcagtggtaagtagttctattatcagacaggcaaatggggcggtcggcagacaaataaatcacaattgcacagtgaaccttaaaatgcacaccacagctttccttatagagcatgctgagaaattgccatttttaccagaattttcttctgctattcatcagagtaacatatataaaagtacttctaaatgtgagtattgagaagataataccagagttcccattccattcactcgttcagaaccaacgactttacaggatctgagatttgggccatatttcagtcttgtcgacctccagccctaaaaatatgtgctgccaggcagcagccactaggtatgcgccaatctcttccctccccaatcctccaaatcagaccccacatgctttactaaccagttccttctgctgcaagtgtagattctgtgtgcagtgattctacatgagccatttccacgtgagggtcatgggcaccattccctccccactggccaccccgaggcatcctctcagcacccacaaggaggctcacatcattcctgccctatagaacttcagcagtgatgcctcatctaatttaactgcaaaggactctttttggcatgaattgtctctttggagaggatgcgcaatgcaacttttaactgcctcccggaagccatgaagcaccaggcagctaagatgaaagtatttactcaaagcagcaaatgggacaagcaccagaggaggggctgcctgcagcaatcctgggagccccgtgctgggcaggagtacctgcactctgtggccaggagccccgtgctgggcaggggtacctgtactctgtcgccaggagccccgtgctgggcaggggtacctgcactgtcaccaggagccccttgctgggcagggatacctgtgctctgtcgccaggagccccttgctgggcaggggtacctgcactgtggccagaagccccgtgctgggcaggggcacctgcactctgtcaccaggagccccgtgctgggcagaggtacctgcactgttgccgcgccgggtgggtgatctcaggacctgatattcttccgccgtcgaccagggtttgaagatgcccactggataggaattcaccaattctcctctgagttcattttctaaaggatagagcgacaacacaaaataccttaagtaagagaagggaggagggcataaggagggtttgttcccctgtgctgtgacactcacaacagctacatttcaagataggtaactgcaccttgagaagatgtgtaaataattttactcagaaaccttgttatataaactctaataatggctaactagaagtactttttacacatttagttaatttactttgaaacctaagatattgaggagttttaaatacatgtcctaggtttgaaggtaaaaccatatgcacttaatatttaggttgagccattactggcccatttctcagatgattgcttctttaacgctttgatgtaattagaaaacaatttaataggggagaaatattttgcatgtttattttttggaaataatagaatttcattcataagaaaatatagtttgctgatgacaaggccacttccaaatgtcagctcaactttatcttactatcacaacaacaaaagaaattaccttcattaatggaaatgtagaaattattaactttctatcatgtttttctgcaatgttatctcagtattagaaaccattgactgttttaatttgaagaagaaatatccatattatttcaaagtctactatcaaagagagaatttattttgttaaacaaaatgatgagctagaaaatcagaaagtgagagggtgatgcctcagttagggaagccattgtttctggtgcaaacctcctaattccaagaggcttattaaagtgcgtctatggcaataacagacaagtgttaatgggcctcagtgaagtgtgtcaggagaacgaagagaccctgaggggctccccatgctgtttatgagcagctagatgcagcagcattaccataaatcctctaacagatactgtacttcccgcctgtaataagatgatagccagagtgcttagcaagtggaacttgaaataagataacacaagatttcctaggaaacacaaaggcagccaataaaatgcaaccataacaattattattatttcccctaataagaatttactaaaacaaacacataaagaacaaaataatgccaaaatagatacatggagctagagaggttttaaaattaccctgaaaaatcaaggttcaaaatttgaatgagagttagcgtattcgttttgttgcaaagtctacagatatcagtttggagttattttgtaacatttaaaaatatacacttagcttttaatacaaattataatttggggttttatttatagcagtgcacagctatctacactggaaaatctctgataacaatggtgtgttttatggctttttctcaacacccacatagtataaatgcaaggaattcttgcagtttcttcctcaggcaaatgcccctgaaacatttttgcatcagacataccaccttgaaatcatctacaaagattcaggagcattcaccctggacaaacaatggcttcttttacctaggtttgcactctgaccattaatgctcacaattcagacccacgtccttgtgagacagagacagacgtgacagcgcatgtggagactccctcccagacaacgcagtttgatgaggatgaatgtgcgcttagtgggtactcactgtgaggtggcctcttttattttgacctttttaactgggtccctacttcctcaatcagattatactaaggcaactagcatataaacttgacattattgatactgacataatattatgatttaaaaatataactattcatcaaatgttattgattgtatggactgtcattactgctgggttagcaagacccatctcagccaatcttggtgtgaacatttgttgagtgaataaatctctctgaagttcaggttctgtatctgacaacagcagggctaggctaaaagtttaaatctgttttttagcaccaaatgctttaagtaagaatcccactgctgtggcacctgatatgaatccccaggcagcaagtgagccatgagtagagaagtgtggtgctctccttgtgaggctcactcagacctcctttctatgtgtgttgtatgttgagtgtgaattcgtagctttgagtcttggctcagtggtttcgggaattatcatgcaaatgtcctctctgagaagggcctccaccgtggggcactgctgaaggaaggaagaaccaagcctgtcttcctccaccctctcttgccagggcggtgcccaccacccctgtgggacacagatggaaagaagccagctcctggtgacttttcctggaggtatcagcatctgaggtgcacatattctttcctgctatcattgcttttctaagatttcttgtcaagaagaccttttgtttagctaagtgttgctgaaacggcagtgcctgtgcctgtctggtaacctgaatcacacctgtaggattagctactagtggaaatgggtcacgctctttgtttttcaccctaaaagctccgtgtgagattggttaaaagatgagagctacacgttgatagtgcttctttctcagacgtataacactgaacagcaagaaccagacaaatgcctgacaaaagcccacctcagacaccaccgtaaggagaaggcgaaaccatcctctgtgaactgagtttcagaggagcctctgcaaggcaaggatgcccgagcctggttttacatactttcctggacccttgcctcgatactgtctgaacaggaaaactgctttaaggttttctgtgtccttcagcaatcaaatttgggatccataatggctggagaggacagcacatcacagcagcagggctggagggcagtcctggccgcctgtccccattgtgattggcaggtgcatctccagctcttccgcctgtttctgtagctcatctctactgactaacagccgtaggagctccttgctcgggggctgggttgagatgaataagctgcctgtactatggagtacatagcaggttctccattagcctttcctggctgaataaggagcttgtttcctttgtaccaagttaaacggatttcagttagctcactgcgttgctcacagcctttgcattaggctgtgctcatgagacagtcactcagcttctagttggagatgagatttaggatatgtccactttcagtttttcagagaaaagaaagaaatggtcattttcagaagataataatgaccatatagacaatgaaaaggaaatatataatcaaataattaaataaatagggacatcttaataagaaaaagtaggaaatcaggaaaagaatgtacagccagttttaaaatcacccttctcgtttttaaacactcatgtaccctttgctttaagtctaggtcagttacatatttgtgggatggcttcaattatttggaacattggaaagtatttttggcaattaaaaaggttcgggtctacctcccatacacggacattcccatctcagtttttgccgtagatcacctgtgcaatatcaatatttaggacataactttttttttttttttttgaggtggagttttgctcgtcacccaggctggagtgcagtggcacgatcttggctcactgcaagctccacctcctgtgttcaagtgattctcctgcttcaacctccctagtagctgagattacaggtgctcacccagacacccagctaatttttatagttttagtagagacggggtttcaccatgttggccaggctggtctcaaactcctgaccttaagtgatctgcctgcctcggcctcccaaagtgctgggattacaggcatgaatcaccatgcctggcctagaatataaccttaatttcaacttctaagtaagacaccactgattccaacatgtcaactaaccacataaaaggacaccagcaaatgcaatttgtaacctggaagtatgtatagataaagacatcacatgaataatctatcctctagtttactagctattcttagacatgtacctaaagccacaattgcattgtttcacaaaactaacactgaagtggaaacaggtttgtttcccactgtggctcagagagggccggtagcactcccactgctgaggaaggggatgagagccttccccgtctgctgtgtagcggggacgatgtcgtcaacaggactgtcacacaggtttgcgtggatgtaaatggaacaaccttgttgtgtcgggaatttggcagtgtgaatgaaaattttcaatgtgcatatgctagcctgacaattccagttcctggtatctaccaaatatatatttagtcacacatatgcatagatacctgcataaaatgtttcaatgcaatattgtgtataatcaaaactcttcagtgatagaatggttagattatttgtggtaaataggcaatctaagactgacctataagcactgacaaggcagaatccttaagatgtgtagcaaagtgactagaggatggtacagggaagcatacacagtgtaacctgttcacatacgacaacctagaacctagggtgtattcgtctgttctcacactgctagaaagaactgcctgagactcggcagtttacaaaggaaagaggtttaaatgactcacagctccacatggctgggaaggcctcaggaaacttacaatcatggcagaggtgaagcaggcacatggtacatggtggcaggtgaaagagagaatttgagagaatccagggaaaactgccttataaaaccatcagatcttatgagaactcactcactatcatgagaacagcatggggtaggggtaaaccacccccacgatccaatcacctcccaccaggttcctccccaacccctggggcttccaattcaagataagatttgggtggggacacagagcctaatcatataataggggcatgtcttatatttacatgtgcatgtgtgtgaatacagaggaagatgccagtgtggacacagacccagtggatagctgagatgatctttggagacaggagtagggttgtgacaactaagaaaaactttcactttttactgcaaatacttctaattgtttatttcatatatatactgtttatttataaatagataaaatatttattttatataaacagactgtaataatttacttgattgccaaagaaaatccatgtaacatttatgtaacaaaataaactgaaaaatttaatgatttatctattagtattttcaaaagatatgtgtcaattattataaaaaatgactaataaatttaggttagaaatttacactcccaaagtcacgtaatacttgtaagcaacttgcactccccagacccccaagccatttgctgctttacaatatagttgaagacaggccctgggatgcactggctgtctacaaaccaataaacaatgtggcaaggacatcacatttgtggctgattagatcattctagctcattaaaaaaccttcttccatgttaagcaaaatgatatagaagagcaaagaaaaatagaggcaattagaacaaaggcggattggtgccgtgtcagaacacagaaggttgtctggtaccctcgccctccttccttctgcaggaaggtgttggtgaggtgggcctttggggctctctctgtcccctcagggtctgctgtttgcctgcagcccactcatggatagtgaggacttatcaccaaggcagacccagcaagaaacacacttggtagaatggcttttggcattgttgaatatcagcagtgaaagcaatcgtaaggatagtgcagcctgcctcttcatttttagatttggtcattgaagtccagaaaccctaacgaacctgtacagggtcaaaagagaagtgagcagaaggcccaggacagggtgacaggtatgcagtccccatcactcctttctccaacaaagtgaaaagtagtttaaggaaatctaagatttaattgcagtgaattttattaataacaagctttagtcttcagggcacacgggagaagacgtttccatggggcttagaaaaagtgaggaatagcattaaccaaagagcagtaactgggttctgccattcacatcttacaggcaatacctgctctgggagcccttgagcataggaacctggggtactgcgaacgaacacccaatgcccccacacacatccctggccagcagctgtaggacatggccaaggaagtggctcatccatccacagagctttcaaggcttgcaggtgccttctgaattttggagaacccagtggttctgcatctcattgaatccaaagcttcccaagaggcaaatgcccagataaatcccagtcagaggactcaggcatagccctgccttcctttctttcctgggaagcccctaggctcagatactgagttctgagttagcttagatgagttcacttcaccctccctaccagaccccgaaacctgttcctcctcccttcacgctgagagtggaatctctaagaacatgcctctgttgtggatgcctctgaccaagaataagtccacatagtgaccatgatttgtattattatcgttatcatgacaacaccttacacgtgtattccaatttaaagttaaaagttatttcacacacaaacacgtaaaggaggtagaattatgcctgttttacagatgaggaatcccaagttccacaagcattgctttagtgagtgaggaacagtaggaatcggagctggaactaaaagcacgcactgtagcctggttcctaggtctcccgaagcttggtgacatgttatttctcaattcctaagacttaccaccaccttatgtgacctttagtttaagctgctttgtcctctccatgttcctcaaatataaactatacttcctcactttggttcacaccatgcctctctttatgcacatctcaaagatttaccagccttcacatcaaatcccatcatttctctactcaaagacttttagatcattctggccctcaggaggaggctgttcctctgaatgatcaatgaggtcatcctctcgctgatccgttcataccttcacacactgtttcacacagccagccagtgattccactgtttgcccacttctgctaatgccactgttgttatcaaagaaactagggtgcttgaagatggggattgcacctgttcatttttgtattaccaggggccagaggagagagaatccattaaatgaatgaattgaataacaataatgataatagagttcacttcaccctccttccaagccccccaaggaactcatggctccttgagagtacagaagatgtttattacttggtgaattcttcatttgtttagcatagtccttagcacataatatgtactctcaaataattactaatcaaatggaaaaacataagctcttaaaaaaaaaaaaaacaacaacctgtatcaggaaagaagacgagagagcaagtgatcatttgaatcagtggtgctaccttaggagtgagtgcaagtggcagagagacaactcgatgtgggtgtgtggaaactgtgcctgaaggtgtatgcgaacctgtgtgtgtacctgtgtgtgcacctgtatctgtacctgtgtgggcccgtgtgtgtacctgtgtgtgcgcctatgtgtgtacctgtgtgtgtgcttatgtacctgtgtgtagctgtgtgtgcacctgtatctgtacctgtgtatgcctgtgtgtgcacctgtgtgtttttgtatgtacctgtatgtgcacctgtatctgtacctgtgtgcctgcatgtgtgcctgtgtgtgtgcttgtgcatgtacctgtacctgtatttgtacctgtgtgtgcctgtgtgtgcacctgtatccatacctgtgtgtacctgtgtgtgcacctatatctgtacctgtgtatgcctgtgtgtgcacctgtatccgtacctgtgtgtgtacctctgtgcttgtgtatgtacctgtgtgtgcacctgtatctgtacctgcatgtgcctgtgtgtgcacctgtaaccgtacctgtgtgtgtacctgtgtgtgcttgtgtatgtacctgtgtgtgcacctgtatctgtacctgcatgtgcctgtgtgtgcacctgtaaccgtacctgtgtgtgtgcttgtgtatgtacctgtgtacctgtgtgtgaacatgtatctgtacctgtgtgcctgtgtacctgtgtctgtgcctgagtatgtacctgtgtgtgcacatgtatctgtacctatgatctatgtgtgccgtgtacctgtgtttgtgcctgtgtgtgtacctgtgtatatctgtgtgtgcacatgtatctgtacctgtgtgtacccgtgtgcgtgcacctgtgtgtgtacctatgtgtctgtgaagtgagactgaaaacatgagagtctacctggctctctgttgtctctgacacacagaaacttcatgaatgaaatcatgttactgattgctagctgaactctcctcaattttcagagagtccttgggaagaaaatcagaattctagcagtaagccccgctcttaaaatatatagaaattaccgtctgtcagaggctgtggatgcagagtgtgatttaaatgtgctatgagtttaacttaaagcacagccacacatttcaactagaaaatcctaatggtaggggcatgagtgtacttaaggcccttcatctgtgacagagttgaccacgtggaagcgctttgtcttcccggatgcagtgccaaggactgggggtgctcccctgctctctaaacctgcagccttttccttcacacagcaaccacaggagggtgcatgccgagaagtgagattcatctgcataaatacatcctccaactaactgcttccaagtgagagaaaaaggactttccacgttccagcacttccatgctcattatttcatttgatcctcagaacaaccctgagaataggcaaccgagatattattagctctattttcagagagaaactgaggttcagaaaggtagcttgcctgaggtcacagagctgggatggggacccaggtttccaggctggacattgacaagtgtccaccctggcagtcacctcccaactcccatatgtaacaagctttcagagcaaaaatgaatggcatgccccactctgactacactgtgtcttggaaccatggccacggacagcacgccccactctgaccgcactgtgtcttggaactgtggccacggacagcacgccccactctgaccgcactgtgtcttggaactgtggccatggagaggtgacctcctctctgcaggatctgatttcagtggcttaggaagggcctgtcctccagattgttagaacagtacccatgccaatcgctgaaacccttccattggaaatccagttacttgaacacttttttaaaagaatttacctttataagtgcaaatgattctgggctagctgatattttgagtcactattgattaaaaagatattaatttttcatggaacaaggaagatgtttgcaatagtatggccagcatctatcctcattctctgtccctctctcacacccatgtaccccccacactctttctctctcattttcagtctgtatttcacaaggaagaaagccagacagtagcaattgcctggatttggatggaggatttagggagggctggaggcttagaagcaggcattgcgtcggtttttcaaagcacagcatgcgctttgcagctaaccagaaaggcatgctctctttttcatttggccactgtttgttgtggatgtctccctttgggttttggggaaggagcagtggtttgggaattgctggcttcctaccaaacaccaccaaagagcagtgcagtcccagcgcggcccacaatggcagggactgagatggataaacatcacagtagataaagactcgcacagcctgggcctccaggcaggacagagttgcaggggagagaaggagggaggtcatcgcttctcctctaagtaaggaaggctgcaacagggatgcccacagtgctcagggttacgcagaggtgagcggactctgccacagaggtggggaggttttccgaggagcagcagctgagctttgagaaggtcatgtcatcaggctatggatggtgagtcacagagggagatctcctggacagaaaacagtaacacaaaaagcatggagcagttggagggaagggtgtgtttggatggtaagtcctgggggagcctgaattgtatccctcaggacccagcgaacctcctggcctcccctagagtagtgaagagccaggttgctgttttagaacagagaggaggggaagagacagagaggaacgaacctgggggaagtagaccacgagagagctgctggggtgaagcctggtcacagagaggctgctcacctctgtgcagggagaataagttcccacgggaggggaggagagaaagggtggggccaggcggtaggaagagagaaggagcctggaaccaagccatcctgtttcctaaagcttgctttgtttccatgactctagaagcagtataaaagaaacatccttccagtgcacaaagcttgcaagagagtaatattatgaatgtttgaaatcatgctgtacttgatggccctgtaaggtaatgatgaggttctcagtgtgatgaggtagagatccatattttagcacatattcttcatagttgcagctctctgtaaaagttatcagcatatgacaattcagaatcccacatgtagtttcttgcaaactatatactagaaaaaatactttggagatataactaaaagaaggaaggaagggagggagggaaggagggagaggaaggaaggaaggagaggagggaagaaaaaaggaaggaaggagagagacaaaggaagaaaaaaggaaggaaggaaggagaggagggaaggaaaaaggaaggaaggaaggagagagacaaaggaagaaaaaaggaaggaaggaaggagagagaggaaggaagaaaaaaggaaggaaggaagaaagggagggagggaagaagagaaagaaagagagagagaaagggggagggagaaagagaaagagagaaagaaagacagaaagagagaaaaagaaaaagaaagaaagaaaaaaggggagagagaaacagagagagggagggagggaaagaaaagaagggaaggaggtagatggcttgaataatgtaggtcatgctgaggctgttcacaattttaaacgtctaaaaaacacagctgatatctacctagaaggaatcactaataaatcatactgtttcaatattatctaaatatattcttattaatgacatacaaagtaataaatacattacagtgttaatgcatgtgtgtgttcaagagaaacaagtagaaagtaaacacaagacagagttcgtccctgtagattccacagtgaaaatgtgcagcgcccataaaggttgggacagaacggacgaaggccctcagtgcttccaatccactgacgtttattttcaggcaaaggcccattttaaatactttctatcaatgttaaaatgatgagtttaatgtgtcaaagtagcatgcttttaaaaattggggatttttttcatgggatgatttcatcaagtaaaaatctccaggcaaaaatatcctacactccaatttgcccaacctcctctgtccaaacaaaggaataacactcatctgagcaagacctcctcttcccgcctaagcctccccgcaccgcacgcccaccaatgggctggcggcctctccagcagagccggcagatttccccagctgtgggaggaaagctctgttctcttcctgtgatgatataagcctctcctcatccgtcagcttcagttgtaggagagactcctgcctaaatcggtggttggggttggcttgaggtttccagctacccagaaagggacccgccaagagaggccgcagctcggcactttagctggcaactgtgcaaagctccaccccatgagtagttgcattgcttcgggtaagcttcgccacctctctggcctttacttttgtcatctctgaaatgcaaatagtaattgcgtctactttagaaggcttgtcagaggatccactgagacagcacagctcctgcatttagaaaatgccctcatgctgcaaaccttccagtcaccagccagcaactcttccatatccatccaataactctctgttctgcacctaataagcattccactcttatatacaagcctccttataaaaggcctagacttaaaaataataataatagcaaacacattgaaggtaaatgggaatgagggcactttcaacacacaaagcttatataacatatttgtgctatttaattaaaatgtaactagtcattcagtactgtgtggtttttgttacttccttgtattttaatagctctgttcaaatatgagtaactcaccacaaattgtgtggcgtgcaaactaatatattcacctgattggcctccacacgtgagggggacgcagccgggcctcctcgagtcccgcgttccttctgtgagggggacgcagccaggccttccgggccttcccgagtcccgcgttccttctgtgaggcggacgcagccgggcctcctcgagtcccgcgttccttccgtgagggggacgcagccaggccttccgggccttcccgagtcccgcgttccttctgtgaggcggacgcagccgggcctcccagacgcccgcgttccttacgtgagggggacgcagccgggccttccgggccttcccgagtcccgcgttccttacgtgaggcggacgcagccgggcctcccagacgcccgcgttccttacgtgagggggacgcagccgggccttccgggccttccgggccttcccgagtcccgcgttccttctgtgagggggacgcagccgggcctcccagacgcccgcgttccttacgtgagggggacgcagccgggccttccgggccttcccaagtcccgcgttccttctgtgaggcggacgcagccgggcctcccagacgtccgcgttccttccttgagggggacgcagccaggccttccgggccttcccgagtcccgcgttccttccgtgaggcggacgcagccgggcctcccagacgcccgcgttccttccgtgagggggacgcagccaggccttccgggccttccggagtcccgcgttccttccgtgagggggacgcagccgggcctcccagacgcccgcgttccttacgtgagggggacgcagccaggccttccgggccttcccgagtcccgcgttccttacgtgagggggacgcagccaggccttccgggccttcccgagtcccgcgttcctttcgtgagggggacgtagccgggcctccccgagttccgcggtcattatgtgagggggacgcagccgggccttcccgagtcctgcggtccttactggttaactgtagtcccgcactgttaatgtttttcgttttttgaagccaagatagcgtgctcaccgcaaaagaaatatggacctcgatgaacagataatagggagaatctcatgcacccatcctggaattacgtttttagctttgcccccatcactaccattggagggaagcagcttctgcgagaggcatttgtaaagtctccatgtctccccaagaagtcacgttctgcagacccgtcaaccatcccatgtcccgccactccctctagtaaataaggatccttgggtttttctggatgcctacacttactaactcttgacccaatttttgcataagcatcgcagaatcaaaaatctataattaacagattgttataaaattctacaacgaataaactcttaaattccaattcgaaaatattgtaaactttgcattataaattaacatgagtgtctgtagcaaggttaagatcaatttataatgtaacctaatcttcaccttggtctttattggcactgatttaaaaagatctgtgtgcaatatcatcttctgaagataagttcctttcatttatttctatttgctctgatcctccttttggaaaacaaaataaagaatttttttctaaaaaaggtatgatcgaaacttggccttaatgaacttaaacagcaattcatcctcacacaatccagtctttatggattgcaggcctagggtaagcaggttgcaggcacagtgagtgacagacaagcaaatgtcagaggagatgctcttatatttggtcgtgggctccctcttccaccgaggcctttcctaaatctgcctttgatgagcttcccccagccatcagctctgtccgttccctctggagctgcacagaaagtgcttcatggaaatgtcatctgccaggacagcaattactggcactccagcaatcacgggcacaatgcagagtgggtcgaattcaggtgagagcgagaacccacaatcaagcccggggaaggagaacaaagccattttctttcattcgccgtcaacacaaccatcaggccttaattacacggcgcgtgcggggctggctgctgaaaggcatgttattacccagcttagttccaaatcagctcagtattgatgagcggcagagggaggaagccagcctcgcccccgtggaaaggaacaggcaccaaacaagcagatgagtggcagaagggggcacactccagggaattaaaaaataattttagaagggagggagggacctggtacctaaacgctggctaaaaatacgtttccagaggcccattgcattcatggctgaattcaacacaggtatacctacttcagcctgggctgtttagttggccaatatatcttactggataagttcttgaagctgttattctctgctcacagcatttcccaaaggctcccacaagtctcaatacacctatgagtacattctttgttcttatccccaattctttttaagcaatttaagaacattctgaaaaaaagttctcagattatccctctctctccatatatataataaacatgtatgcatttatcatttatattctcttatattaaatatatatgcatatttgcctctgtctaccttaaaataacaaatgttcagtgcaaaatattttttagagattggcataataacacttaatggcaagctctaacatctttgaataaagcctctacagtaaaaataaatggttcatttactactaaaaattacacacacaaatgcatgcacacacacatacacttccttcccatggcaaaacacctatatttgtgtatgaacctaacacaaaaaggcatattactcagtattaccgaaagttaatggtaatattgacaaacccaaaacaacatgaattcggaactgttttgtttagaattctaaaaacgattctgctatttggtggggtgctatgcacctggatgtggaattaagaggtgcatctcctttcaagctgggggaacacacactgccaatcccccaagctgagctttgatggatgcacgaacttaccagcaggcacacgctcacgccgataggagccgtgcacaagcgtgtgcagtgcttaatgccaaattatgtcatttaagggacctttacatttcctaatctatttaaaatggcctagaaaataagtcctgatctgtgtgcctgggctaggtctattaagagtcagacagacggcataatgaaagccagggtgcagccctaataggaaatccaatgttctgtgtattcccttcctctcccttttttgcccaggctttagacttcctggggatctgtctcgggcagatgctcatgttttccaagcttattgcttatgggaagtggtaggagtttaagaaaatcagagagaagaagctgtcatcttgctgacaagctggccaaatgcaggtgggtcagagttttgagtgatgtgagttttgaaatccacttccaaggcaaaattaaaatacaaaagctttgtcctgccacagtctgatttccctaggatagatggttgctgaagacctgggaagcttctcctctcacacatgcttcaagtgagcgtgtttactctgcgagactacagggagaggaaattaatttgagctgctgccgccttcctccccagcgtagccaagaacatagcctcctaaccagcctctccaatccattgcttcccctccagtgcattctccacacagcagcaggaccatcgttctaaaaatgaaattgcatcatactatataagagcttctgattgcgtttggggcttccaaaacctgaactcctggccatgccgccaccgcagcgtaagaggcggctcctcctcatccctcctgactcctgtgttgctcacaatgttctcctggagcagttcccaaaatggggttcgtgagcctgtgggggtgccctccaccctttcatggcctttcgggggtcttccctcatgcaactacatcatctgtggggttggattatcttcaaatgcttcagccaaaacaacttatgcaatatgttaagtgcagaggcagatgagaattcagctgctctattaagacacgcatgaaagacatttgctaaatgtgaaacaatgacgctctttcaataaatgtcttttttatggaaaatattatttttcataaatatataatcacttatattaacaggtactgggttttaaaaatatttttaataactaaaaagcaaataatgttttaaaatatcttagttttaattgttaatgtggtagctataactttcatgaacaaaatctctgcgagggcttcagactattaagcctatgaagagcccttgtaactgaacctggtgagaagcagcgttctcaggacctcacggtgagaagcgcattctcaggaccgcacggggagaagctcgttctcaggaccgcacggggagaagcagggttctcaggacggcacggggagaagcagcgttctcaggaccgcacggggagaagctcgttctcaggaccgcacggggagaaggagcgttctcaggacgcacggggagaagcgccttctcgggaccacacagttccttctttgtgtgcacacaccgagctctcccttcctcagggccactgcacagctggtttttctgagaggaagcccaggtaacacctcagtgtttctcctctctcccatagggctcatccttcgctttctgtattggccctgctgttttcccatgtttagggccctgatttttaatattttcttaattatttatttacttttcctcttattggaagaaggacgggcacagtggctcatgcctgtagtcccagcactctgggaggatgaggcaggcagatcacttgagctcagggatttgagaccagccagggtaacatggtgaaaccctgtctctacaaaaaatacagaaattagccaggcagtggcacacgcctgtagtcccagctactcgggaggctgaggcaggaggatcacttgagcctgggaggtcgaggttgcagggagccgagatcacaccagatggtgtaatgagaaggaaaccaaactgtctgtatgcctattttttttttcccagcctttagacttcctggggatctgtctcaggcagatgttaatatttctgagctccagcctgctgggccacagagcaagacctgttaaaaaaaaaaaaaaaaaaaaaagaagaagaaagctcacagaagaaagtacttgtgtcctggattccttcagtatcaccacagtgtctactgcatggggcactttttaaacatctcataaataagtgaatggatgaatgaatgagataacctgttcatactcagaataggtgattgtaataaatgttctgactcttctgccatgatcaagcgtatggcaggttcttatgtgtccagggtggtgtttttaagacagagtttcactcttgtttcccaggctggagtgcagtggcacaatcttggctcaccacaacctccacctcccaggttcaagtgattctcctgcctcagcctcccaagtaggtgggattacaggcatgcaccaccacacccaggtaattttgtatttttagtagagacagggtttctccatgttggtcaggcaggtctcaaactcccaacctcaggtgatcctcccgcctcaacctcccaaagtgctgggattacaggcgtgggccaccgcgcctggctgtccaggttgttttaagtgaggtcttgcttgaagacggcagggtgcactggttatgtgtcaggcagagggaacttccagaagccacccctaggcatggatggaatggctcccttcccagcacaggatgaaggagggatgggaatggttgagtctgagaaggctgtgcctgctaggatccctcttagggccaatggcaaagagccaggtcgcaggagaggataacactggcaggtcagattggagttttgcaagtaaataccatctgcttttcatcaggattagagactcagggaaaatgtcagaaccatatccattatgaagaacatgtgagagcactctgggatgcatttttaaaaatctgactcggagtaaacacacagggtgccaacccgaagccgcccatcctcactgctctacagcagggacctcagcatcctacaggaagcagaatcctttcacatccccaggggaagaaatgctgggaaagtgcactaatgccatgagcctgggactggtgtgcatgtggacagttgggtcaggacgtctgcaggtggtagggcttcagtaaatatgtattaaagccagctacgtgtcagtaaaccacagcagaatcaagaccctttgaatatgtagatgcaaatatacagcctgtgtgggaatcgatttatttccaactcaaatttttcctaaatcccatttaccatttctcatccttttaagcagaagatggcctagaggaagaatcttcaggacatagattagcccaggttttatgaattcagcgttgctgcacaacctccagcatagtttgttaattttttcctaaatatttttcaaagttgtactctgtagcagaccctacgttatccatacagatgagatgacagactgcagacggcatccttgtctggaggaaagtaagagccaattagtcctactggaacctggcagaaatcagtctctttctagaggcctctctgtgttggggcacatcctgggctgggagctggaatatttgtctttaaatctagttctggtgtgtactttgccagaactttcccatagattgtgaatttctgaaatagaaggctgacctgaatcatcttatacactgtaaatatagttcagataaaacatgcggtgctgatgcactcggagtgcagtctggcggaacaccatctagaattccactcctccctccacacgttacagagcagttgtaagggacagtaaggtaacacgtaaagtttctaggataatgactcaaatgcgcagctacagctttgcttcttttttctttatccttttattcagtgtttcatgttagtttcatttttttttttttttcatataggatgatgctttctagcttccctctctgaaaagaagtctcattatgaaaacatgcagcagaatatcttaaacttcccagtgcgtacaatacggagagcgtctgttggtcctggcagtgggtggatatcgtcacatacttaattgtcattcagtggctggctctgttttctttcttctcaaatgtctggctgttcatctcttctttctgtctcacccaaatttgaattgatcctagcagagcacaaagcctcatccaagtgtctccacagtccctcattgtgaaggaggagctaccctctggggctgggaggactgcaattgggggacggtgatgggagcagaggctgggattcaccacagaatggcccctcctttaggggaggagggtgcagttggcttgggaatctagccaacgagtcaaggcttgaggacctgtctgttaaccctaacaagttggggattctgcttttcaaaggcagaactaccagttccatactaaggaatgtatactccctggctcttcaggttttgttttttttcttaagacagagtctcactctgtcacccagactggagtgcagtggcgcaatttcaactcactgcaacctctgcctcctgcctcagtgattctcctgcctcagtgattctcctgcctcagcctcccaagtagctgggattataggtgcccaccaccacgcctggctattttttatatttttagtagagacggggtttcaccatgttggccaggctggtctcaatctcctgacctcaggtgatccacccaccttggcctcccaaagtgccaggattacaggcatgagacaccatgcccggagactccagatataaagtcagtgtctggattagaaaatcatgttgtctttctggactttgaaaatgaaaacaacacttttgtcaaaaagatttgctagttatgaatcacagaaatgcttaagtgcttgaaaacacagcaaagtcatgtgccctggagtcagaatgtcctcctgcggctgcacacggtcagttgtctccccaggatttgggctttttggcttcagtaaatgaggcaaatgtgtagggtttgttctccacagtcccatctgtaaagctgtggaatatgttattgatccattttgggtctggaacttcaaccatacaatctataatctcatctttggtatgccacttatatctggcaaattctaagaaaagacaaaagagtgagaattgaaaataactgagcagtcgtctgctgcctcattacatagttctgtgattttgatcagatttggatagctaggcaggactgagcagattactacttggatcaggaaacagtgaacgctgggttttatgagggacgttttagacacctaggggtgaatcagctccttctgtattattttagagctggagaaatttcttgaatatgaaacagtccaaggcttcattttgtagttaggatttaaaataaaatacttgaacaacatctgtatataaaattatttttaataaaaattatgtttttgttctctaaatcattatagtgatttaaatttttttgatattttatttattaatgtttcctcaatgatctgtaagattattcacctgatggttattttatagctattattcatatatatatatatttttgagatgggttctcactctgtcccccaggctgaagtgcagtggtgtggtcatggctcgctgcagccttgactcctggggctcaagtgatcttcccaccttagcctcctaagtagctgggaccacaggcacaagcccctttttctgaccaagttttaagttatttgtaaagatgaggtcttgctatgttgcccaggctggtcttgagctcctgggctcaagcaacctcccaaaatgctgggattataagagtgagccactgcacctggcctgtagttattcatattttatctccctttagaacacgacagaaacttgttaataccaagagcttttgtatgatattgagatataaaatgtatagctatattcctttagaagtgttacatacaggatggggagaaaggtgcgacattcctctgctgggaccaccttgctgccgtttggaagctttgggctgtgtgtacatgcccactttgagaggccagtggggagacttgtcctgctccttttttcagaagcagtagagtgtctgtcactccaggaaactgacacttgtctggctgctcaagaagtttcccagctggctgtgagaccttcccccctcatcagatcctttcattaaccctgcaccaacaactctaaagccaagaaccttcaagaacaactttaagaacaactctaaagaccaactttaagccaagaaccaagttgatagcttaaaaattggataaatgtatactgtcaaatgaagttattattgtcactttgctaatatggaatgctaaggataaatgctataaagagtcttagacaacatctactccagtgaatgatcttcaaacttaactacctgatgtagtcacttgtggattagagaaagaagtggctctgcttttgcaaagacaaacaatcttgtttcagaataatccccctgctgataataattagaaatgtaagactctacacaacccatttgaaggcagtgggaatcagtcatgatgtgcacagtcaacattgcatgcagagagaaatccagagagtaagacctaggtgtagcacatctttcctgcttacagcatttattgataccaaagagtttcatgatgatctgaatatctgaacagaaggtttgtcaaaattgcatcatgcggggcataagcttaagattcatggcctcctgagagggaagctccttggtaaacaccataggcttccagttgggatcccataggattacatgctaggaagaaggataaactgaaaatagctcagctctcacaggtaataaaccatggctttgaatcatcaattcatgattggattgaggtgtttttctgtgatttagatgcctagaagcagcaaatcttttctgtaagaagataatataatacagaggctgagagtaaggctacaatctttcatctacaatgtctgaaattcaagcaaaatgaaacaaggagtatgacatgatagatttgaccaaacctcaggagaaaataacaaccaatagaaacaaatacattgagactcacagaaatttaaactcattatgatgaaaatgctaacacatttaacaagaagttaaatttcaagagataaataaaacttatcttaaaaaccaagtggaaattttagaattaaaaactataataattgaagttaggatctcagttgatgagattaacaacagaatatgacaggccaaagagagaattagtgaactggaaaatgggctaggagaaactaccaatattaatatatagtgataaaatggtagaaaatacataaaagaatataagatatatataagacacagtataaaaccctatcacatgcaaaacaggagtcccataaggagaggcaagaggagcaaaagcagtatttaaaaagataaaatgtaagaatttttcaaacatgatgaaaggcattagcctacaagttcaacaagcaatagaaatttcaaggggggataaatacaaagcaaatcacatctgggcatatcatagtaaaacttctggaaatcaaatatcaggaaaaaattttttaaatgccagcagttactgacagctcatttctcagcaaaaaatgatggtattcagatgacaatgggattctatactaaaaatgcttaaataaagtgattgcctatgtgggtgaaaaaaaaatccttaaaaatgaaggtaaaggattttagatacattaaaaatagaagcacttgtaatcagcagatctgcattaagtgaaatgctaaaaaattatttagtcagaagtaaaattatctgcttgtaatccagagatacatgtagacatgaacaacaaatactgtaagtatgtgggtaaaatgaaataatcattgactgtataaaataacaataatatcttataatttagtgtatttataataaaaattacattcaatatatatatccatatatcacattataatatgtggtttatattatataacatataacatatttaatatttataaaacctcacctacagtaacacacaaatagggggaagtagttggagttaaagcattggtaatttcattgtgtttttgtaaaatggtaaaactacccttgatattaaattttagaaagtcaataaaacctagtaaaaaatctatcactatcaaagttatagacagaataaaggaataatataaaatactaaatgcaaataagattaagaagaaagtcataaaaaaggaggaaaattagaaaatagtaaactggagaatgcaacccattaataattacattgagatgtgaaagtagtacacaggaccatcaatagtcaaagattatcacaccagattaaaaattgaacccaactaaatgctgctttcaagagtcagatctgaaatgtaaggacacaaaaaggttgaagataaaaaaagaagaaatatattacagtgcgaatgttaaggaaaattattataaatttttaaaaatattgatgtgtaggcccatcattggctattatgaatttttgaatgttggttagggaacaggcaactgtattattacaactgtttctggtaatttctgatgaacaaatatggctgagaaatagatatctagtctgaattgtttgttttagaggaaacaggtcagaaaagaaagtgatttaccacagtcctttcagtcattatttattcaatgtttaaggaacatctactatgagataataataaatgaggtgggtttccttgatttataattttaaaatttatgtacatatgcagaagtatctccaaaacaagacagaaaaggaaaaggccttacccaagggacagaataaaatactattgactgtgcccaaccacagatgagcgcataaaaacatggtatatctatctatctgcaggtgtatatacacacatgcacacacacatgcatacaacgaatgtgtagagatgtatataacatatacacccatatatacatacatacatgcacacacacatgcacacaacgaaggtgcagatatatgtaacatatacacacgtatatacacacatgcacacacacacgcatacaacgaatgtgtagagatgtatataatataaacacatgtatacatacatgcacacacacacaacgaatgtgtagagatgtatataacacacacatatatacacacatgcacacacacacacaatgaatgtgtagagatgtatataacatatacacacatatatacacacatgcacacacacacgcacacaacgaatgtgtagagatgtacctaacatacacacatatatacacatgcacacacacacaacgaatgtgtacagatgtatataacatacacacatatatacacatgcacacacacatgcatacaatgaatatgtataggtataaataacatacatatatatacatgcacacacatacacaatgaatatgtgtatatattatatatataatatatacacacacacgtacacaatggaacactacccagcaataaaaaaagaaggaaattctgttatttgtggcaacatggatgaacctggaggtcataatgttaagtgaaataagccagacacagaaagacaaacactgcatgatttcattcatacatagaggctaaaacagttgatttcatagagagcaaagaatagaacagtggttaccagagactaggaaggggcaggggtatgggccccaggagtggttggccaaccagtaccaagttacagttaggcaagaggaccgagctctggtattctattacacagtaggataaccagagcaaataacaaggtattgcgtatttcaagatagccagaagagaagatttagaatattattaccaccaagataaatggtaaaagtttaaaatgatggacatggtaacttcctcaattccatcatgatactatgtatatacgcattgacacatcacactgtattccataaacatgtacaattaccacgtgtcaattagaaatgaaaattaggcagggcggggtggctcatgcctgtaatcccagcactttgggaggcctaggcgagtggatcataaggtcaggagcttgagatcagcttgaccaacatggtgaaaccccatctctactaaaaaatacaaaaattagccaggcgttgtggtgtgtgcctgtaatcccagctactcaggaggctgaggcaggagaatcgcttgaacccaggaggcagaggttgcagtgagcactgcactccagcctgggcgacagagcgagactctgtctcaaaaaaaataaaattaaaattaactaataaaaataccatagaccaaaagagtgaaagaccaatttcatgatactgtgtatatatgcattgaaacatcacaccatattccataagcatgtacaattaccacgtgtcaattataaataaaaattaactaataaaaacaccatagaccaaaggagtgaaaggtcaatttcagagacaggactaagttttgtcttcaaagaatcagaggctttttagttagattattttaaaaaaatgagtaggctttggaaaggttcagaagtgggagaagaacatcacaatgagatctttacaaacattgtccttaataacaaagtaaagtgtgggactgcttcttcataaaaagttcatcctttgctttgaaaaacaaacattctttttgataggagatcttttgaaatgccaatttctaaagttaaccaacgttttcagaaaaactatgcttacaaaaaaattgtgcgggacagactgcacacttgggcactgccttcttgccggccacaatttgatggccttccctgccataagggatggtgtagactgcgtgaaatgcagatacccatgactatctgcggggtatagcgtgatcccccgtcacactctccttcccccgagtcaatgggagagggaggagccacaggagaaaagggtgagggtctcaggaccaggacagctgtggggcagaaccccgtcctcgcatttgatggctcacaggacttgagtgagggacacagtgttaatgtgagaagccaccgactttataaggctgtgtgttctgcagttagtctcctctgtctttagagttggctcctcctcaccttgggtcttactgatggagctgaattctctggcccagctaccttcttctctctgaagcacttcttcctctttcctccaagggactgttcaacagcagtgtcacctgcctgcccagtcctcatgcagacacacaaacctgcttcccactacacacagtacccctcacggaggcaggcagcacggacacctctggggaggaacttctgaaaataaaatgcagctcagagtgctccaacatttcatccaggatttgaacacacagcactcagattgagccaaggaagcagcgtgcagtgccattccttcctccaggtaagcctcgttaggctgtgccctcatacacacgctgggccttacggtttacaaaatgcatgtctataaatacgtcacatgcttcccaccgtggcactataggaagctgaggcaggtttcgtgacaagtgaatttttggtgtaggctgctcgagaggtccatgatttgcaggtttcatgacaaataaatttaggtacttggtgggggctgctcaagaggtcatgatttgccattgtactaggaaattaatgcaacgttattcctacaacaaattagcttaatgattgaaaatggcacacaattactaggttggagggcaaaaataaagaaatcaaggtgtcagcgaactgccttccttgtggaggctccaaggaacctctgtgtccatgcgtttttctgcttctggaggccaccggcattctgtggcttccgaccccttccacacatcacctgaacatctgtctccatgaccacgtctcctcctacacgactgctgtgatgcccttgggcctgtccctgatccagaataacctttctatcttactctcctgaacttaatcccctctgcaaaatccctgtgtcctgtaagatgacatattcaccggttccaggaaggtggacatgggccatgggtgacagcactctgcctaccacacccatagagagagagagagagttgaggaggaaagtctgagccttccaaggccacatttttctactcttctgaaaagggagtttctcgaatgccagcaatggctgagaaagcccagggggttgcgctcatggctgttcggctccggtgtgttgctgaagagctctcacgctggagccataagggaaaatcacccagcatggtaagcaaatgcgcctgggagtgccatggtgctcagcctccttcctgagacatgcagattagattcctacaagtatatgatccacttcaagtaaatgagcttttggagaagttaacaaagcacattaatctttactcagtaagatatgatgaattgtgtatgatgcacaagtgccctaactcactgtgagagaactagagttgcattctacaccaggcctaatacattgccatgccaactactgagtggaaaaaataaatcctaactctgaaaagacctaacattgaaacagacaaaaaagtgtgtctgttcagaactgggatgtgaactaagcagttatatcagctgcattttgacaatggtgtccaaagtcaattactggagactgttttcaggacctggtgacctggcttacacaactgctccagaatgtacttagcttaaatctgcactcctcatggtccagccagttgttccaatttgaaaatgatcttatcaattgttcaataaccttctatttttgtcattaatggttaggttctttaaaaatcataagtgttggccgggtgcggtggctcatgcttgtaatctcatcactttgggagaccaaggcaggcggatcacgaggtcaagagtttgagaccagcctggcaaacacagtgaaaccctgtctctactgaaaatacacaaattagctgggcgtggtggcaggtacctgtaatcccagctactcaggaggctgaggcaggagaatcacttgaacccaggaggcggaagctgcagggagttgagattgcaccactgcactccagcctgggcaacagagtgagactctgcctcaaaaaaaaaaaaaaatcgtaagtgttttaaagtttaacctttcaagtggtattttcagctaaactctctaatctgtagtttactaacaatgatatattaacttctgggttttcaaaacactaaaacttttctaaacaatatttccaagccttatatttaacgacacttaatcattacttgagcagcaagaaatacagacttttattgggagctaatgaagaaaaataagcattactataaatgaagtatagaactcaggattaagaaactcactcaaaaccactcaattacatggaaactgaacaacctgctcctgaatgactactgggtacataacgaaataaaggcagaaataaagatgttctttgaaaccaatgagaacaaagacacaacataccagaatctctgggacacattcaaagcagtgtgtagagggaaatttatagcactaaatgcccacaagagaaagcaggaaagatctaaaattgacaccctaacatcacaattaaaagaactagagaagcaagagcaaacacattcaaaagctagcagaaggcaagaaataactaagatcagagcaggactgaaggaaatagagacacaaaaaaaccttcaaaaaatcaatgaatccaggagctggttttttgaaaagatcaacaaaattgatagaccactagcaagactaataaagaagaaaagagagaagaaccaaatagatgcaatagaaaatgataaaggggacatcaccaccgatcctacagaaatacaaactaccatcagaaaatactataaacacctgtacacaaataaactagaaaacctagaagaaatggataaattcatcaacacacacaccctcccaagactaaaccaggaagaagttgaatctctgaatagaccaataacaggctctgaaattgaggcaataattaatagcttaccaaccaaaaaatgttcaggaccagatggattcacagccgaattctaccagaggtacaaggaggagctggtaccattccttctgaaactattccaatcaatagaaaaagagggaatcctccctaactcattttatgaggccaacatcatcctgataccaaagcctggcagagacacaacaaaaaaagagaattttagaccaatatccttgatgaacattgatgcaaaaatcctcaataaaatactggcaaaccgaatccagcagcacatcaaaaagcttatccactatgatcaagtgggcttcatccctgggatgcaaggctggttcaacatacacaaatcaacaaatgtaatccatcatataaacagaaccaaagacaaaaaccacatgattatctcaatagatgcagaaaaggcctttgacaaaattcaacagcagttcatgctaaaaactctcaataaactaggtattgatgggacgtatctcaaaataataagagctatttatgacaaacccacagccaatatcaactgaatgggcaaaaactggaagcattccctttgaaaactggcacaagacagggatgccctctctcaccactcctattcaacatagtgttggaagttctggccagggcaatcaggcaggagaaagaaataaagggtattcaattaggaaaaaggaagtcaaattgtccgtgtttgcagatgacattactgcatatttagaaaaccccatcgtctcagctccttaagctgataagcaacttcagcaaatctcaggataaaaaatcaatgtgcaaaaatcacaagcattcctctacatcaataagagacaaacagagccaaatcatgagtgaactcccattcacagttgcttcaaagagaataaaatacctaggaatcaaacttagaagggatgtgaaggacctcttcaaggagaactacaaaccactgctcaatgaaataaaagaggacacaaacaaatggaagaacattccatgctcatggataggaagaatcaatattgtgaaaatgaccatactgcccaaggtaatttatagattcaatgccatccccatcaagataccaatgactttctttgcagaattggaaaaaactactttaaagttcacatggaaccaaaaaagagcccacattgccaagtcaatcctaagccaaaagaacaaagctggaggcatcacactacctgacttcaaactatactacaaggctacagtcaccaaaacagcatggtactggtaccaaaacagagatatagaccaatggaagagaacagagccctcagaaataatgacacatatctacaactatctgatctttgacaaacctaacaaaaacaagaaatggggaaggcattccctatttaataaatggtgctgggaaaactggctagccatatgtagaaagctgaaagtggatcgcttccttacaccttatgcaaaaattaattcaagatggattaaatacttacatgttagacctaaaaccataaaaaccctagaagaaaacctaggcaatatcattcaggacataggcatgggcaaggacttcatgtctaaaacaccaaaagcaatggtaacaaaagccacaattgacaaatgggatctaattaaactaaagagcttctgcacagcaaaagaaactaccatcagagtgaacaggcaacctacagaatgggagaaaatttttgcaacctactcatctgacaaagggctaatatccagaatctacaatgaactcaaacaaatttacaagaaaaaaacaaacaaccccatcaaaaagtgggcgaaggatatgaacagacacttctcaaaagaagacatttatgcagccaaaaaacacatgaaaaaatgctcaccatcactggccatcagagaaatgcaaatcaaaaccacaatgagataccatctcccaccagttagaatggcaatcattaaaaagtaaggaaacaacaggtgctggagaggatgtggagaaataggaacacttttacactgttggtgggactgtcaactagttcaaccactgtggaagtcagtgtggcgattcctcagggatctagaactagaaataccatttgacccagccatcccattactgggtatatacccaaaggattataaatcatgctgctataaagacacatgcacacatatgtttattgcagcactattcacaatagctaagacttggaatcaacccaaatgtccaacaatgatagactggattaagaaaatgtggcacatatacaccatggaatactatgcagccataaaaaatgatgagttcatgtcctttgtagggacatggatgaagctggaaaccatcattctcagcaaactagcgcaaggacaaaaaaccaaacactgcatgttctcactcacaggtgggaattgaacaatgagaacacatggacacaggaaggggaacatcacatacaggggcctgttgtggggtggggtggggggaggggggagggatagcattaggagatatacctaatgctaaatgacgagttaatgggtgcagcacaccaacatggtacatgtatacatatgtaacaaacctgcacgttgtgcacatgtaccctaaaacgtaaagtataataataaaattaaaaaaactataatatacaaaaaaagaaaacagtaattatataatagtttttcttgtttttaaatggtcctttattcattttttactatgtgaaccttaaacaattcttaaaatgcccactggtccttttgattctagtaggatgtaagtaatgttccctaaattcaatcatttatgtttttgatttgaaagaaacaaaaaaggaagactgaattataaatgtaataatgcatataatgtagtcaggggaacatccaaactcaatcatactcattcctagattcccatgcccttttctttaggctttatctatttctaaattgtctctccctctctccactgctgccagtctcacttgaacaatgtcaagagccatttttctggtgtctagaacttgcaaatgccttcatctaggtaaccactctcctcaatgctaccagggttgatatccacctagagcaatgctacagggttgatatccacctagggtacatttctagtgatgtttccatcccccttctcttcacatatgggttaaagtccaaaatccttacgtggtcaaccaaggccctttcaatgtggttctcaacaatctttccagtatcagctcctttgttctcacataacgttttacattatggcaatatcaaagtcgtcacaattttcctatgcactaagctgtcccataatttcttttcttttcttttctttcttttttttttttgaaacagggtctcactttgtcacccaggctggagtgcagtggcatgattttggcccactgcagcctccacctcccaggttcaagcaattctcctgcctcagcctcctaagcaactgggattacaggtgcacaccaccacgcccagctaattttttttagtagagatggggtttcaccttgttggccaggctggtttcgaactcccgatctcagatgatccactggcctctgcctcccaaagtgctgggattataggcacgagccaccgtgcccggccaagctgtaccatactttcatgtctttgaacatctatttgtaccattcacctttttcttttattgctgtttacctaatgaagtcttagttatcctttaaaaaccagcccacttggaaatccttttgataaaacgtccatgatattagaaagaaaacttgggtgttactttgtccacacttctatattgtactgaatttggttatgtctgtctccccacctggtcaataagcaactaggttgggggtaaaactgagccttacagatctttctttcctcattacctcatgcaatctctggaataactcagaatctcaaaaatgaaattaaaacatggaaatgcataagagaaaagaggagcatttcttagtctgtcctttaatacagacaaaatccagttaggttagatgctacattgccactgtgaaagtcatcctccataaacccccaaagcgaatccacagttcatcctcctgttagcagattctgtagttgcccatttgcctacttactctcctactatagaccagtgtcttttccatagcctatttagagccacgtttttcatttatgtccttcttcttctgtttaaaatagccgccaagcacggtactgaagggctatctagtgtccctacatgcaagaaggctgcattgtaggagtccagtgggaagacttcattccctatggagaaagcattcctgctagagaagcttccttcaggaatgagttatggtgctgttggtggtgagttcagtgttaatgaatcaacaatatggtttacataaggtgtctttaaacagaaacacacataaaacaagataatgtattgatcagttgttgaaaatattgtggccagaggttcacaagaacccaaccttctctttcccccaggtacaatggtttaggatttattcattctaatttgttaagtgtacagagccactttggaaagcatgattactatgaataacaaaaattgattgtattatatattctatatctacactacacatataaaacacacatataatgcgcactttcctgcttgaaacccaacacactgattagaagctgcctttatgcttcctttccccatcattgtcctttgtaaaagacagaagcgtccagaaacgccctgaggaattggcagcctgaacccaggccagcctcaccctgtgttgagcttacgtagtacaatacaccgtcaagaacaatgtcgtgacatctgttttaagtgcatcatcactaaacaagttgaattcatcaaacgctgtaccttctggaagacagaatggggcaaggctgtctatttggttcaccactaagcctggaacactgaaaaatcaaactgataactaactgttgacaattattctagaggccctacagtgagacaagttttgcatcacagattctctcaggatctgatgcaggctgtgggctctctcttccagaaaatacacaaatgcagaaactcacacatttacacaaatcttctaaaggattataaatccttgaaacacactcatgtatggttgggtgattattaactcagattaagaaaccctaggactgatgccatcgaagcacctacaccaggaacctgggcatgatgtgcggtgtattccagccctgcccaccccgaagcacgtctctctctgtaactcccttctactggggccccctattgtccactctggtaggttgggttcaatccactccatgccccactcagtggcaaaccctcctgttcattaggatttaacaagtttcattgtccatgtacactgcagtgactcaggtgcactaacctgagggtgtagatactggaagtatcaacaatccaagcaagtgtctctccagccgtctcaggggaagcccaccattcattcactggggaagaactagggttacagagcatgagccctgctgcaaaaggacactgggtttgattgaattcgagttatccactcccagtgaatgtgggctcaggcttgtgatactctgttttaaaagtcactttttaaaaagttcgccatgaaatgtggcggtaaacgtgtctggtttgtagacctgttgcaaccactacatgacataacgcaggcagagcacctgtcacagccagcagttcggcaggacatccaaattgtcagagtcccaccctcatgtgcaagcaggtgcagtgccatccaagcaggtacagtttgggcattccttcagtaaaaaaagggactgagcctcctttgcatatatgtatgtaggcttgtattctcatatactgacatactgtaataactgaatcatacacaacaataacaattaaaaactttaaaaaactttaatttataaataaccttttttcttctgaaaggtatgaagaatgttttaaaagtgagagatatatctttaaatatgacattagtttttaaatttttgcctgacattttatgttacagcaattttaatctctatttttaagtttaatttatcttgatacttgcttttaggctctatcatagtagaaatgatacctcagaaaggcacatttacctaaaatagaaaaacagtaaacctatacattggttactataactagatcatgatacttatttttctttattatctatgggctatcccaaatttttatcaaaatttagctaatcactttccatcatttttcaaatgtcataggttgcttttgaaattaaacagggaggcatttacacacacacacacacacacacacaccccaaatagattcaaagccactgaaatgactcattctgccagtttttaaaattgcctatgctttttaaaacattttgtgtttttaatttttgtgggcacatagtaggtgtacacatttatggattacatgagacatttttatacagaaatgcagtgcataataatcacagcatggtacatggggtctccatcgcctcaagcatttatcctttgtgttacaaaaaaaatccaatcatactcttttagctatttttaagtgtgcagttaaattattattgactatagtccccttgttgtgctatcaaatactaagtcttattcattctttctatttttgtaaccattaaccttccaactcccctaccccctgccccaccacccttcccagcctctggtaaccatccttctactctatctccgtgagttcaattgttttgacttttagtttccacaagtatgtgagaacatgtgaagcttgtcttttcgtgcctggcttgtttaacttaacataataacctccagttctaaccatgttcttgtaaaagacagaatctcattcttttttatggcagaatagtactccattgtgtgcatacatatatttttaaatttttaattaaaaaatatatgtatgcatatgtatgccacatttttttaatccactcatctgttgatggacactattgatgcttccaaatgttggctcttgtgaatagtccttcagtgaacacgggagagcagatatctctttgatatgctcatttcctttcttttgggtatatactcagctgtgagattgctggatcatatgctagttctatgtttagtagttttttgaggaatctccaacctgttctccatagtggttgtactaatttacactcccaccaatagtcttctgtttctccacattctctccagcatttgttattgccttccttttggatataagccattttaagtggggtaagatgagatctccctgcaggtttgatttgcatttctctgatgttcagtgatgttgaacacattttcataatcctgcttgccatttgtgtgtcttcttcttttgagagacgtccattcagatcttttgtccatttttaattgacattttagattattttctatagatttgtctgatctccttctatagtctgattattgatcccttgtcagataggttgactttttcctttgctgcgcagaggcttttttaacttgatatgatcccatttgtcgatttctgctttggttgcctgtgcttatggggtattactcaagaaactttgcccagaccaatatcctagagcatttccccaatgctttcttgtagctatttcatagtttgagatgtttaaatttaagtttttaattcactttaatttgatttttgtataaagcaagagataagggtcaagtttgtccagttttcccagcaccatttgttgaagagactgtcttttcccagtgtctatccttggctcctttgtcaaaaatgagttcactgtaggtataaggatttgcttctggattctttattctgttccatgcatccatgtgtctgtttttatgccagttccatgctgttttgattctgtatagttctgtagtatactctgaagtcaggtaatgtgattcctccagttttgttctttttgcttcacaaaatttaggctattctaggtcttttgtggttacatattaattttaggatattttttctatttatgtgaaaaatgccattggtatcttgataggaattgcattaaatctgtagatttctttgggtagtatggacgttttaacaatattgattcttccaatccatgaacatggaatacctttccatttttttgtttcttcaattttttttaaaatcagtgttttatagtttttgttgtaaagatattttacttctttggttaagttacttcctatgtatttaattttatgtgtggctattataaataggattgctcttttgatttctttttcacattgttcagtgttgacatatggaaatgctactgatttgtattttgattttgtatcccacaattttactgaatttatcagttctaatagttttttggtgaagtctttagatttttccaaatataaaatcatatcatctgcaaataggtataattgcttatgcatgtttgattagaaatttgaaagtttttaaatctgaaagtttttaagagtttaaacatcccttatagccaaaattttgaaaatcacataacaatgaccacgtttttaaacatccattttcaaaatgttctttccataggacaaggttctttttaaagtaattctttcttactaattgttttaacattaattttgctttgaagcatgatcttcatgtatcgttttttttaaaaaaattctgttagtactcctttagccactgtcatccactaatagcaaatttgaagcacatgtctttattacaagagaaaaataactcatctttaagactgacaactctggccaggtgcagtggctcatgcctgtaatccctgcactttaggaggccgaggcgggcagatcatgaggtcaggagttcgagaacagcctagccaacatggtgaaacctgtctctactaaaaatacaaaaattagctgggcgtggtggcgggcgcctctagtcccagctactcaggaggctgaggcaggagaatcgcttgaacccagaaggcagaggttgcagtgagccaaaatcgcaccattgcactccagcctggggacagagagagactccatgtcaaaaaaaaaaaaaaaaaaccaaacaaaaaaaaaactgacaatgcttctagaacattataacaagcagaactctttgtggtacaaatgattttcacagtcatcccatttcattacaaagtattataaaatattataatataactctcataaatctattcactgaggccctcataaactgcaatacagagcagaatgccaaatgccagtggaagagtcagggttccaatgtcaagcctctgcatttcagactgtccatggtctgcaagtccccatctagacacatgactgatgctgggaaaatggcggtgtctatatgcgtatataagctttatacttggaaacaacacatttattaactttaatacaaatagatttgtatttttcttataacctgatacctttgaatcccctgaaatatgggcatttaactttgaacaccaatatcttagagtcccacatcgatattcaaactcccccaggatgagttacccgataataaaggagcaggcgaaattttaggaagattgggtggtgcctagctgaggctcagacataatttgtaaatcccagtgcttttaaatttgttaataaaaagcatgaataactaaattaacaaatacatactattttataacaacaaatgttatatatgtaacacaatattcataatttattactctaataatacatatttttgttaatttagtacacatacaaacacattttgattttaattcccataaatgctctgctgtatagtaagtataaatggtatttaagttgtatagacgggattagtactaattagtaatattgtttcatgactaaattagatgtttatctgtttcctcctcactttttacttccccatcatctatcattagccttaattgttaacatttctctagtatcgtgtagtttgttctcatggttgtagtcattgtcatgcacagaacaacacattttaaaacaaatatcttgaattaggccaccaaagaactggtgttactttattctcccaagtttgtcattccacctagctcaattctcaaccttgacacagcaacggagtgccctgtgcccaaggcctggtccccagtgtccatcttctctgagggccacagcaagctggccatctgtctttcatgaggggaagagaggaagaaggcaaataagtagaggggagaggcacagagtggactttattctcatcaaccagagactttgggatggaagaactgaaacagaggaactaacgaaaataggacttctgcatcccaccaggatgcagggacagctactaaacttagcttctcaccagaacaaccaaccaagcaaaaatgcaaacggacaaatacaaaacaattgtttcaagacaccagacacaagataatggagagtgatccctgagagatagaaaacaaaatgcttgtcctggtttattgccttgagtttctggaatgtgttgccaggaggggaaacccagggagagccagtgaactcagtgagttgaggagacagagcttagtgtccagggagaccaatatagctagaggcttcaggacagagcactgcagagaagggagctgcagagagataatcctgggggtgcacagagggtcccccaacagtatccaacataatattgaccagcacaagtctatgaggagactgcctgaggccagccgaaaaaccacctgaaaatccttgcaggaggagtgtgcagtgctgacccagggcaggggatgaagcctgttctcgtcagccaggtgctaaaccttatattcacagtgccttcagcagagcactcagaaggcctcaacttaatagcagagaataattagtaataggctgaatattactcagctactgcctagcaaatgtaaaaagctagaccatatcatactatttccaagtaacttaactgcttccaagaggaaagctcaaaaatatttctagaaatgcaaacatatccagcacccagaaggtaaaatttacaatgtctgggattacattaaaattttccaggcatgaaaagaagcagaaaaataaaatccacagtgaggagaaaaatcaatcaatctaaccattgcagaactgacaccactgttagaattataaggacaatacaaataattattataattgtattttatatattcaaagagttaagtgaagacaggagatattttaaaaaattaaatcaaattctaacaaatgaaagctctaatatctgagatgaaaatgcactgtacatgattaatgacatattagaccttgcagaaagaaatacgagtgaatttgaagacataacaattgaaattatctaaatgaaacagagagaaaaaaagaattataaatgaacaaaatatcagtgagtcatgggacaacttctagtggtctcatatacatgtaatcagaataacctaaaaaaaaaagaaacatgagacaaattatctatctatctatctatctatctatctatctatctatctatctatgtttgaagttgctggcagaacaatctccagatttaatgaaaacatcaaacccacggatctaaaataatgaacaaaacccaaacacaagaacacatagaaaattacatacagctcaaaataatcaaatttctcgaaaccagcgacaaacaggaaagcttaaaggcagataatagggaaaaaaaggtgtgaaggatcaaagataataaatataacacatatcatcagaaaaagaaatgcaaatagaaagatagaacaccatctttaaagtacttaagaggaaaagaaatccccttaccctaaagttctttgtccacaaaaatgtcattcaaaagcgaagtaagacaaagacttcttcagatatagagaagctgaaagaatatgtgtcaccagcagactgggccttacagaaatatgaaatgaagtctccacacagaaggaacataggaccgaattgggatagtcacacggtaacaaagaatatcagaggtagtaactgtatggataaatgcatcatatacttttcttagtagctaaatctctttaaaattaagcaatagtttaaaaataataatgtagtgtgtcatttgtaacatatataaaaataaaatgtatgataatagcacaaatgctaagagggaaaaaatggaagaacaacattgtaagattcttatactacatgtgaagtggtataatacaacttaatggtaaaaaattaaagatgtattttacacatccaaagcgatgactaagataatagcaattataagcattatgcataataaacctatgaaagaaataacagaatcatagacaaataatctaaagcaaggcaaaaacaagaaaaaggaaataaagaacagatgggataaatatagaaagatggtcgacttagaattaactatattcatacattacatgtaagttatctaaacacagtaataaaaatgcagaagttgttgaattagatacaatgtaagatctaactctatcgcctacagaaacacatatttaaagacaaaagtaggttaaacataaaaagatgaaaaaagatacatcatgcttgcactagtcaaaagaaagctagagtggctctgttaataacagacaaggaagctttcaaagcaaagcatactaccagggtaaagaaggtcatttaaaacaataaattaatcaaaagaaaatgacaatcttaaatatgcatgtaataactgagtttaaaggacatgaagcaaaaactgaaagcactacaaggataaatagacaaatctacaattatagtcaagagattttaaccctcctatcctgataattgatagaacaagtagacaggaaatcagtaaggatataagaggtttgaacactatcaaccaactaaacctaactgatgtttacaaaacactgcctccaacaacaagataattcatattattttcaagtccacagtgaacatttaccaagtgatatagtttggatatttgtccctgcccaaatctcacgttgaattgcatcccccagtgttggaggtggtccctccccaaatctcatgttgaattgcattccccagtgttggaggtggaacctggtggaaggtgttcgggtcataggggtggatccctcatggcacggtactgtcttcatgttagtgaattctcctgagatctggtcatttaaaaatgtgtggcaccctctcccccaaccttctctcctctttctctctctcttttgtgtctgtctgtctgtctctctctctctctctctctcagttccacgttccacctcctatcatttaagcttcctgagacctccccagaagcagatgctggtgccatgattcctgtacagcctgcagaactgtgagccaattaaacctcttttctttataaattacccagtctcaggtatttctttatagaatgcaagaacagcctaatacaccaaggtagattatcttctggggtgtaacacaagtctcaataaatttaaaaggatttaactcatacaagtacatgtttcgaccacagtggagttagataagaagataataatgaaagtttttagaaaattacccccaaatatttggaaattaaataacacatttctaaataacccatgggtcaaaggaggaatatgaagagaaatttgaaagtattttcaactggatgaaaatgaaaaagaagttccaccaggtatcaatttgcgggaggttggtgaagcattgttctgggcatttaatttgcaacattaaatgcgtatatcagaaaagaacaagtatcaatgacttcagcttccgccttaagcaactagaaagagaaaagcaaattaaacccaaagtaaatagaagaaaataaattataaagatcagcacaaaaatctgtgaaataaaaaacagaaaacaatagagaaaaatcaacaaagtcatatgtttgttctttaagaaggtcaatcagagtgggaaatccctggtcaggctggtcaggagagagaaagagagagagagagagagaacacaattaccaatgtcaggagtaagagagaaaatgtcaatagtgagcctacacttactaaaaagataatgaacaaaaattatgagccactttaatgaataaattcaataacttaggggaaatagaaaaatttgatttgaaagacacaaagtaccaagctcactcaataagaaataggtatcttggaaaggcttctatctaccaaagaaatgcaaattgtagttaacaacttttccacaaacaaaacttcaggtctcgatacttcaggtatgaattgcatcaaacattcaataaatgaataatacaaattctttcagaaaatttaaaagaaagaaatacttgtcaactcattctatggtgccaccatttctcagataactaaatcaaagataccacaagataagaaagtcacagacaaatatccataatgaacatagatgaaaaaattctaaacaaaattttaacagtgaatccaacagcgtataagaagtacagtgcatcatgacccagtggagcttaatcaaggttaatttagaatttgaaagtcaaccaatgtaacttgtgacaaataaattaaaaagaaagaaaatccagccaggcacggtggctcatgcctgtaatcccagcactttgggaggcagaggcagacagatcacttgaggtcagaaattgaaggccagcctggccaacatggtgaaaccccatctctactaaaaatacaaaaattagccaggcatgctggcagccacccataatcccagctacttgagaggctgaaggcaggagaattgcttgaacttgggagtgagctgagatcacaccattgcactccagcctgggggacagaacaaaactccatctcaacaacaacaacaacaacaacaacaacaacaacaacaaaaaaaaaaaaagaaagaaggaaaaagaaaagaaagaaagaaagaaaatccacattaatagactctgaaaaatcatttaacactatccaacatccatttctgatttgtaaatcacataaagagcttgaatctagaatacaaaaagagctctcgaaacttaatgataacaagatcagcaccacattttttaaaatgagcaaaagatctgaacagaccttttattgaagaagatgtatggataggaaataaacacatgaaaagatgcttagcatcagtagacattagggaaatgccaactaaaaccacaacacgatgtcctactaactgttagaatgctaataataaaaagaccaaccacataaagtcttggtgaagaagttggaggaataagagagctcatatactgcaggtgggaatgtaaaatggtagactttggagaaagtttggcagtttgttataaaagtaagcttactcctgctctatgaacttgtcatttcactgctagatatttaccccaaagaaatgagagcatatgtccatacagaaacgtttacattaaaatttcatagcaacttaatttgaaaaagccataaattggaaatgatacaaatatccatcaacagttgattgataaacaaattgtgtaatatacaggcagtggaatactaattgacaatagaaaggagtgcactattgatacacacagcaagatgggtgaatctcaaaatacctatgttgagtgcaagaatacaggaaaaactacatactatgccacacaattcataccaaatcctgaaaaatgcaaactcatctgtagtgagagaaagcagttccatggttgtgtggggatggagctcagagaggaactggagggagaggctacaaaggagcatggggaaaccttggcatgaagtttaccacttgactgtggtgatgcatggggatctacacacatcacaacttacagagttgtatactttaaatatatttatgtcatgtcaattgtcattcagtagagctgttaaaacagcataaatgagagggtttggtgaagcagaggaaactgccagccacaccctcatttcttgtccagattctaccctcttttcctttcgaagacgtgaaagaagcaggagtctaaggtgagggcagagactgggcatgtgggatgggttcccagcattcctcatgttaccaacactgctggctctgaaatgccaaataacttttgagaccaaaagacagagcctttcattccatcatttgaaataagaagcataaagatttgaatagctgagggatacattggcatggctaagtttggctaaaataagaatgttttctactttagtggaagggaggaattttgagtcaagaggatgttgtctcgccgtcacattgctaagagtggctggtagaaggagagtttgaggacagtggaaaatgattttacagttttgccatgtttctttgcatctttttgttttttgggtgctatagagaagtgctgagcagaagcgctccatttagtcaacggctaatcctacagccgcttagtgtagggcccaggatatgggaaaaagactcacaactgcagactgagagggtttagaattggctttctgcataagttaaggtgagacactgcctccagctgtaaaaagtagaggttcttcttcaaagactttcctccccatctaattaggaataaatagtaacttctcttagaagcaaaatttattcaaagacgtgtactaacattcttaaatatctgctagctgtaataaagagatcaatgtattttatgttcttagctcccacaatttagcctaaatatttgccctggcatgcttatactggtccaagcaagcattaggtcatagcttgttcctcttccttatttgaaggtgtttttacctttctcagcattccacaagttacttcctccttcccttgttctcctctgcctttgcctcttttaaaaagttccaagttgctagccagtcaggacaaatacggaatgtgaggtcctgttccagccaatggaaactggacacagtagtgaggtggatgcatcaggttataaatgaccctgtctccttttttcggtgtactcttatggcagaactgctggtgagtgtaccctttctgcagaaagtaaaaacggccttgctgaggaaattaaatttatgttcaagtgctatttctttatgtcacgaaggaataatcatttctaacacagccatctttcccttgcagagttttgagctaacaacaccactccaggtcagtcaagaagggacacaggacaggggaaaagcgcatttgcacagtgagtggagaagaggggaggatggaaaagtggaaaggaaagggtgaaatttctgtccacgaaaagagtctaactctgtgaaatatttgaagagatttattctgagccaaatatgagtgaccatggcacgtgacacagccctcagagggtcctgagaacatgtgcccaaggtggtcggggcacagcttggttttatacattttaggaagacatgagacatcaatcaaatacatttaagaaaaacattgatatggttcagaaaggcgggacaactccaagggggtttggtgggggtccttccagggtacaggtaaatttaaccattttctgattgacaagtggctgagtttgtctgaagacctgggatcaatagaagggaaatgttcaggttaagataaaagattgtggaggctaaggttcttttgaagtctcatagtggctgcccttagagacaacagatgacaaattgtttcctattcagacctttaaaaaggtgctagactcttaacctcttcaggattgggagggcctggaagaaaaagatcttgttatgttaatagagattctttacaggggcacattttcccccacaaaggacacctttgcagggccatttcaaggtatggcaaagaagcatgttttgggtaaaatattttgattttcttccttgtctcatcatgttatgccagagtcagtttggaaagcaagtcacgatatatatatatatggttaaataaaatccatctgatgagaatttatggtttgtaggacatgagtccccagaccccttagataggaatgtgggcaagataaaaaaatcaaggcttagtcctcacttccaatacccagaattgtacgttattgatggtgatgatttgaacaattatggtgatggtttaaaagagagagagaaagaaaaagaagtgagtttaaagaagaaaataatgataaaaacaagaagtgactggataaaactcctattagcagggtcaacaatggaaaaaacttgtgcaccttggaatacttgtttttggtaagcttcttgctgtacccacttttcttctcctaaattgtgcttctttccaataatgatgtttttcatgggggctttgaaaggtttggatcctaagagtacagagttactttggaacgcttcctgaagaacttgggggctgagccttcttgctccctgaggagggcagactgggagccgctggcatagatttagtctgggcacctcttggagggcggactgggaaccgctggcatggattgagtctgtgcacctcttggattattagtctgagtctgctggcctttgctaggtaaacagaaatctggtcctggtggaggtgaagtctgctcagagcttgcaatgggcacagaatgcatctgaggccccagtttggggactgggatatctcaaagcaatccttgggtggccacactgtagtctgaatttaagagaaaaaaaagtaaccaagtaggaaaaaataaaacaaaacagaattactgaataggagagagagcaagagaaagaagggtgaagggaacagaaaatgaccgctgattccttgcacagcgggagacgccgcccaggctccctcaggtccattaccccgtggcaggaactgggcttttgaagtccaagttgcagcctgtctagcctgttctcttttgctctaaacttcagtaaggtcttgtctgatgaaaacaacaaaccaacctaaaagtatgaacaaccttagagtaactgcattttggaagagaacttttaaagatagaaaagcttttaattttcgaaggagcagagatctacagacaaattattaggtccagtcactagcccctctgtgaagcttcgcagcactttctgctgaagccgccttcctgttttcccacagaaaggccaggacaatgggacagtggtggctggcatcactcaggctcacacctgcctctgtcagctaggtaaacaccatgggttgtcttctctcacttgatggcagttaattggtaaatccatttttctacactttcataggtagaactattttttcttttgtacttcaaggactattggatgttagagctctgaaaaatataatatatattttaaaggattgaaactcagtgaaaaggagttcaatatccttttagaaatattttggggctgggcatgtggctcaggcctgtctgtaatcccacactctggaaggctgaggtgggtggatcacctgaggtcaggagttggagaccagcctggccaacatggagaaaccctgtctctactaaaaatacaattagccaggtgtggtggagggcacccgtgatcccagctacttgggaggctgaggcaggagaatcacttgaacctgggagggaggcagaggttgcagtgagacaagattgtgccactgcactccagcatgggtgacagagtgagactttgtctcaaaaaaaaaaaatttttttttggtattttatattttaattaaattgtgaatgattttgaacatatataggagttaagtgtttttaaatatatgtttgtaaataaaaattatgatgttgcctggttccttttttggccatattatcacaatcctaaagagggctaagatgtaagatggactccagactagactacacacagactcaaaactttaaaatattctcttgccttcttgaggagaaggaatcctaaactgtaggatatctacttgtattttaaaataaaaatacaagtttgtcataacaaagtattaatgtgatgaagtggcaagaaaaagtaaaacatcaaataaaaaataaactcttacaactacctccttaaaatgatattgaaaattattataaaatatgcatcagtagctaccataatgaaacccaaaacttagaataattttcattaactccaagaatcgacattcttactatcttctgaatgatgccacaaatacatataataacaagcactgtttgaatgtccttctaagccccacatactaagcaatgaacttcctaggcactgcctcctactcagcttctaacagcaagtgaactgcagagctgagattcgagccttgaatgacaactgagctagactgttgaccacagacatcctgcctcgaaatgtgagtcatgtctgaaaatcaaatcagacctggttaactcctttctgaatcaagacaagacaaatataaaaatgtatgaaaatattagaatataaaaaaattgaacaagaccaactagtttgtcccttaatattttttcacactaaagagagagtatctttgctaggctcatcatagatgaagcttctctattaaagagtatttgaaaaagtaactgaagtgcattgatttattctagaattgaactggtcaaaaatgaagtcagatttatagacttcttaatctttcttttttataaaaactgtccaacattttgttgttttaaagctaaaatgtaattcttgattggttctgtactgacgtggtattaggcacttccgaaaatagctgatttgtcacattgcagggaaatttaatttttgaataattttctccatatatttgaccatttgccctcatatttttttacaagactttataggccaatttttgtctttacaagattggattcaaaaagataactagaagttgaatgcccaagtctatttcatcattagcattcagacaggaaaaatatctacccagcatattttatgtttccattttcattttggaatgttttaaactttttcttctaaaagtaactaagaagttttaagcaaaagctatgcaaacacaggaggctttcctgtgaaaatggacctcagctggaggcactccaccaccaagcctcctccaggtgggtcagcgaagggagatgaaggaaacgcaaattcaaactgctgctgaggtcggtgggccctttgtgttgctttgactgagttgacaggtggagtgtgtatgttgtgtgaggtaactttaaggtgtccatctaaatgcaaggctcatctaagcatctgaaagacaaaataatgaattggtggggagttatctaaggaggacaagcctgtctgagggcataaccccacttccagtgagcctttggtcaatttgtatgtgaacaggatcttctgcctttcttatagggaagaattctgtgacgagttggcccctccttgcccatctgagagcccattgtgcactccctcatttaaaatagcagggtgtgacagcaacagatggcacccagaaaggaggcgtggcgagaccttccagcagacagcaaaggaagaaggtccatgggctcagtgtccctcaaaactaacatccccaaaaagaccggagagctggcgaggtgacagccatgctgctctttctaattgcaaacgtttgccagtgagaagaaaaggaattagattaggttcagcctcatcgcaccccatgccataactatttttcccattaagaaaataaatgtttcaggctgggcacggtggctgaagcctgtaatctcaacactttgggaggtcaagacgggcggatcacgaggtcaagagattgagaccatcctggctaacaaggtgaaaccctttctctactaaaaatacaaaaaattagccaggtgtggtggcgggcacctgtagtcccagctacttgggaagctgagacaggagaatgacatgaacccgggaggcggagcttgcagggagctgagattgagccactgcactccagcctgggcaacagagcaagactccgtctcaaaagaaaaaaaaaaaaaggaaaataaatgtttcaaatccttgagaaaggtcttaaccagggctagccttatgcttgtgtgctgggcagtcatacgctgggtttgagcctcatgcttgtttgctgggctccacgctgggtttgaggttctgtcaccgtcttggaaactttaatatgcttgaaaaacaggccgtgggtttttattttgtactgggtcccacacattgtgtgaccagtcctgtctaagacatccacctttagagatggcaccctttggacactgtttaaaggttttttttttttctcagtctccttgcctcaaatcagatctgccccagctgtgagtggccacagccccaacacacagcactctgttcctgccttaatcctctcctcactcccctcaactaaccaaccccaggcctcttccagtctctgcaacactgcaaattcaggggttaccaaccagggcagggggttgtagttggcctcccgctgtccccttcagtgcccaggtcattggcaggaatggggatgggacatcttcagcttttgaaagctcccaaggcagcacctacctacgtacaccccagttgcaaaccacctccccgtccactctccagtctcgtctcgggctaaattccacccaggtgaccccagtctgggacatggacattgctggttgggagtggtctaaaaaccgtgaggctggtctcattgactcgacctttactttcctcagttcatgttccataattccagcacagatttactacaccgtggtctctcctgggctgtcccacaccagcctctccagcaggcaactccccacccctgcttgcctcctcctgctcctccatgagccggggcgggggtgggggcaggtgaagtagaatctggtacaactgcttaattagagtgggtagctaggtatacaaatgtaaaaaaaaatatcatggagaaacttaaggggaaaataccccacaatagcaatctgaggagggctgagtgacaatcaaacaaaggtcccttccgtgttgccccattctgctatgaagtaggaactttcctagctgcactttacagatgagaaaactgccacgagtataagaagcttgccccaggtcagagagtgagggtggaatggggacatggatgcaggctgccttggctccagacgctaactcctaagcaccatgttaagtcatggcaccaccagaggggtggggatgaacaactttgcctttctggcaccttttctttcttatagatgcatccatgagccagtatctagaggcggcaatgcaggaagagccagaaagcaaaggccagaacccactgttcaggcttgctgcaccccaaaactcttcacagcaacattgagtcctagttgtgcggcctgccagggtgtttgctgatcacttgtgaaaactaggaacatagcgggggcttttcaacatcgtatcagcctgtgccttccaacatcataattgaggaggaatgaagcatatttgttctataataaaacaggttaatataaaattagatggatggaatataattctcacaccataaaatccaccttcattgaagtgtttgtcttatgagtttcagaacatccagagtcatggccgtggacaccgctctcctggatcccgtccaccctggggatgtgctgtcccaggctgcttttctccttctctctttggcatgtttcacctgccatctgtctgttctcccaaagccagcacacacccagaccattctgcctgtgacctctccaactcagtggcagggcaaagtgcagcctccaaggttgggcttccaaacctccgaccacatgacctctatcaactcatccaggctcatctgctgctgcgttctcggacctgccctgagacccagcccagagcaacactcagtgttcctcagctgcggtgcctcctctcccaccatctgcctgtaattgggtctcattttctggaatgactttcccaacagcatttctaggccagggtggacttcatggtccttcttcaaccctgggcttctgtccagatagcactaagtagataagctctttctaatgtgtctcccttccatattaacaagtatgccagcaatacccttattctcttatttagactatgctttgctttagaatgatgacttttgaacaatagggaattcttacttttcctgtgagcagaactcaactcagcagatccttcatttctccttgaaatgtgtgcttctgatttccaggacaccactctcctggatcccttccaccctggggatgcgctgtcccggcctgcttttccccttttccctttggctctgaccacagagtgttgcaggcctcagaccttagaccttgacttttctgtctgttcattctttgttgatatcatctggtcccatgggattaaatatcatctctacatggatgactcccaaagcgtatttctagactgagactcacctctgaacctcagcctcatagattcaatgacccacttgacatctcgactgagatatctaattggcatctcaagcttccccgtccacagtggaattctgtgtgtttcccataagctcaaaacccttagaccagctgccaaaccagaaaggtgtttgactgtgaggagtgcatcgagggaccacaggatggagcccaggatgaggcttccaggtggaacccataaggacctcatctcttcccagctcgtcacacccagccctgcactgctcctgtcctgggcacagactcacatggaaagctgaccgcactatctgttaagaagctcctggtcttctgtccttttcttgttatctgaattagcaaaaaactctttctttttggggatagtggttcaaatatgttcactaccattgttttagagctaggcgaattaatgttcatgatgatacccatgaagttaaaacccctgcatcatgtactttttagaaaggcctttttcactgaattatcaaaaacagccgtagtttaaccaatattttgccctgatttatattatccagaaaaataattcaaaaggaattaacatgaccttctagcatttgtcagaagttgtgctctgtgatttacatattagcttgttcaattcttcagatattctgaaaggcagatactattaactccatcttgcagttgagaaaatagatactcacagacattaactaaattgcccaatgtcaagtagctcataacggctagtaaatgcctagggttgaatataagtttgttgatgttcagaccatgtatatctctatgcaaggattacagataatataatcatcatcactatcatcagtataatcattacctacataaaagacagggcaagggggtgattctgtaatatacattttgtatcaggtttgaatatctgataaagtcatttagcttcataattaccttaagagcacaaagatgcaaaagtccatcatatgactttcaaattggcaaaggtgataatattaaaaacctgtgcaacaggattataataataatttagctagccacatggttacttaccattgtgttagattttgaatactgtagtgaatgaatgtcttatccaaaagcaaacattttttaatactgttatctaattaaatagttaagatttttgctgaaatcagcaagacaaattgaactttagaactggaagaaagtttagaatttttttgccaatctttttgattttatagaaaaagtatttatataaattcttgagttgaaagattaaaagcaaaaattttaagctaataatataaattgcagtctagaaacccactttgtctataaaacattaaaatagaaccatttatataacttagcaggtataaaaaggtttcaaccttaatattacagagaagagctataaatacactatttcatgttcccccaaacacctgaaaacttatgaaaaactatgttatttaggttgcttcttttcaaggtaacagggaagtattgattatttgcccagccaatacaataaatttgtgctcaatattagcacatattaacaatctttttaaaaaatacaggacaagggcaagttaataagaagaaacacaagcagtagagaaggatatgaagtgaaacacgggggtcttccaacgtatccagctgagctcctggctccgatttctcagcagcaaacagccggttgagaactcagccaggtattttctatgcctttacaaatgtatcactctgtgtatacacatacatacataaatatacagagatgtgtttatgtttatattaggcattttacatatctaattacatatttaacataactatcttctctatacaaatagaatcacattattccatacatttgaaatgagttcttcatatacaaaaatgatatctttattaacttttctagatctgcttcattctttttttaaaaaagcacaggatccctatatataaaaataaatatttactcattctttctcctacatttgaaattttggtggtttccatgattttattattacaaagctggctagcacaatgagcatccctagccacatattcttgaacacttataaagatagtctcataggatttctttctttcttttttttttgtgtgtggatacagtctcactctgctgcgcaggctgaagtgcagtggtgtgatcatggctcactgaagcctcaacctcctgggttcaagtgatcctcccacctcagcctcctgagtagctgggaacacaggtggagatttctttttttttcagttttttgcacagatggggcctcactgtgttggccaggctggtcttgaactcctgggctccagcgtgcacccactataggcaaggcactgtgttcagaattctatgtatatgtatgtatatgcatatattatctctaaaccttatgccaacgcaagcaggcacacaacatagctgctcccatggtgtgtgtaaaactgcacagctagtgagggctggagctgccatctgaaccagtgtgcatctgcctcccaagtctttgtcctctccaccgaaacagaaaaccacatttacaattttattatttataaatccttccggtgaaaaaccatttgttttaaattccttgcattattaagcagagaattttacttgaaatctcctttacctttatttttaactgtttactcgcctaacatagatttgacttcaaaacaattcctcttttccttcatgtaaattacatttcagattctccagtgacttgtcagtagagggagccttaagatgcatttgacaacccttttatacggtgaacagtgatctctcaacaggaaaacatcagccagttgaatttgttttataatagaacaacatatttatagaaaggataaggaaaaggcaggcagctgctgggttcagcctgtgggagaaaacaacctacaaagtgctcggtgaactcatccctcagctgcagcgtctgtttccttagcacttccaaggtacagtttccttttgctgggatgcaacttcaagctcgaatttctgaaagtaattcattaggatgtatgctaagtaatatgtgacgcctgttccctgtgagtttattgaccagctcaattcaggattatgaatcgccaatgtacttagaacacagaattcttgttcggtgactattatgggtcttgctgagttaggatggtagccctggccaactccctgagctctgccatcgccactggcaagctgcatgcctgcaaggtgacatgtgacagtgtcagcccgctccctacccagacgccacgctgtggaaaatccacttctagcagcagcatctgggctgtcagcgggctccaccggcaccaaagctgacagcactgatgttgccgggggctctgtctcaagcgggctgcacaccacgctgaaagattccactccaagccattttcccagtcttacctttgatcctcagctatttgcatatttttataagcttaggtggagaaaaaagcacctgttcaaatacctccaagatctttctgtctttacatttctatggtggaaaatgaggtgccctgagcctggacaggagtcaggttccatggagcactactgtgagacggctgttcaggccacaccactggcccaggcagacagaccacacgaccatcagggaacttacccagcccccacccccagactcagggcatagcaaaggtgcttcgcaaatacttcaaaataggaatcaacattatccaagttattaccctttccagtccttttcaactgcaaacacagctttcatttcctgctttttatttcactggttcccagactattgagctggattgggaaaaatattaacagctgaatattaaagcatgagagaagtaagccccactgtaggatgacagaagggagatactagttattctgccctacccatattcacccattcattttccgtctgtctgtctgtcatttgctaattaacaaagatttgtaggttgattgcagtctgtctattactaattaacaaacatttgtaggttgactgcgttactgcctaagattttcaaggctcgttaggcaaaaatggttttgtttatttttttaattttttatttttttgagatagggtctggctttgttgcccaggctagagtgcagtggcacaaacacagctcactgtaacttcctgcaacttccacctcccaggctcaagcaatcctcccacctcagcctcccgagtagctggcactacaggcatgcaacaccatgcccagataatttttgtattttttgtaaagatggtgtcttgccatgttgctcaggctggtcttgaactcctgagctcgagcaatccacccgcctcagcctcccaaagtataggcatttacaggcgtgggacaccttgcctagccaaaaaccaattttttatatatataaaaaaagcatggaacaatgacaacttaaggactctaacaattggatttccacgataactcctcccagataactcctctagtcttatatttagtctttgctcatttgttttgttctttagattctggtttggtttgatcttaaaagtcatcagaacaagcaacggattattgtggttcttctcagagagatgcacaagttctgtctgaactcaaaatacctaaaaattgatactgcaaaaccacttaacaataaaggaaagtttcattccacaattatgcaaaggcttcttttgcaaatatccctgcgacagagaacacaatgagaaataggcaagaagatgtaacttgctgattactgaattccttcatgaaagagtgaagaaaggatgcattcagtggtgcagatggctgagtgcataacaggtaggtttggtgaagaggggacagtcagcatccacaggaagaaaaggcagaaaaggagaggtggggtttgattgcaacaagcagctctgccctccagccgggaggcttgggtcacctgcagttactgtgacaaacacaacaagaactcaagtgtgccaacttcctgcataggcaggttctcctggggcagctgccagctatgggctttactttgtaagtcagcattccatggtggaaaaggcactggacttgaagtctgctcttctacccacttcattaatttctctcggcccaagtaggtgcctctgtagcatgggtatgacaattacttctcaaggcttctatgagtttttgaactatggacaatatgtgaatgttggatgttattcctgtgcccagagtggcaccgtcccatccatatgaggaaggaaaactcattcatttcttcacacgactcctcggacaaaggactcttcctgggagctacgataggctttagggatggttggacacttatttaagtttaaggatgatgatatacatttgaaacaggaaggcagtgtggagcaatgatgaagtgactacagacagggcaggcaagaagaggtggacttcagttctttggctgctgactgcgctgtgacctgccctcaggccctgcgtcctcatggctcccttctctctgattgtactgcctctgggttgatatttccacctaagttgtatttcttatcactctggaccttcagaggtctctgtgaacagaggacagccatagaatttagcttgaaaaatcactgggccgattggatgtaaaaacgttcaggaagcccctgactcagggcccagcctgcattaagcactcctcaacatcacataggcattccctgaaggtagcaggtgctcaacgtatattttctgagtgaatgaatgaataatatacacattttttaagtcgcacatttcacatcttggaaatcttggagaagctattttacagacctgagctttccaaggtcagatgatcagcgagtgacagggccaggagggtccaaagagaaaacagagcaaggggtgccaggacgacaggatccaaaaaggaagcagagcacggggcgccgggatgtcagggctgagatgcgggggtgtggcctgccacgtctcatctcagtcctggagaccaacgggctgcgggagccctagggttgcgctgtgatgctaaagagctgatgtacccagtgcccctgcggacctcgcctgtgtcttggaggccgcctgctctggctcctgaggggtctacacatctcacagaccctggggtgggatggggcggcctctggtgtctcaggacactcgtgtgtccctggcacagaaggaagaagaggaagtggccatccagtgcacatgatacaatgagaactgggaatcatgactcagagtcacctgtgagtgtggttgtaacaagagagcggaaccagccatatcggcaccattgtcagacaggaaatgaacccaaggtgggctgctgcctgggagggtcagcaatccattttagtagctatcatgttgaaccaaggcagcccctgtgggctgcaagggagtccagattctcaccctgtactggcctgccaagctcgtggcctttaactatgtccagccacagtctgaaatacaggagaaacagccactgctcaagggtctattttcttatggggagtttgtttttgtgtttttcttcataaggccatggcaggattgcgggtatacctggcactgatcttataaccaggcttgtagctcttagataagtccatgcttgttttgtataataaaatgtgaaatcaatctactatgaaagtctattcagtgcattttaaatggcaactcacatttatcaggtcaagaagtgacatttgtgaaacgcacagtctatttgtctctttaatgtacactcattattctactccttaaaaattggaattaagcatgaaatagggaatcagaataaaattcatacatgttgcccttttctaaatcatttcaatttaaaagaatagtgttagatgagcttataatttcacacttgtcttggctttcctgctctgaagatcataaaaaagaaaggccctgattatagtctgcagaataaagacagtgaagacagacgcacacatttgtagggtgcggaattcagaagtttctgcgattgtacaaaagtgcttcaaacaatgcatttaaatcaaggatagatcttgcaaagtttgagagattatctttggatacataatatatacctttgctgtttattaatgcttgagccaagaaggttacagacaaagacaaagcagtgtggcgtggaacccctgcagctcaagttggcaacgctgctttgccttgcctacaaagtcaacagtgcctcccagagggcctacttcacctaaaactgtagtccttccccatggcaatctttaagaggcagtgcattaaaagggttatagaatatcctgacttgaattactgagtaattctctggttcaaatctcagcatgagaatatgaagttctactcactgagcttggtaagttgggagcttggagaactcaagcaaaataacataggctattatttaaacaggctctgattgcactgtgttcatatgttgaaatagatgagtgctcaggcctcactgcactcccccgatgctcacgcctctggtcatctttccaaacccagcctccagctccccttggcctgcggtcctttccctctctgctggctcctcaccctggacctcccctttttcactttccctttctttctgcctcttccattgtctcttgtctgcctgccaatgcatttgtcataacccaccaatttctcttctcttccaagctagatttgttgtggcaaccacaggttcttcttagaggggtgtctgttagctggttagcatctccctcacatcctcccttagaggggtgtgtgttagctggttagctggttggtgtcttcctcagagcttccccttagaggcgtgtgtatagagggctgtgtgtagctggttagctggttagcgtcttcctcagagcttccccttagaggggtgtgtgtagaggtgtgtgtgtagctggttagctggttagcgtgttcctcagagcttccccttagaggggtgtgtgtagaggggtgtgtgtagctggttagctggttggcatcttcctcacagcttccccttagaggggtatgtgttagctggttagtgtcaccctcacagcatcccttagtggggtccctgttagctggctggtgtctcccttgctcctgggtctcttacctccagccctgtgtttattggcactaactctggacctgtgtttcccacagaggttgtatttcttggttcctctggccctcacattgcatgagtttgatttctcacccttctgccatattccatttggcaagagtgaacacgcagcccctcctcagttccacacactgtacactgaaatacatcactgccttggtcatgtactaactccggctgactggctgatttccatggtgaaattgtgaattcatagtgttttacttctatatttttataaggtacgcccctccctcatgtactcttcatttctaattaaaatatttctctagcatcaagaaaatgtggttgtgaatggcttttactactagtaggctgaggagcagctaatatatttttattgaaaatccaatagtttcatttgcattgcatctgaatttttgagacacatagataatagcgtatcattacccttcatattcccaaaggagcccaagaatgaacagattacgaaacaacccagtacatcacaacccaacccattacatcccaacccaacccagtatgtcacaacccaacccagtacatcccaacccaacccagtacatcccaacccaacccagtacatcccatcctaacccagcacatcccaacccaacccagcacatcccaacccaacccagcacatcccaacccagcccagcacatcccaacccaacccagtacatcccaacccaacccagtacatcccaacccagcccagcatatcccaacccagcccagtacatcccaacccaacccagtacatgccaacccaacccagtacatcccaacccaccccagtacatcccaacccaccccagtacatcccaacctaacccagtacatcccaacccagcccagtacaacccaacccagaccagtacatcccaacccaacccagtacatcccaacccaacccagcacatccgaacccaacccagcacatcccaacccaacccagcacatcccaacccagcccagcacatcccaacccaacccagtatgtcacaacccagcccagcacatcccaacccaacccagcacatcccaacccagcccagcacatcccaacccaacccagcacatcccaacccaacccagcacatcccaacccaacccagtacatcacacggcacattccaatattccttcagcctgcctcaaaaactggtgaagactcattggttgtcctttcttcttcttcttcttcttcttcttcttcttcttcttcttcttcttcttcttcttcttttttttttttttttttgatggagtttcgctcttgttgcccaggctggaatgcaatggcgtgatctcggctcactgtaacctctgccttccaggttcaagtaattctcgtgccgcagtctcccaagtagctgggattacaggcatgtgccaccacacccagctaatttatgtactattagtagagatggggtttctccatgttggtcaggttggtctcgaactcccgacctcaggtgatccattcatctcagcctcccaaagtgctgggattataagtgtgagccaccacgcccaacctggttgtcctttctttaaatcaggaagatgtttttgaaggacatgctcatactttcccatctcactctttcctttctggatccctctttgttcctcctcctcccttcctagctcccttcccttcccacctcattccgtctgaagatttcaactacccacaactaactgataaccagcacttttcacacaaccacagcaacctgtgaggagcatgaatgtgaaacatctttaccttgcacaagccaagttgaaaccagggcaggagaaaaggcccgttccttcacagggagcactaatgtctcctcgcatcactgtgctggtggtttggatagagaatggcagtatgagggatgtgattttgtatcctgaagtgccagacatcattctctttcctaacaaaaagcagtttttgtaagtgttttaagttgcttaaaatgcataattgaatagactttcctctcatggcctctttatccaaaatcccacagaacctcagtgagaggaagcctcccttcagaatgccagggatgcctcgcctggagcactcagtgggtgccaggcccctttacataaaccacttaagtccctaagcccctggattgggaatgtcctgcctccaaagagggggccaggcagcttaagtcattgctcagggtcacgtgggctgcatgtctgtgactgacagagatggcatctgcacctgggttctgcctcattgggcagctggggtctcctgtgaaagccacagacagaggcaacctgggacagcggtcacctgcaactcccctcgccacaccttggtacttgcataaggtaaagtcaggttgtttaaagagcggggcacacgtgcaaacaccacaggctttcactttccacattgaagatccttctgacagaaaggcgcgttatgattcctccataatggaaagacaagatcatgacacgttcaaagaagataaagtgttttaaggtttcttagttgaatatttttcaggatattgaatgcttagatttttctcagaaccagagaacatggggtcagggggtggtggggcatctgaattgctgtattaacttattgtaaggaaggtaaatcaaggtcattatctgctgttaggaagtcagtccttactgggaaacccatgagctgtgtgtctctgcgcaaggtaccctgctgtccgggcctcaactctttaatctagaaaatgaagatttgggactagatcaataatgttcccactggattcccagagagtggttcatttctgtggccacaaaggaagggtggggtcactgggtgcagtttcagatgtatctgtagtgcaaataaggcttcagtaaatatgcagttggagaaacacttcctcctttgacaaagtgtatggagattgtcgttcgtcacttgtttgagatccattgtgctgggtgacacccgaggagagttgttcttcattgtttggggaacagggaacgctaagggatcggcacccaccagcagaatcacagctgagaggtgaaacctgtgtgcagtgtatatctgagagatcctgcgttacaatctccgtgtaggagctctgctactaaagcactcttagagatcaacttgtgataaaaacgctttgtgcaatgcaacgattgtaagtgtagtaaatacatctctacatgttccacgataagcaggaagtaagccctctttgactaaaagctgcccttttccttagcagcccccatagctgtacacgtcccagtctctgggtagctgatctgtttatcttggtctcttgtgatgtggaatagtagcaggtgccagggtgggtggggcattgccaagagcctgcacaaagagtgagaactggttaagtgtcagctctccacatgccagctcctgggggaccctgacccagcctactggccacactgagcctggctcctgatctctaaaaatgaagataacgataattctcacttagtctcttacttgataatgcatatacaaaagcaatggcaattcgaaactagcacatgaatggacactaccatttccagtttagagccacccccagctcctcactgtggcttttgcagccaccataacataacatagaatgcccactggaaacatgtcaaatgtatgcatatgtgcacatgcacagacagacgggggcaaaggaaggaaaaagtgactctcaatgagacctaaaattagtccatgataagttgcctcatgaacgtttttacagactgataatgcttccttcacattcttcactattgtcacagtgcacatgggtggcaggtaacacactttcaatttcacatgcaggaaaattagtgaaacaaattcaaggaaagttaaagtattagagacatataagcagttactggttacttataggtgagctatgagtttgtttgaaaggaatagcttcaaactctgaagtcgggatgggcaacgtccttcggggtttacatgggggataggctctgtgatgccatgccgtcaacctaagactggcttgattatatccatttccaaaacctgctctcatcactgctgatagattccaaaaatattttcctctttctccccagtgggctggtttggctctccaaactatagcaaaccaataaaaataaacaacaggcaacatcaacagaaaaggcaggtgggtaatctgctaatttgatatttcatgaatggaactgagaggtgaagtctcccagacagagcagagagctgctgtggggagctcttgagtcttctctctgcccccgggtccccttgcactcatctcttttttctctgagtttgtgttccttttgtgccattctttcatccattctttttcctcctttgtctctatttctccttgtctcttactcttttatcaaataaaaggtaggccaggcacagcgactcatgcctgtaatcccagcacttttggaggccgaggtgggcagatcacctgaggtcaggagtttgagaccagcctggccaacatggtgaaaccccatctctactaaaaacataaaaaatcagccaggcacgtggcacagacctctaatcccagctacttgagaggcagaggagaatcacttgaaccaggaggcggaggttgcagggagctgagatcatagcattgtgctccagcctgggcaaaaagagcgaaactccgtctctaaataaataaataaataaatggtaaatttactatgtgacatatttcccaagtaaaatattttatcctttactttaaaaagtatggtaacacagactcatttttaaaaaaaaagaaatgtaaatgatcaagaaaatatgggatcaatggataacaacatggcaatagtggtcatttttagatggagggaatttggatcattatctactctttgtttattgctactttgaaatagtacataattacatctatttttatagtaacacaaattaaaatatacgttctaatcctttgtctaagtctccctaaagcaaacgagaaaacgataatgcagctcttacttccatatggactggaattatattatttgaacgtgacaattagtgtcgctgacatagcggtgtccacattttccaaatatatcatagctttcttcacacagaggcagccctgaggtaaaacacggtgtcactctccccgccagccccgcgtgccagcggccttagttagaggctaaggagcatatttctattcctaccactgtcatggagttggaaaaagggttccaattttaacaacttagatatatgtaggtcaaaagtcatgttgttcagaaccacaatcagaataatgccctgatttccctttcacagatgtgtccctgcgatttggggtttagcttatgagtgaatggtagctgccacttcacgtattggagagagacagagggaaaaataaagacaaaaaagtatcatgctgcaatatgttagccccttttatttattcttgatattggatgctgtaatggtaccaagaatttttttttgaatttctgaattttgtgtgttagtgaacgtgttaataaagtaacaagctcataggtgctataaccgcacgcttcctgccatatccaatgcactaaaaatgtgtgctcttaaaagggagttttaaatgtatattggtttcttgtaaaatacatcttttgtgtgtgtgtgtgtgtgtgatacatccaccacaaaacagaaataatcagaaaagagggaagaacaggaacacaatggggaagccccatgaagtgaatttgcctttctcgtttctatgaccccagcatggcaaacgctcctctctcctcagttctccggcactgctctgagctgcctgtccacacactgctttatgaggccaggaactcattgcggccctgcagaaaactcagctgggaggccacatgttgcactccagccacgttgcttttatttataggaacacataagactcataaggtagcagatacaggaatccaaatgcgtttctttcttatatttttgtttgttttttgtttttggattttggtgggagctgcaagcaagatatatgtataggagcataattcacagtagctgaaaggtggaggcagcacacgtgtccactgacagatgtacagtggactattattcagccttagaaaggaaggatgttctgacccattctacgacatggctggatgttgagggcattacgctaagtgaaagagagcagtcacaaaagaacagataccgtacaatgccactcacatgaggtaagactagtggtcatattcacagagacagaaagcagaatgctgggacccagagatgggtgtgtctagacacacacacacacatatatatagtactatatcccaccttgcatttagtgaagtgctcaatatacattgataggttgattgaaggaaaaaagaggaaaaggaagagaaaaggagaaggaggaggaaggcaggcaggaaggaggaaaaacagagaggaaaaggaaaaggaaaaaatgtcagaagtacgagctttcttcacttaagtaactggaagatcagagttcattattaggaagcttaaaaggtaaaacattcctaaaaatgagtccatgagtacagagaccagatccatctttttccctctgccaatctctgcaaaggagcgcaggcccagtaaatatctcccaaatggaaaaatgaggaaaacaaacatgtgacttgatccaatattattaacagagtgatggttaacaacacgtaaagcgcattccaggggcttagtataaactataaattttcaccacatattacgaaaagaacttgctgctttagctagaagaaaatgtcctgccctgagtcttttctccttcatcttttactcagaatttggtctcatgaagacagtgcctggcacataagagacgctctatcaacaaacattgcaaaaataaattagtcttccattcatccataagcttccatttatcaagcactggtcacttggaatactgtgggcatttcagaaagaagcaggcagggtccccaatcccatgagactgtgtatgcctcataagatgtgatagctgtcacccaggaggaaagcccatttcaaggagcattatcagggccacagatagtttttggtctagtgagtgggcatacacctaaatcacaatatgaagtcgaatatggctaaggagaatttatggcagaaaatcctgaggaaatgaagtacattcctctgcacaagatgtgcccaagttttagcaacaaacaagatggaaacaagacagaccagctctctaggaaggatgcagggttcaggaaggtgcctgtggaataggttttagcaatgaagaggacagaaacaagagagaccagctctctaggaagggtgcagggttcaggaaggtgcccatggaataggaggatggatggctatctgttgaccaaggggcaatgtcaatgggagcaggggagaatgaaggaagggccccaggtggagagaagtaccaagggagaggctgccctgaagttggaaaaccaaaggagaaatcagaagtgttgaagttgaggaattgaaattgtcttaagtaaaaatacactttattacagtttcctcaacaacaagttaaaatcaaggtttggacaggcatgtcctattttaaaagccctaagaaagtttaccattcaaagatattcttggtgaattcttttgcaaagagaacaaaatgatttatgtaaaataaataaccttctatacaaacttatctctcaaggtttatttacatcggactatacctttacttggcatctcccttaattgggacagtgggatttaaggttccccaacaaaacaggggcacaaactaattgacttcataattttttaagctagttgtgaagaagtatcatgccaaatcacaaacttccatggtacctagttgtgtataatgtagaatagagtagacttttgaccttgcatgtggcaggccttaataaacaccaggggccctgcagaaaagtagctgggaagccacatgttgcactcaatccacactgcttttatttatagaaacacataagactcatatggtagcacacgcaggaatccaaatgagtgtctgtctcatatttttgtcttttgtttttggattctggtgggagctgcgagcaaagtagtggagtcacttttggcatctgattgttagatgacacatttcagtatatgaagcaacaaggaggctcgaagttagcttccagtggaaagaggctcacatcactgaaaaatgttcaccctaattggcaaccttgttagcagccattccagcagaaagaccacatgcaggattggcagcgcacactgacaggaaagtttttgaatgactaaattccagacacatccaaaaggcaattaaatacagattccataataaaatactcacacaatcctggagaccatcattccaaatatgtttctatttcgatcatgcatgttcactcccataggaaaatactcaaacttatcaaaagatttttacatatcaaactacacacacctgcttttatgaaaagtcacaatctgggaaaatgctgaccggtctttgttgctcccaggtctttgttgctccctattctttgttggaaaagggtagttttcccaaagaccactcaatgtgggtttttgtttgtgtccatttgcaaaattaaacagtaaacttttgcaagattcttggttgatggacttatgagaagggaaaaataataatctcataaataaaaaatgataaaagtgtgcctcccacagtgctttatggtatgtaaaatacttctgaccaattatcttagtttagtctcacaacattctgcacagtggacagggcacataatatccccatattctaaatgaggaagttgagtcttgaagattgaacatcccaagtttcagatatcggtgatgaggcttgaagcccctgggagaagagaagcttgcaccagctcagcataagctgaactatcggaaatgagaggcctgctcaaactgcaggctccaggaacagagccagctcagagggcaggtgtggagaagaggggaaatggtggcagaaacacagactgacttgataagatgtggcccttggcaagacacgatacctccatagggtgactgaatgggctgccctgcagcctgcctgctccagccagcagtccaggttctccctgcaaactgacggctagagattcttctagctctctagccagccacatcacctgggagagctgagatggctaccatattattttgaggtccttattagaataaagatatggagaaaagctattttccctttagaagctatgtgcaacattgtatcctgttgtacattctaaatgatatgaagcatactcaacaggaatggacaattggtgtctagcaccccacttgcatgctcagattaacaacacagcatactcgtattacagtttgagaacagctccccagtgtacagattatgtaaacaaggctaactattgcaccaagagtgatttgttaaaataggcacaggggatgaaaaaataatcttgaaaaacagagaaaagattggaagtatgggtcggaattatggtggaggatgattaacgaccttcggcaggctccaacacctacatcaaagcatgtgctgggccgactgagagcggatggtgctgagccctgtagagtcctggagaaggaggtagaccatcccgagctctagcctactccaagacatgagcttgggaactccttgagccttgtgtttctttcttcaggagaagaaaagactagataagttaatcaagctttgaggcttggcaacatttaaaccaggaattcagcagctggtattatattttaatgctacttctacaactcattcaaagtgtaatgacaaaagaagaaagcaagatagcagagaggtgacagtgacaatcacttagcagtttccgtgaaatacactagcagcccccaggaatggaggctcaaggagttcccaagctcatgtcttggagtaggctagagctgaggacggtctacctccttctccaggactctacagggctcagcaccatccactctcagtcagcccagcgcatgctttcacataggcagtggagcctgctgaaggctgttaatcatcctcctccataattctgatccattcttccaatcttttctcatttttcaagtcagagagggatttggagatgctaggctgctggctgtgaacatggaggctggggctaggagctgaagcacacgggtggcctctagaagctgtaaggcaaggacagggattctcccctggagcctcccaaggaaatgcagccctgccagctttgattttagcacagtgagacccattttaaacttctgcctagagaactgtaagataacaaatttgcattctttcaaccactgtgtttgtgggaatttgttgcaactgccaataggaaactaatacaggctcgctgactgccctagttcagcctcctccacctgaggcacctggtatgttttcctgcaactggagtactactgaaagagagctagcagagaggtgacaatgacaatcatttagtaggttctgtgaaatacactagcagcccccaggagtggagagcttcgcctgccacaaaagagtcaggttatttctgagtcttcaatgcttttcacctgaagaagttcctcatcttgcatatttatgcttcagactttttcctgctacctttttaataggtacctggggctaggatggggagacagtgtggctgaaatgagctgtgtgtgccgcaatggaacaccatgagacgggtactgaatagaccttttataaaccccaaaagggaagaaagaaagctcatcagcatgagacaggggtccctgtacctgtgagggggccttttcttgtcctgccttcagacagctctggtgttaactaaatcgaagcaacagaggcttattgagtgcctactgtgtatgagtgattgtgctgttatttttatatacaaggtaattcacaatgcctaagtgaaaatcatccagaagaaggcatgtgattctgtgtaagataaggctacagggacttcaaaaaattgtaaaccttgatttacatctgaagatgagtgctaattaattttattgatcacttattgggagcctaagtatcttagcttttgccaattaaattacacctcaagtttatgaacatgttcaatgctttttaagaacatggggtgagaagcctaacatgtagcccacagagcatggaggctgagtgtcgaactcactggtgagcactgttgtgacttggacaattccgtagacttcataatgagaatgtaattgggtggtatgacctttggaaaaaatcagtctgtcaggagtaagttcctacttattaataatagcaatgaatggaaatggattaaactctccaatcaaaagatagagagtggctgaatggatggaaaaacaagacccaacgatctgttccctacaagaaactttacctataaagatacatagggagtgaaaataaagggataaaaaatgatatttcattcaatggaaatgaaaaaagcaggagtagctatacttatgtaagacaaaatatatttcaagacaaaaactgtaagagacaaaaaagatcattatgtaatgataaaggggtcaattcagcaagatgatataagaattgcatatatatatgctcccaacactggagtatccagatatataaagcaaatattattagagcgaaagagacagatagacctcagtgcaacaatagctggagacttcaacaccccactttcagcattggacagatctcccaggccgaaaattaacaaagcaacatttgatttaatctgtattatagaacaaaatggacctaatagatatttaaagaacattgaatggctacagaatacacattattttcttcagcacatggatcattctcaaggacagatcatatgttaggtcaaaaaacgagtcttaaaacattcaaaaaattgaaataatatcaagcatcttctctgatcacaatggaataaaactagaaattattaacatgaataattttagaatttccatgaattttacaaatacatagaaattaaacagcatgttcctgaatgtccaatgagtcagtaaagaaattcagaagaaaattggaaactttcttgaaacaaatgataatggaaacacaacataccgaaacctatggaatacagtgaaagcagtactaagagggaaatttatagctgtaagtgcttacatcgaaaaagaagaaaaacttcaaataaataaccaataatgcatcttaaataactaaaaaagcaacagcaaaccaacccaaaacttagtagaagaaaataaataataaagataaaagcagaaatacatgaatttgaaatgaataaaacaatacaaaagatcaatgaaactgtttttttaaaaaggtaaacaaaactgacaacctttagccagattaagcaaaaaagagagaagactcaaataaatttaaaaaaaaaggaatgaaaaaggagttattacaacttatatcacatatattcaaagcatcattaatggctactatgagcaactatataccaataaattggaaaatctagaagaagttgataaattcctagacacatgcaacctaccaagattgaaccatgaagaaataaaaaacctaaacagacccataacaagtaatgagataaaagccgtagtaaaaagtctagtaaagaaaagcccaggacccaatggcttcactgctgaattctaccaagcatttaaagaagaaccaaaaccaatcctactctaactgtttgaaaaaatagaggaaaagggaatacttccaaactccttctatgaggccagtattaccctgacaacaccaccaaagacacatcaaataaagaaaaatacaggccaatatgtctgataaatattgatgcaaaaatcctcaaaaaatattagcacactgaattcaacaatacatttagaagatcattcattatgacccagcgaaatttatcccaggattgcaaggatggttcaacatttacaaatcaatcagtgtcatacacaatatccatagaatgaaggacaaaaaccatataatcatttcaattgatgctgaaaaagcatgtgataaagttcaacatcgctttatgataaaatccctcaaaaaactgggtatagaaataacatattcaacataagaaaagccatgtatgacagactcacagctagtatcatactgagtgaaaagccaaagacttttctcttagatctgaacatgacaaagatgcccactgtcactgttgttattcaagatagtactgaaagtcccagccagagcaaccagacaaagggaagaaataaagggcattcaaattggaaaggaagaagtaaagtaattcttgtttgcagatgatatgatcttatatttggaaaaaaactaaagattacaccaaaaaatgattagaactaataaatttaaaaaataaattttgcaggatacaaaattaacatacacaaataagttgcatttttatatgtcaatgctaaacaatccaaaaaagaaaaaaaagaaaagtaatcccactcactgtagccacaaataaaaacaaatacctaggaataaaccaaaccaaagaagtgaaatatctctataatgaagaccatgaaatagcaatgaaataaattgaagaggatacaaaaaaataaaaagacattcaatgttcatgaactggaagaatcaatattgttataatgttgatgctacccaaagcaatctacagattcaatgcaatctctattaaaatatcaatgacattcttcaccaaaatagaaaaaaaaatcaaataaaaatgaattaaaggcttaaatgtaagacctcaaactatgaaagcactataggaaaacattggataaactctccaggacattgatctgggcagatttcttgagtaataccccacaaacacaagcaaccaaagcaaaaatggacaaatggaatcacatcaagtaaaaaagcttcttcacagcaaaggaaacaatcaacaaagtgaagagacaacctacagaaagggagaaaatatttgcaaactacccatctgacaagagatcaataaccagaacatatataaagctcaaacaactttataaaaaaaactaataatttgattaaaaaatgggcaaaagatttgaatagacatttctcaaaagacatacaaatatcaaacaggcatatgaaaaggtgttcaacattactgattatcagagaaatgcaaatcaaagctacaatgagatatcatctcaccccagttacaacggcttctatccaaaagacaggcaataacaaatgctggatagaatgttgagaaaagggaacccttatatactcttagtggaaatgtaaattagtacaaccactatagagaacagtttgaaagtttctgaaaaaaataaaaatagagctaccataaaattcagcactcccattgctagttatacacttaaaggaaatcaggtaattgaagagatctctgcactcccatgtttgctgaagctctgttcacagcagccaatgtttggaagcaacctaagtgtccatcaacagatgaatggataaaaaagtgtggtgcatatacacaatggagtattattcagccataaaaaatgagattctgccatttgcaccaaaatgcaactggaaattattatgttaaaagcaataagccaggcacagaaagacaaacattacatattctcacttatttgtcagatctaagaatcaaaacaattgaactcatgaagatagaaaatagaaggaatgttaccagaggctgggacagtagtaaggggccaggcggggaagtggggatggtgaaagggtacaaaaaaaaaaaaaaaggacaaataaggcctagttatttgatagcacaacaaagagactatagtcaataataatttaattgtacacataaaaataaaagagtatagttggattgtttgtaacacaaagaatgcttgaggggatggatacccaattctccatgatttgattattacacattgcatgcctgtaccaaaatatctcttgtacatcataaatatatatacctaccatgtacccacaagaactaaaaaggaaattgagaaaaagaaaaattcagccagcataatttatccattgaatgtattctagttattctctttaaagatcctactctttaaatatataaagaaaaaaattaattatagcatgatttataattaaaaaatgtttaaaattagaaaatgttaaatagattatgatcagttctgcaaacaaaatattttgccgacttaatgtttacctggaactttaatggcatgaaaaatgttcataatgtaaggtgaagtatcaaatcttattaaatgttaatgtatatgataaaagctattacctctcatcgtggaattagatcattctgtccttcaggatacatttttaaggcacatatcctcaatcctcatttacaggtatgttgtgaaattagaggtgatttatttttctcttataattttctttactttctttaatttgcttacaatgagcccatattccttttattattagtaagataacaagataaactactgtataatgacctagacgtggagatacgtccgctgcagcccaggcttcactctcctgcccttgcaagtggtatcactccaccagttctttcagggtttccgcccgtgaatgccatcaccaatgctgtccgcccacgccacgcttccaggtgcagaaacctggcatgacaggactgtaccccccacctcctgccccactccagctgacttgtaccctcacaccctgtttttatgaagcgctattattccaaggaatgcacccagtaggcacctggacattgaggaagtacataagccagcaaaccaagtgtgctgtgtttattaacaccaggtaaattcagttttcactaggttattccaagctactagttgacagttgatgcaatgacaatagatctattacaggatctgaaagctctaatatatctgttttgaaaaatgccttattctcaaagaaaatttacccacaactaatacaagagcatcatttgagcatctaataagggccaggttcaatatgggaaaagaaaaaaaaaggaaggaaggaagggagggaggaggaagggaaggagaaagaaagaagaacgaaaagaaagaaagaaaagaaaaagaaagaaagaaagaagaaaagaaaagaaaaaaagggaacggcaaggcaaggcaggcaatggggaacacagcaggcatctaaaaaatataaaagatgaaatgagatttacctgaagttacctaaattttggccaggggaaaatgtaaactaaaattcagctgtccttgttaccgaattctccattcctcctctcaagtgttccagtggtggagagaagacaggctctctctgctgccctgtctcagccaactttcctggcttcgttctcaaggagggtgtccaaatggtctgacccaagctcctctctcctgtcctgcctctgcttacctctgtttgtcccgactacccttttaactttaaaattccccctgaataccagcccatgcttcaggttccaggctaagattcagccctcccatggcctctttctgaacccaggaaacctctcgggatctcagctccagccctggtctgtgtctgggcatgagtccacactgcccaccacaagctgttcttcctattgagctgcagggacggatgctggctcctccattctgcaatccaggagggactcagggatggctcctcagagggatcagtgcagaaactgctcttgcatacagcagaattcttattttaattctataacagatttctaaattcttgaatataaaagcaactataacaccacaggtgtgtgttgctggtagatgggcggggtgttgaagggggaagacagcagcagggagggcccggcatgcaaagctcccctgtccccaccaccaaagaccacatctccaaggctaaaggaaagaggccatcgtcttcttcatctgtcctcacctcccccacgaaaagcatccctgggtgtgctcagtggggtgctatatgtcttctaaaatgccttcccctctttcttcccccttatgtgaatttttctagaacattctggggcctataactttgtaaacaagatcattctctccttcaggacacctttttagggcatgtatcctgaatcctcatttacatctacagtcaaggaagtaaaattttttttaaaaaaataaaccaaatttctatccctcacttgaaagcctttattttcagttaaggtcttaggcaagtttttctgcaaaattttagagtcaatcaaagagaagaacatataaaaataatgtggcttttgctattgtggcacctttgaaaaagaaaaaaagaatttaaaaaaaaaagaaaaaaagagaaggaaacatcattgatcaccaggacacctgtgagccggagcgggctccactgtccagcctggtctccattccagctgcagcttttgctgcccccctcgcaggagcctcccttctctgggaacagggctcgctggcttccacacagtgacttcgccttgaaggtgctgaggagagcgttaggcgctttctctactcttccacctttggctgagtcagcatatgaaatttctggataatagtccacacagagcattgctcagcgggaaatctcagtaatggcgtggcccagagtcactgactgataatgtcttcacttctaatgctctatagggggaagggggatgcagttaaaaggaaggattgggaacgtgtttgtaaaaacgagtgccaagaagggcatgcaaagtaaaacacaggatcacggaagagaaatgcaccaaggaggctgagagctgagaggagaaaaaactcccagttcatgtgcaggaagcagggcaggagagcaagtgggaaacaagaagcagggcaggagagcaagtcggaaacaggaagcggggcaggagggcaagtcggaaacaggaagcggggcaggagggcaagtcggaaacaggaagcggggcaggagggcaagtcggaaacaggaagcggggcaggagagcaagtcggaatttcccggaaacaatcattccagccactgccactctcctaaggtctgccttcagcgagactgtgaattaactttcatcctaagcttatttaaaacatgttttagatgaaaagattacatagtttgggaaaaatgctccaaaatatacataaagacacacatatatgcacccccagcacactatgtataaaagataactaaaaccgaaggctccctgtgataagtgtgaaaggaatgttgtgcaccgtggccgtggcgttactcacagaattctgcactgtgcattgtgtgtatcccaaagagtatatggtaccttttgcagatttgcaacatataaggttttgcataagagtttgcatatatttgtccaatgcacatataagtaagcaaataatctacttttatatgagattcaattaatgccgttcatggggaaaatcttcaacaatgactgcagatcagacctggattcgggatttagagtcgaactccatcaatccatgaaggaagcagaggccctgggaggggaacaactcattcagcagctacaggatctccgggaggcctgggggctgggctgcacctcaggagactgtgatgggacattgatgtgggcattttccagaggcgctggagctgctgagagaagggactctagagctgcattgccgtggtggcctccatgctcctgtctccttatctgcacagtggttgttgtgaagattagacagattcagacatgtatgtttcttacagcactggctgccacatagatcaataaatcttagctattattagtacttagtattttgttttaaacaccctgaaaaagccatatagatacagaatggcaaagttccacagaaagatgcgaaatgttcattttttttctaatgaaagtgcttattgtcatctcctctttccatttttacttaattgaactttaatcttcatcacaagaatcacagcttgtccttctgaccaagaaaattgtcctccaactgatctaccatacagccccaactacttcccattttttattttattcccctcttccccaaacttttactacaaggaaatgatctatattttttctcgacttctataatatacatgtgccatattctttcctacataaatatttccagtttattttttgtttttatgatatttaacccatctgcctccaggaaatatttgaagtgatttaaaataaaagacatgtgaatgtttaatagttaataaaaataggccaaagggaagggtctatggaaagagataattttatagaaaataaatagtcttgtgattttaaatgttttgttttcctaaatgtaggaagtgatcctctttctccaccgaacaccatttatggttcatcctgcagctccccgtcctgacagcctttctgggctgcccgattacagggtgatttcttacccccctaaatttccaacacacactcattacccttccatctatgtcacgcaatatatcaggaggatattgggggggttgttagtttttaagcacaagcctcatcttcctgctcagccctaagcctcctcacatacaagtcttttgccccagaaaagggtaacggttgccctcagagcatcagagcagctgcaaacccacctagaagggaggggagaaaggagccacacggtgaaatcattctacgattttcactggaaattcaaattactctggaaacgatatttacatcagcccttatttgcaactggattttcaaaatatttgaataattttctaaaaatatgaatcacttgaacataaaacatttacagaatgaaggctgggccgtcatcctgtttttagctatttgtcgcacatacccgtgtggatgcctgcagtgacaggtacagaagccgtcttcatcctcatcacacccatgaccatattagactggctgttgtgaaacaaagcaagctctggaggccgtttctagtcccgctgctttctgccccatcacggatattgtctttcatctgggataagagcagtaacagcttatacctattaggggccagttgaagtgatgaaagttgtgaacaccttaccctttactgagtctgaattaattcatggcaacagccttgctttgctccctggtacttttctgcagctaccaagtctcattaaatagggagccatagcggggtaaaaggacaacttgttttctaaagagaaggtccacctgaccttgccacaggtggagattactgttaatcacctctgtaaccatcttcactcgcgtcgggccaaaacaagacccccggtgaatagacagaggctccgggctgtagatgtgagcacagtgttctcagtgctgacatggcacgctgctcaaagaggcgtgaggccaaactggtccgcaggccgaggccagtgtgggcaccatcagcaacttgaaaggccacacctgaaaggtaaaactattgatccagtgagcagcttaggctttcttaggaaagtgaataagggtttcagatcagcagttgtccaactgtggccacaggtctaattcaggtgccacctatttttataaataaggggttttaaaacacaaccatatcctcacaattccgtattatctatgctgcttagcgctacagcagcagaatggagtagtgggaacaggaaccatctggctctaaggtcaaacatatttactatctgccttttaaggataaagtttgtcaactactgttttccaccatttctctggaaacagaaatccaaagagatgctataacctttagaacattgtgcagagggaattcgaagaaactgagtgcaggacaataagcagcatttgggaatcgtgtgacagtacaaaatgctccttttttaaaagcgagagcactaattgcactatatggccaggtaatgctgacataaacatccaaagccgtcataagaagcaaaggcatagcagtcactatgtcagcagtgacaaatgggctgaggattgatacaggggaagtgcaaagcaaatgtctgctactcatgtctgttcacatgtatgagagtgtgcatgtgtgtgtaaatgccattcatatagccacacagacacacaggcacttataaacatgtgtgtagtcatacatacataggttgctgcctccttgaagttactgaaaaacagattttcaatgttccccttgcttcacctggagagcttagtgaactatgcattcctgtgccccacccccagagtttccaattctgtggaattggaatggggtccagaacgtccttgtctaagaagcccagctgatgctcctgtggctgatcagggcaccccactgagaacactacttgagagaataatcgccattcccgaattagtaggaccctctggatacctcctgtggagtgaaaattaattcaggtgaaacacacagcccctgcaatttgctattatgactttgaacttggggctcatattggaaatgactgacggttttctctatcgatgatgtcttaatgccctgggattgtttttccaggttggagccataaggaccttgaaagatccaatcttggctgcggtggcttatgcctgtaatctcagcactttgggaggctgaagcggttggatcacgaggtcaaggatgaggagagatgccattcaaggaacagaaaaccttaccagacaggaaaagtaagtcctggagctctaacgcacagcatggtgactatggtaaatagcactgtatcgtctatttgaaatttgctaagagagtagcctcaagggttctcatcactaactttttaaaaatggaactatgtaagttggattcctaggtattttattctctttgaggcaaggatgtgaaggacctcttcaaggagaactacaaaccactgctcaaggaaataaaagaggacacaaacaaatggaagaacattccatgctcctgggtaggaagaatcaatatcgtgaaaatggccatactgcccaaggtaatctacagattcaatgccatccccatcaagctaccaatgactttcttcacagaattggaaaaaactactttaaagttcatatggaaccaaaaaagagcccgcatcgccaagtcaatcctaagccaaaagaacaaagctggaggcatcacactacctgacttcaaactatactacagggctacagtaaccaaaacagcatggtactggtaccaaaacagagatatagatcaatggaacagaacagagccctcagaaataatgccgcatatctacaactatctgatctttgacaaacctgagaaaaacaagcaatggggaaaggattccctatttaataaatggtgctgggaaaactggctagccatatgtagaaagctgaaactggatcccttccttacaccttatacaaaaatcaattcaagatggattaaagatttaaacgttagacctaaaaccataaaaaccctagaagaaaacctaggcattaccattcaggacataggcgtgggcaaggacttcatgtccaaaacaccaaaagcaatggcaacaaaagccaaaattgacaaatgggatctaattaaactaaagagcttctgcacagcaaaagaaactaccatcagagtgaacaggcaacctacaacatgggagaaaattttcgcaacctactcatctgacaaagggctaatatccagaatctacaatgaactcaaacaaatctacaagaaaaaaacaaacaaccccatcaaaaagtgggcaaaggacatgaacagacacttctcaaaagaagacatttatgcagccaaaaaacacatgaagaaatgctcatcatcactggccatcagagaaatgcaaatcaaaaccactatgagatatcatctcacaccagttagaatggcaatcattaaaaagtcaggaaacaacaggtgctggagaggatgtggagaaataggaacacttttacactgttggtgggactgtaaactagttcaaccattgtggaagtcagtgtggcgattcctcagggatctagaactagaaataccatttgacccagccatcccattactgggtatatacccaaaggactataaatcatgctgctataaagacacatgcacacgtatgtttattgcagcactattcacaatagcaaagacttggaaccaacccaaatgtccaacaatgatagactggattaagaaaatgtggcacatatacaccatggaatactatgcagccataaaaaatgatgagttcatgtcctttgtagggacatggatgaaattggaaaccatcattctcagtaaactatcgcaagaacaaaaaaccaaacaccgcatattctcactcataggtgggaattgaacaatgagatcacatggacacaggaaggggaatatcacactctggggactgtggtggggtcgggggaggggggagggatagcattgggagatatacctaatgctagatgacacgttagtgggtgcagcgcaccagcatggcacatgtatacatatgtaactaacctgcacaatgtgcacatgtaccctaaaacttagagtataataaaaaaaaaaacattaaaaaaaaaaatggaactatgtgaggtgatagatgtattagttagcttgattgtggtatcctttcctaatgtatatatatatcacatcatcacattgtgtatcttaaatacatatagtttttatttgtcaattatattttaaaagagctgaaaaaaaatcaggaatatgtccccaaagtgaaaattgtgacctgaaaatctccaaatctttaggattaatgggaaaattaaaatcacattctgactgaccctcgtcttatagaaaatgtggctagtatcgatccattccagggagtgctaatccccctgggatggatgtcaaggtacgggtcatcccgacggcagatgggcttcaggattgggaatcctgggttggagccctgtcaatgtgtgtcgctggccaggtgtgctaggtcacattgtttaaccttcccgagctccagtttatttcatatagaaagaaaaagatgtgcacagcactggccaggggttctgtgaagacacagtagcctaatgtatgtgaaaaatgtttcagaaacagtcaagctccttcacatggctcttccactgcagcctccccagcccaggctctgacaatgagcaggcgctcattttacacacgtcttgacattagcgtggcctggctccctctaaacaagatcagagtatccacgccattccttagtgttttcagatgcactcaccgagcacggagattacattacagagagaaacaggattcacaatgcgtgatgagattttacacctggctccccgctgactgatgtgtgatgctgaaaaattattggctaacactgtctgtgcctccgtgaccccatctgtgaaatgggcattggagtaataaaacttgacaaaactttcctgaggatcaaatgagaaaagttttgtgaatagaacttcaaaattgtaaaggcatatacagacttcgtgcctattattatacaacaactctaagaatttttactgtatctcaagtgaaaatgacaggtttgactgaagaaccatagtgataaaccagaaactgaatgctgtgcttgtgagttactatttcacaacttctagaaccattcatacttctaattttgcaaggctgatagcagaactatcacctacttcagcctaagtcatctgtatcctgctggagcaactttgaaatttctttctttcgacctttctgttttacgtatttttttctatcttacagaagcttactttgctggtgaattattttttttttgttatattatactgagactctgctttattaaaatttcctaaaagaattttccctagatttcctttatttttattatcttcctctttgcaattggaatatatttcccagcccatgtggcacaatcacctgcagggtgtcttcagaatcggacactcagctggctgctcatcggtgacctggcctggtgaggagggtgatgatttctctgttttgttgtcatggtaatgtcttccgggacaatgctcctagcatttctcttgggaaattctgccagattctgaaacacactactctcaggagcctgtccttgatactttgttaacggtgttatttatcagattactcagagattgagcaccaacaaatcctgtctcaggaagtcttggttaggcaacatttgcctcagtccattgccccatgctcaactcaccctaccgcccttcctccctgctggggtgcatgtgtgtgtgagtgcgtgtgtgtgtgtgtgtgtgtgtgtgtatgtgtttccaacatgtgtctacaatagaatctccaacttttttgtttcacaatttctttgcattttgttgttcttaccatcaagtcaaaccagaaaactacatttctattgcacttatacactatgtcttttgatattgttgttcagttgcattataaatctgattacagtcttttagacaaatcggaaatgaagaaagaatattataaattaggaacataactatatcatctgctaatgttaaatagacacaaaattatctgaatggaactaagaagataattaacaaacccctgggatagccacagcattagtcctcccccctgttaggtaggaaacagaattatcttccattgccaagtcctcaaaacttctatcaatagggagttggcaggtgagatgttcagatttggctaatgaggcaaatagcagaatctggcaaaaaatgcatttatgttagaagtcaaaaagaaataagtaagagagtggtgcagatacaaaaacaacgtccacaattgaaaataatacatttgtggagatcttcagaccattaaaatgttaggcagtggcctaatgatgatgtgcttctcgtaaatggagactgaaagtaaagcctaagtcagggaatttgtgcttgtgattattagaacagtttctggagccagccaggaaggaggacatacactaggaacatccttcatttcttaaaagaataaaaataaacttaaaaaatacacagggaaacaaattgttggaatgagataaaactttaatacttaatgtttcccaaaaaggtaatattaaatttaaaaagtgcatgataaaatgaacccaactcaaattagagtcatggacattctatgatccatgggtgcaattgagacaccccttaacataacttcaggagtctggagtttttgtgtattttttacattttttcagtgttgaatcccaacagctagaatagtgtctgacacattgcaggcactaaataaatatttgtgaagtaggtaaataatcaactttggggaagaataatgaatgaatgaatgtgtgttttatctatttcttaagttctctttctggaattatttataaaatatccaattttgccataatatcctatcaagcaaaatacttccacaaataattatgattccttccagcctgggtgacagagaaagactccgtctcaaaacaaacaaacaaacaaacaacaacaaaaaaaaaccaaataattaggcagggcgcggtggctcacgcctgtaatcccagcactttgggaggccgaggcaggcggatcacaaggtcaggaggtcgagaccatccaggctaacacagtgaaaccccgtctctactaaaactacaaaaaaattagccgggcatggtggcgggcacctgtggtcccagctactcaggaggctgaggcagcagaatggcatgaacccaggaggcagagcttgcagtgagccaagatcgtgccactgcactccagcctgggtgacagagcaagactccatctcaaaaaaaaaaaaaaaaattatgattcctgcagctataacatctgacctgtctttgcagctggttggagcttttctagcccgcccaaagtccaaatgacttctgtccaattccaaataaagacatgtgtttcaaagcacagcatttttctttcgtagattatgttatgaacagtgatttatttggaaagaattttgatgtttttaccccaggtgagaggcacaaatatatatatatatataacctgtgatatatatatatatatcacaggtaataaacatctaggtcttcattggaggaaacaaaatagcataaagtgaacatataaaatatttttcccaaaaggcagggcaaaaaacacaaacaaaatttccagatataaaacacattgaaactaataactttaaaaagagaactatcattgcccttggagaaggtagtcatatttaattcttccctgaatgacaacatgcaacttccttttttgatgaattaattgattaggattcccataaacagtcttctttcagcatttgtgaaaatcgtgcatttataatcactttgaaaatggaagagaaggggaaccctactggcagagagcgaggagggccaatcacctcccagctccagggttaacgacgccctctgcttacatcccagaaacaaggggtgctgcacatatgcaaaacccggtcgcagaatgtattgcctgatgaaggaaacaattccaatgcataaatcaataaatgcctgaaccgtgtggcgcagatgaccttttggatgtgagtgtgaactatattcctaaaaaggccttttgcacacagataccaagcaagacaagggactaacagagcataactggtgctggggtttgcagcagtgcccgttgctgctgccctcctctgcctttacttacagcacctgtcagctgatgcagctcacgccccaggatcctggcaggtggcacagaagaggcccttttcccctctggctgagttcatcctgatatgactttggcctcttgttcacgactagacctttcaggatcctcagacgctcctggcatctgggagctgctagttggaggggccagtgactgtacccatttgctggacgtcaagcatgatgtttgcatcttgggttccctatgtgatttcacccttgcagcaattttgcaaggtgagttttatatctgtttctcactttaaaaaattggggtaacaaatctgcacattgtgcacatgtacctagaactcaaagtataattttaaaaaatcctataaagaatggaccgctaatacttaagtgataataatactgtaataataaaaatcttgcatttatagaaaaagaaattggggctcaggaaagttaacttgctgggccaaacatccatggtggcagggttagaatttgaaccttgactgaccctgaagcccaagttccttccagcacagcatctgaattaagcctggcagttttagcatcattcacttactctgtgtttctggatctctatctcatgcaagtctgactggcaaggactatgcatctcctgagacccagggtctctgcttcccactaatccacagcccagcgtggaaccctaagaggccctgggtctgatgcctttttctttatttgtgcgtatacagaacctcatgacatcagtagaaatagcatgctctgattactcccccaaaccccacccccaaaaaaaatcccagaataatactcaaatttgcaaagaatcatacttcctaagttactttatataggaatgaaagttaaaaaataggtcatagtgaagcattcacacaacctaataatcttaatcagctgagcagaacagtaaggcactaattctgcggggttggcttcgatggacttcaggttctgtgcaacgctggcccaagctgctcagagccatggtgctcagcggagtgtgtacactcctcctgtgggctgaggacgcgccacggtcccagcacagcacagtgcatgctgtgaaactaagacttgaacgtcagtggaaggtcagtgctgaagctgagtccaagcggccacgaatcgtaaaaatgtccagaggaattcagcactcctctaggagaattatgcaacaggaaaacccaatggacccaaatcaattcagcaactttttttaaaagcacttctcatggcaaaataccagaatgaatgttaaaggggatgcaaagccgagaaaaggagtgagtaagtaaaagcacaacatttggaggcagcgagacttgggttcaaattcctgctctataacttactggtcagaacatcttgagcaactaaaattcagtcttttttaatttttttttttttttgagatggagttttgctcttgtcacccagcctggagtgcagtggtgtgataatggctcactgcaacatttgcctcctgggttcaagaaattctcctgcctcagcctcccaagtagctgggattacaggcacctggctaatttttttgtaattttagtagagatggggttggccaggctggtcttgaacacctaacctcaggtgatccacccgcctcggtctcccaaagtgttgggattacaggcttgagccaccgcgcctggcccatcctttttttttttcctttttttaaatgataataatgacatctaccttttaaggttgtcattagagttaaataagattatgtaagtgaaacagttggtacatagcctgtgtggcatatttaataaatgataactttattattttaataagtgcgagtccttgagctcaaagagctgcagccagtggcatgtgaaagagaacacagtgagaactagacagtgggtacagaggggaccaggcgggccttcctcccgagtctaattgggatttgggatgatgtcggatggtgcacccgcggcatgggaagaacttcattgtttaagagcatgggccttgaggttgtgaccgtgagaaagattatttaatcttttggtaacatttccttgtctataaaatatggatattttatatggttttggtaagcatgaagttcaataatccaaatacatgaagagaagttcacggtacatagcaagtaatggagacatttacgtttgacaatgacaatgatggaaaagaagggcagagccttgaggctgatgggatctggggccctaaggaggcatggatggagggaggaaaacactgaaggctgtgagctgtgaaggtgctgcctggggagaggttttctaagcaatgctaagcaggactggaggtggcttagcctcccatagaggttagaaacagaatagctccgggtgcaggtctgcgggggcaatcagcagctgggcaaatgcagcacagcccttcacagcctgctgatgctgcaagagacattctgggagtttcacaagtatgacctcattcagtcttcacaatagctctacgaggcaggttctatctccattttataggttaataaggtgactctcaaggaagcgaataactccatgcagctccaaattgactcatggtacagcaaggcttttagctaagatctaccggacttcactgcccctgcctttcccaaaatatgacattgctccccttgggaatactcattccttgtgcaatggaaactgatggaatttgcatcaggagcagtggctggtttcacatgacaagacctcaatattcacacaaactgtgcagtgaggatgggagtgcctaagtcccaaaagggcttttctggatttgtgtggaagccacaaaggcccaaagtagtaaaaatattgatgggggtggggtggggtgagggaccacagcatttcgcagtggctccatgtgctacattaccctggctggaaccagttaggatatttaggatggcacaggagcagggagtgggccagggtgttgttacaggaaggagggatagtgatgatatggtttggctgtgtccccacccaaatctcatcttgaattgtagctcccataactcccacatgttgtgggagggacctggtgagagataattgaaacatgggggcagtttcccccatactgttcttgtggtagaataagtctcatgagatctcacggttttataagggctttccccttttgcttgcctctccttctcttgtctgctgtcatgtaagatgtgactttgcttctcccttgccttctgccatgattgtgaggcctcccacgtggaactgtgattccattaaagctctttcctttataaattacccagtctcgagcgtcttcgttagcagcatgagaacagactaatacagccagcaagctaaggagtacgtggagagtgcttcagcacagggaggatgggtcctacggccatggtgaaccagagcaagccaggtggggaaactgagccaggaggcgaatagaaagtgtgcagatgctgtaggggcagggcgtgcctgggagcagctgacgtctgggcaaatggtaccctgaaacacaaagtctgagaagagtgtttgagaaaaggagcaacagccctgtgctagctgctgcttcacagatggcacgtggggcagactttggcctcgcagtctcccttaccctcacaggaagctcaagcacaggggcctcgccctcacttccatggggaaactgaaactcagagaggtggagtgaattccgaagatccccaaacaggtaaaaagcggagcagagtgtaaacccacatgaaggcgtcaaagtgcacgctttagtatgttctagaaagaaaattggaggctgtataagaagcggatgtggcgatacaccatactgggggaaatgagggggatgaaacctaataaaggaatggacagaaaaaaaatgccccagatggaagcaacaggatttcctaaatggctgggttttaggagaaggggacagggaaggccgaggttgccctgcagttcaccgcttggtgggctgaagtgggaaggtgcaaccagctagcatgaactcagatgaaagaagagacccagtgtggtcagggtgtgctgagctcaaggaacgcaggggcatcgaaggagaaatatcctgcaaggaggtgcctggatccgtcaagctacagtcagggatgtgaaattcggctgtgaagatgagagttaaaatcatggaatggacaccatccttaaggcaagtatgtcaaataagaaaaaaaaaaccaaggacagaggcttcagaaccacatcctaagctcccacaccactcaagttcctttaaggtcacgcatccaatacccgctttgcatgtctaacttcaacattcattgaagatttactcttctaatcagtattaataaaagatgagattcggggggatagcagatgggaattccaaaatgctagaaacagacttataagataagatagagtttaaaacaaggtcattttccaattccatgcaagcccacatccatttgatgcatgtacttgtagactttggatagaaggatttatttcctgagtcgtaaataatcaataaggttttctgtcattgttaactaggcatgagggctaatgaaaagtatggaaataatagagtaatttacctctataatacagaaatttacttttcacacattttactcttaataatcagtgagatgaggggcatcattctttgtaaatttgcacatcaacatgggggaacagagtggaaaagagagaagacatgtaaagtgcaaaacagctatgattaaaatgcaaaatattttattttaaggtcagtttttccacatttagaccacaaatagcctatgaaaattattcataaatttcttatcctaaaaatagtaatacgtataacaaaagttgctgtttaacattaaacaatcagaaaaaatgtttgaaaacttttttggcctgagtaataaactcacaaatagaaatcaatggtaagaaagttcaactggaaaaccacgccaggaaatctgcaagaggagctccatttttcattaatttccaatatataacaagctgctctcactggtgtgtgttttcggcttgaagataacccgcggcagttgttaaccctgagctgccttccgtttacagaaccttgacaacatccctgcctcgaaatcaagaatcacatgtttagggaattcaaactcatttagttattagcctaagtaaaatattattatgaagataaatctgtagggaagagggaaaaacccaaacaagccattcacaaggcaaatagaaatgccactttgattaactcgtgttttagtgcacacctgagcaggtgtctctttgcggacattattatatggtgcacccaagcattcggggcgatgtgtagatttgtagctgtgtttctcttccatcagcccagtctcctgtgtgtggggtgcacccaggcctgggctggggctcagtgatcagggcctcccaaggccatctatcgctcaacactttctaaattatctggagataaagggtgaggatttttaaagattcccacacacttattttagactaattgttttataagataacttacaatactttttggaaatggccatgcccttgaatttgtattgagatcaaattgttacagaagcttctgtattctcaggctgtgcgcttctctggacatggtggtttacaaagaccttgtggccctgctcaactgcagcccacattctgagcagcaccgcaatagcatctctcagtgtctttgctctcttacaaaatgggggcacacttgccatctcatgaaggttgtgaaggttacaggaggtaacggatgtgagtgctttatatgcaggcagcttttaggtcattgctgctagcctggttcccttgctgactcccatcctacttctgccttgcattctctccacatgctcttccctccaagctgtcatagagattcccaaaagattcagctttggaagccaagtgccatctgccattggtgagcccagtaatctccagtagcccctggatttgtgctccccggcaagccctcacagctcagcctggtatcaaggctctcacgtcttgcttaacatcttgacccttttcttctctatagtgccttctgcctgaacgtctttcctccaatcaagaaggcagaatcacagtgggtccatttgcataaattcaatcctctttgattctcccagccagaattatgtcttgctattcccaaatcatacagtcctttatctctgcctccaaatctattcatgacttctgatctaatattagaaagcacatatacaacatagcacatgggctgtggactaatgtttgtgtctctccacaattcgtatcttgagcctgatgtgatggtgtcaggaggtgggtggggcgtgtggagagtcattaggtcaagagcgtggcgtcttcatgaagggactggtgtccttttaagaaggaagagagagccagctctgcatcttcaccttgtggggatgtggccagaagagactgtctgcaacccagggagggagccctcgccacacaccagatgtgcaggcaccttagtctggacttcggagcctccagaactatgagaattgatgcctgttgtttaagccgtctggtagttggtgccttgtggcagcagcctgggcagcctcacacaatgtttgtagacagcaatggactgagagctgcctgcatctgcctcatcacattcctttagtcatgagcttgctgtcttgtccagtcacatgaaataatttatcccctttgcaaatctatctgtgagtctctaccatgtgccagatagagggatggatgaagagggacagaagggaatgatctgtcactgaatcagaggtctgttccacttgagatttgcccccaaaaatgacacacgagcaatgaaaaaattacagccaatccgagcaatgaaaaaattacagccaatccaagcaatgaaaaaattacagccaatctccctaattggtactcaatgtattcagggattctttaagtgtggccataaaaggacattaaggacaatacataatcaagcaaaagtagttaataaagaaagtacagcacagtctctgcctgccctggtgctcctgccccagctcagtcaggatgccgtgccccctcccagccagtttgaggctgcagagatgtcaccgagactgagcaaagcagtgccgggcatcctgctcatcatgaccttcctctttaaaaatcggctgacgctgactcttgtttcatttcttttcccttcctggtcatgttgtcgagtttattatgtcagaatgtacaaactccttacccgtgtcaaggatgtggttgcgtgttcttcgcttcctccttccggggagcatgccgcggccttgctggctcgagaggtcccgtgtctgtgtgtgtacacatgtgtttacggattctcaccatgaatcacgtctgcagtgaagggttctgacatctagcaaggaactgacaagtaacccttttgtttttctctgtctcaacagtctggccaggtcacagggggacacagtgccaacaacatggatttttaaattagaatttgaggagctccccgcaggcatactggctcagttgcccacacagtccaagaacacccacctgaggaaggctttatggagctctctcattttgtttattccagttaatgaaagacaattcttacattcctaaaacaatgttcacacacatcagccatgatgtgatatgataaaggatggcttaaaaagctcccaccccattcgaatggtgggaatttacactgcaggtcagtttgtctttaaatgcagatctgtctgcacgtctcctagagggaacaaacagagcctgccagccagatggcctctctgagccaaggcgctgaggtcatctggtggttctgggagtcagctggggctgccatacaaagtgccataggtcagtgtttaaacaacagaaatcatttcctcacagttctagaaggaggaagtgcaacatcgaggagccagaaagtttggtttctagcgagggcctgcatcctggctgtcaaatggccacactcgccctgtcctcactctggcattgctgagtcttctcacaaaaatgccagctccctggacaaggatgccatgcccatgacctcattccaccccaacgacatccttgggtttgaattttggagggacacacagttcagcccataatagcggtgtttttactaggtgggtggatcaatggtagatcttcaaagggagatatcagaattcaaataaatttagaggctgggaaaattgtcttcatgattcattctgcctgtcgctgttagacactcacaggctacacggctgcctgaactctgcatcctggcgaggcctcgccccacccagcaatcccaccagcagcagtaatgccctcctgccctgcctgaagctaaagacgacagtcacccttattgcccagctctcttccctcctgccctgcctgaagccgaagatgacaggcacccttattgcccagctctcttccctcctgccctgcctgaagtcaaagacgacaggcacccttattgcccagctctcttcccaacactgctgggttccagccctgtcatcgtccactcctggcaccacctgacctcccatgttctctgggcctctaggacactcatggcaggctctccctggcctcaccctgcccccgccctcgctgagccctggtgctctcagaggtgctgcctgcccaaggggtgggtgtcttccctttactgctacttctccatctcatttctttgcttaaaaaaagtaatggtcagatctcaaactataagaaaagagtagaaaacaaaacaaactggcctctcaggggaatacactttagtgtgtgcatgttagtgagttccgacaggaacaaaataaacagcttctgcctcgactccttcaacaatatcatctccagcataggtctcttctctgaactcctgaagcccatattcaactacgaatttctccattagatgaaaagcaggcgtcttggcttaacctgtctaaactgatctctggatgtccctcccaagggcttccctgccagtctttctagttgagcaaatggcactttcattccattggctgctcggaggaactcttggaagtcacccttgatgcttctttctcacaccccatgacaactgggtcaggaaatcctgctggccctgcacctccagggcgtccaggtgtctcccatctccacccctggtgccccagcttcttgcctgtgcccctgcagcccctggctcccttctctccactccagctccttctccacctgcagtggagggatcctgggacagtgtcagtcccaggagctctcaggggcctgtgccttccgggccccttgctgtctctcacggaatccaaagcctggctttgtgtccacatgcccccagcgggctgtatcctgccccctgccacaattctggactcttccctggtgacgctcctcctcattcctctgctggggcaccaatggcctatttactatcgcaggacctttcggccctggtcctgccttcagccattgagaaaaacactaaatagtgagggagaagaaaaacaaaatgagtaagaacaaggattttccttaaggattaaaacacatctagaaatgacccctgataaatgagatgtttggaaacaacagagaccaatacagaaagtgggtggccatggagaagtctcaaattccatcatgttcctgtaggactggggctatggtttggtagctttttaaatgtatcatgccaggaagatttaaatgttctacctccccagatagtaatcctcctaaggaccagtctttggcctggtcgcccagccaaagccagtgtctggagggaatgggaagccactcagagcatagggcagtcagggcctgtaggcagtgcctggacctgcagtgagtgtcagaggcacctgccccagggtaggggggctgtgaccagggccacacatctcagagtggctgcagcagcgggaggtacccagctgtgaggactgctgtgctgcatgtctgagaggttactaaggagggaatttgggttataagaaggaaaaacaccagaaaagtcaattgctgtttacatgtccaaaggtgaggcagtaatataaaagtgttgcttttatccgcccacaaaaaaaattattgtgggtgaaattataattcacattcttcttggtatttttaaatattttgtctccattattaaaacacaaaaaattgctgtaaagaccttacagaacactaatgaaatacttttcaaatgaatatagagaactgatactcaattatccatatgacacatttttacaaaaagaaacaaaaaggagaaaggtaggcacaaagaaggaaggaaaggcatcatagagaaattataattaacaataattactatatgtttcaaaatagctagaaaagaagaattgtaatgttcccaacacagaaatgataaatatttgaggtgatggttatccaatatcctgatatgatcattgcacattgtgtacatgtatgaaaatattatatataactccaaaatatttatgactattacacatcaatggaaacttttaaaaagaaaggaaagaaggaaggaaaaaaggaaggaaggaagggagggagggagggtaggagagaagggaaggagggagggagggagagaggacagtgggcaggtgggttaatgcattcaaagcactcaaatgtcattggaatttacttacaacataaactgaacttttttcctaaaacatttaggagaataaagggacattcttaatcactcataatatgtgaagactcttagcctctattgctagtattggaagattttgtttcaggagatttgggcttgtttttatctaaagcaatttcttggactaaggggagtagcctgagaaagaaggtatagtgtacttaaaacatatttctaaaataaacagtattagctccagctatacagttgcaatgaactatgtttctaataacatcactttgcacaggaatcttaattgtagaccttgtaaaatgtctccttatgctcatagtctcagaacacgtttaaagcatgccacggtaagatggaggagaagtggtgatgaaggcctcccagagcatgggcagaggctgactcaagccagcctataacctggtccagggctcattccataagaccccgagagcctccactcggagagctgtgaggctcagcaaacacgtattgatccctatgtagtgctatgagggggctggaacaaggaaagcagatggccacacactgagaccagggcagtgttgcacccagagcatgagcaagtgcggtagagtcagcgggagccagtgtgctggtttggggtggggaccacagctggagagtgctggtggttggatgtcaccttgggcagacactgagccaggtcttggaggataaatgggtagacatgtttgtttggaaagaaatttcaagaaaatataataataaaatgtgtgtgtgtgtgtgtgtgtgtgtgtgtgtgtgtgtgtgtgtgcatgcctgttatagcagtcatgtgaaaacaaactgcatgtgagactatcacattgctggggccattctgggcaggaccttcatctaaaagtattggtcgaacctaaaatgatgaagctaataccttaaaatctgttcagtgttctgtggtttcagcactaggagctacttctggtcatgggatgtcagaaatcagcctacctatatatgacatgctgagccccagtgcccccagttgggcgatttggatgctgttgaatgagaagaacaaaaccaggagagggaaagtggtttcctagaggtcgtatcgcacctagtgtgagctcaggccagtgtgctgcatcctgccctaagttgcctctttaaaacaccagctcctgctctgagaggtcttctctacctcgtccatggaatgtgagcatcacttacctttcatttcaatatgtaccgtgaaaactttccacatatacactgagcatgcttcctgttgctgccaagatacacttcaatgaactttgcatgggttgatgtcttcccagcctcatgtcagcccatctttccaccttaaccttccacacataaccaacctattctttcacacctccacgccttgttcttgtcctcaagagaaagtcccagccaacctcctctgcctgggaaaggcctatgtattcttcagtgtcattcccaaatgagatcgacctccaccttgccccagcgggtttctcctctctgcctgacaaactaccctgccttgtgtttgttgctttatggagttgtgtttttttattcatctgttgtgtttcttggtggaatgtgagcattcagagctctgtgcctggaccacctgatacagtggtgtatgggtaataggtcctcagggaccctgtgaagtcaaacaatgttacaggcttcctttcaaaggagtgaacctttttgctaggtaaggtccgtacactgcagagactatgctctgaaagctgggtgtacacccttgcgtgcctgtgtggtgccttgacacatttctcagggcctgccccctacacagccctgagcagaccagtcctcgctcaaccaggaccatgacagcttgttacgggatattgaagtttctcgattctgcctatcagaattatttaactcattgggatgtggatcagacagttctttaaaatgttacaaatatgtcagttaattaataaagtccttttacaaccacacaaagaaatggtttcaggaatccaaggctggggaacggggagggctatagggaaccaggaagactccagttatttgtttgggtttgttagtttccacttcaccttggtcctcctgacatcttcctactctgcaagcgctaaggctggttgtcacatgcaacgatggtgttagcaaccaagccaccgaaaagcagcttgggaaggctgaattcacattaccatgccttcattttagactgagggacccttgaatctcaccctctctgcaggtgcatacaagactgtcctctccatttcccatttgcctgctttctactcctcctcatgattctctcttgcctccatatcagatgctggagcctgttactccacacccccctggaagccctcatgggcctgtgcatccaaaggaacactcctgtccccagagcccatggtgcttgaccacggcaccacacatgtgcgatttctgtttgcctttacttcacctgctaacttccgattgattctttttttttctctttttctttttttgagacagagtctcactctgttggccaggctggagtgcagtggcgcaatcttagctcactgcaacctccacctccctggttcacaccattctcctgcctcagtcactcaagtagctgggaccacaggcacccgccaccacccccggctaattttttttgtattttttttagtagagatggggtttatgttctctatctcctgacctcgtgatccatctgcctcggcctcccaaagtgctgggattacaggcgtgagccaccttgcctggccccgattgattcttaattttccaaaatgctccatctttactcatcttttcacccttcatacccgatggtgatttgcacaaagcatttgctcaagggtgaccttgtggaaaaccacttctgttacctcccatcaagtaatggatgacagggtcccacgggtggacagattgtcccatacgggaggaaagggaacagactgcacacaggtgcatcatggccagaacagagggaacagtcaaaacccacagttacatacatgctcatgttgccacagccttcactgtgtttatcagtgaaaatggattctttagaaaataaagttgtccagagtcctgggactggttcttttcctgtaatagggatgagttagaattgaaatagtgtggaaaagaaataattacaggattaagcagctataaagttactgcccttcaggtgttatgtaaaggtaaactacaaatggtcatataacaattgtaattatagaaaaaaatggggttgtataccctttgcaacagaataaaaaagaaagaaaaaatacccacgatacagccagtgttatggctaagctacctaatcaattaacataccttaatttgaagaaaaaaaactatagtatattcctagcaaaatttgaaacaataatttctttgaatatctttagaaatccatccaatgttacgagtgacagaaaagtcagtattaagttatttctgcttttggttgcaaaatagaaaaggtaattattaattcagaaacacttttcatatacaaaattagacttcttttcctatataacaactgttaatctaagaaatttaaagcggaaagtaaaaataaaagcttttacttttatgagttaatggtagtggccatatttgtgctgtgtacgaggcactaatgggtggcctacatgtgttgtgtatatgtaacgtgtgacacacagcaactcatgtgatctccacaatgattccaagaggtccaggctactattatcctcattttgcagaaaatgaaactgagaggcagagaggaaaatttaccctcagactttcaaacatagaaagctggatttatttcctgccagtctggtttagggatccctcctctgtcactgttatgcaactttgcatttattgtaacttttaagtatggagaattataaagagacacaaaattttaaagagaacagtataataagtccatatacccatcagttacaaaaatgtgatttggccactgtcgcttatctagacctccatttgataaccatttctatattattttgaagaacattccagaaatcatataattttgcctacaaaagtttcagtgtgcatatctaacatattagaactttatttttaaacacaggcaggacactattaacatacttaagaaatcaacagtaattatgtaatatcatgtagatgttttaaatagttgatgctttaaacttcaggggtaaatttaatgtataaagttatatttttcctggctatattttaacaccatgtatttcttcttatgggaaacagtaggacagtggtgaactatgaagggataaagtgtccccttgagcccaaggccacatcacctaaaggaaagatgaacacaacacaggaacttaccaagaacaaaaggcccctctctttctcttgttctaacttcttaaccacgctttcccttgcccagctctgggaggcaccttcactagggctctgcactcccctccccacgagcctgtgtctctgagatgcaggaagcacctgggaggccctggaccatctctgctattatctttcaccccaaactacttaagaggattcttaaaataaaaggagagctctcctcaatggatctttgttttcagatatttaccatttcttagtgtcttaacagttgtgatgctgtaaggccactatgaagttctgggtacagaggacaaaactcccttggttttatggtttaagattgtatagaggctaatagtatctacttttcctatatttcaaggctatgcctgattgtgatgatagttcaaagtatggaggacaataatgccttcttacatatcaaagaagtattataatgattaagccattcaacatggaagaggaagaaggagaagaagaagaggagaaggaggaagagggaaaggtggaggagggaagggaaggggaggggagggaaaaagagaggtggagtccaggaggaaggaagaaaacaatggagtaagaagagagaaagagggagggaaggaggaaggagagagagaaagagagaaggaatgaatgaatgaaggaaggaaggaaggaaggaaggaaggaaggaaggaaggaatcaagattatccctcaaatgtcaaccaacacctgttccatgcccaggttgcttttccctatcagttcagctttttaccttcaagtttgttggccaggtagtttcgggttgagcgacagccttcaaggtatttccattttgccattctatgttcataagggtttttaatgtataccctcaagcgggcaacactgcacactgggattttctttcactagcttcttctaatcaaagaatgtaaactaggaaaggtaggaagctgttgttagcagacagcacttacgtgatttatctatttaagaagcaggacaagtacatggcataaagtcaaggatggggtaagaggtaaatgaaacaaaagctttgatgtagaaaaattatgtggaatttcaaatagatggatataagaagtagtaaaaacatgtatcagaaaaggaggaaataaagaaataaactataagtgtcatcagaaaacattaaagtaaaaattaagaaaatttgtatgagcaagaaaattcatttgtggactaaagtagaaagtgttagattttctgagaagtttttcttcccataaggaggatttcaagcatatactattcctgcttatatgatgtcaaattaggtcattttaatgaattcaccacaaaacactagttaggcattgcatacataccctggttgtatggttcacagctttacgtattgttgatttgttgccattgctttagtttcttgcatatcaaagttgccttggtaataggcattatctccaggacaaccaagtgaaccaactccaagaaactatttggagtgaaaaatttggaagagtaaaggtgttcacctgcccattccatataagacagaaatcaggagctgagactatggggtgccttttaaaccgaactaaacttcttctatccgcccttgtgcacattacataacgctctgcctcaggtctctcctgctgagaatggggatgataatgtttccttccctagtgttattttaaggaggaagtcaggtaacacacatcaacttcgtaggacacggctgcagtgcagcagtctgtgcagggtggccacgcgcgtgcagcattgcagcagggtcagaccccatcaggaggtggagaggaagcttcaaccaaacaaaccataacctgagaggcatccagagctctgtgatttaaaacccagaacaccaagcacaaaatttcatcctaaaatattgtggtttaagtctcctcaaagatttctaattccttcatttaactgatgaagtgactgaggcttagagaaggctggtggcttgcctcggtgcggccataggggacacactaggttttccagcttttgatgagggtttgttttataccaaatgtacacaaccgtggtgatatggtttggctgtgtccccacccaaatctcatcttgaattgtagttcccataatccccacatgttgtgggatggacctggtgggaggtaattgaatcatgggggtggttaccccacaccgttctcatgttagtaagtaaattctcatgagatcagatggctttatcaggggctttccctgctttgctcagcacttctccttcctgtgaagaagatgcctttcttcagctttgccttctgccgtgattgcaagtttcctgagacctcccaagccatgcagaactgtgagtcaattaaacctcttttctttataaatcatcgggtatttcttcatggcagtgtgagaatgaactagtacacgtggcatgacttttcatgtcataactagtaatagtgtggggcaaatgacttttgttttctttttaatataattgttgtgtaatatgtacagaagtgggaagagtaaatgcttgtgtcttcctgattgattgtaaaattcttcccaactagctcatgtaagtggtcaacaactgaggccaaaatgtgttgctttatagagatttagcagacttatattaatgatccaattaccttgaatggcgtgaacttaacttgtgtatttagaaaaacaataatcaaatattgaaaatactgtcatatgaaatagaaattagcccatagaacctagaacatgttctgaacatagtagatcattaaaatacatccattaagttgaattgaattagacatagtctgtatctctccagaggctgaaagtaaaaacaacaggtgcctattataaaactgaataatatgcaaacccttgacacaatccaacaatggaatgagttgccttgttgagttgtaagctatctgttcctggaaatattcaagaagcaataaaaaggctactttttagcggtaggtggcatgggggcagaaatgtttctgtagtgcactctggcgtttagtataacgaacacaatcctagctttctttaatggtagtggatctcgaaattctcagagttacacatcagaaacaataatggtcgctatattaaattgctcatactgagatcttatttttaaagtaaatgtattgtaatgcttttcataccatgtatcagagactcaatataagcgtggattctgcaactaaaaggtggacttctcaaaatctggatcatgttctatcatttacatatcaccactgcctcacacagtgtattgcacgtagtaggcacttcatacattgatttaatatatgaacaaaagaacagaagtgtcagctttttaactgagtttatgaaaatttagaagatattttgaaatacatttttagcctttacaaaactaaatttgtgctatgagattagttttttcttaaggttgaatttatgaatttatgacactgctatgtgtaatggcagaccgttcaaacactggatggttagctgtgttttcaatagcagagaacatgcagtgataggaccacacataaaatgaagcaggattgtaaagataatgcccttctcaaaagcttcaaaatgtatatagtcttgagtcaagcaattctactgtgaatttatcttaagaaaatcattaacagtgtgaaaggttttaggtaaagaatggttattaaaaccatgtttataaggcaaaattttaaaaatccaacttatgaaattacaatagagaattgatgaagtatatttcagtgtattcataaagtagaatgctagatgaggtaacggaataaaataaggtaacagaaaagtagttcttcaggctgggcacagtggttcacacctgtaatcccagcactttgggaaaccgaggtgggcagaccacttgaggtcaggagttggagaccagcctggccaacatggtgaaaccccgtctttactaaaaatagaaaaattagccaggtgtggtggcatgtgccagtaaccctagccacttgggaggctgaggcaggagaataccttgaaccccggagggagaggttacggtgagccaagattgtgccactgcactccagcctgggtgacagagccagactccatcccccccaacacaaaaagtagttcttcatacagaaagatacatacgatgcataagggaaaaaggagtaaagaacaaacggcacagtttgacccatgttaatttaaaatctttttgaagactgtcaaagaaatcagtcttgaagaattttaaaccaacatactaatggtggttgtcactgaatttttgaatttccagtgctttaaaaattatattatctattattttaatattctaatgtttctacaatggacatacactaattatgtaaagaaaatagaagtttaaaaacttggtctctctggcagtttgacgttaatgcaaagaacgacattgagaggataagtttctaaagatattgacaccaaaagtaagagagtacagagatgatgccttgaaaagtataatttttgaaccattaaaaattagttgtgtagcaaatagaggacattgggtccaacagattggtttatttctcagtcttgctggaaattaaatttgtagcacttctcaattccacccactcataattggaagagaaagtgaaggccacagaagctgagagtctgcttcaaagtccccaggcagtaagggctgctcagacctcaaacctacacgtggtcaggcaatgctactctttcatgcagctgaaaatttacacagttatgtccaagacagatttcaaaagggatacaaatgattcccaaggatgtgcgtctatggaaaaaggaaactacagcctcaaaatggggctctgattggaagtaagctctgaagtccgtgcacctctggctacctgtccgacctccctctgcctcagtttcctcatgtctaaaagggatggtggcaactttcttacagggtactcaagggcttcaagagagccagccatgtctgcaatgtggcctcacccaaagcaggcactcaggctaaagtgaaggagtaggagtgggaggagtttgaaattcagaaaacaccacgtaagtataacaagaagaattaggaaattaaacataactatatgtttttggatcaagttctctgcttggttcagttcatttatgaaatatttagattataggtgatgctttcatcagtataaagatataagaaaaagtcatagttgatgtatgaatttaacatgtatatgtaattgactagacaaggcatacaactgaagcacgtaagcattaaaaacagcaagaaataactggtacaaaagaacccagttgcccgaattctaaatcagtcattgccttgtgagttctgcttgttttcaggtacctcctttacattcctaatacaacggtaaggtcccattgcaattcacataccacacgctgtgatccctcaaatgtcaacgtggattggacaaacgtccaggcaacagccgcacacacctcgtccttggctacagcctcctcatgacccgccctgcatgtaagagaagaggaagaaatggttaatggaactgggactcttttctcttgagttaatgggaatggatagtttccctgcatcttgagctattctcattaaagtattgaaggccctacgcacacacagccacacttgctgaaatttatctaaggaggggtcttggagttagacactcctactgtgtctcctcaaaattgtaattttttgttttttttgagacagagtcttgctctgtcaccaggctggagtgcagtggcgggatcttggctcactggagcctgtctcctgggttcaagcgattctcctgcctcagcctcccaagtagctggcactacaggcatgcaccaccatgcccagctgattttttatattttagtagagatggggtttcatcatgtgctatgttggccaggggtcagggtggtcttgatctcctgacctcgggatccgcccaccttagcctcccaaagtgctgggattacaggtgtgagccactgcgcctggccaaagttgtacttcttttaaaataaaagtctgtgctttaataaaaatgaaagaacaaggtcagttgtgtgaaacttgagagagtccctaggtctccgtcctccctacaaagtcttctaacccggggagatgagctggaggtgagctccatgcccaaaaggctgcttgtcaggcagtgattgcagttgcaagagaaggttctggacttggggagtgcatcgtgaattgcattatggcaatgtatgcaggttcaatagggacctcaaacgcagcttgcctatctaaggccatatcaggacaaatgccacaatgaaaaataagaggtgtttaaaaaacagaagtaaagaaacatgcacagaccaggaagtttcccatatttcctatttcctaggttcacttggaaaactagggtggtggaagaaaaggacaataattcctttggaaaattaattcaactttttctacccactaaccatattcgttccaattttagcagttctgtgggaggaaaaatgaaacatgaaattcttctatgctttcaactttgcatatctctttacctctacctggaatgccctcccctttctgggtcttcccaattctgcctagaagccacactttctattttgtgacatgttcctggtgacagaggagcagggatcttcatggtaagagcagcacacatgtcaactgctcccatttccgagtatccagctgagaagctacacgttaggtcagacactgcaggttcagtatctctcttaatcctcaaagtcggcatcattatttccctgtacattggctcaagatgctgcctaacccctggagacagagctagagcatgcctagcaggggttcaaaaccagctcttcccaactcgagggtgctttctgctgctgcaggctagcctccagtttctcagaccctccaaacaatcctccaattctttgttcttcactcttcttcttcttcttcctttttttttgtgagatggactgtcactctgtcacccaggctggagtgcagtggcgtgatctcagctcactgcaacctctgccttccaggttcaagtgatactcctgcctcagccttgtgagtagctaggaatactggcgtgtgccaccacccccggctaatttttgtatttttagtagagacggggtttcaccatgttggtcaggctggtcttgaactcctgacctcgtgatccaccgacctcagcctcccaatgtgctgggattacaggcatgggattaccacacccggcctgttcttcattcttctaaaaggaagcattgagcatttgtgacatgctttggctcacacacagaaactttctcttttgcagatagaattgatgactcttccaggacaatgtcattcattactaaaatgtggagggcatcttagatcatttaaaatcaaatgaaatatatgtacacttttaaaagaagtaatgcagatatcaagtttcgaatgatttctaacaaattgaaaaaaagaaaacatagaacccattagtaaacttttatgagaatgtctggtcttcggattttactttacaactgaaaaggataataaatttagtttctactcgggttaaagtgtacttgcctattgcgagtcaataataaatggtctaatgggtttaagtggcctcacatggtttgctacacttggacacagcaggagagatcatctgtggtcaagggtgccagcaacacatctacctaaagcaccaggcattggctttggagaactatgccaggacacagcaggcttccctccccacccacctgcacttgaaaggccacctgcagaaggcgggaagggtgcgcgaaatcacgaaggcagggagtggaagagacttagtgtcaaagcgatgtcactaggttctatttcccattctgttatcatcacctgagagagggagacacagatacacacagacacacacacagacaaacacacacacagatttcatctaaaattgccattgctttgaggccaaggcaggcggatcacctgaggtcgggagttcgagaccagtctgaccaacatggagaaacccggtctctactaaaaatagaaaattagccaggcgtggtggtgcatgcctgtaataccagctactctggaggctgaggcaggagaatagcttgaacctgggaggcagaggttgcgtgagcagaggtcgtgcctttgcactccaacctgggcaacaagagcgaaactccgtctgaaaaaaaaaagtatttgaatcctttttaaaaattcagataatcctcaaggagcttacaagactttaggtattaaatttttaagtgttgaaaaaaattgactagacgaagttatttaatgtcaggaccattatctttcaaacattttgttaagcatcgccagcatcctggtgcaaaattctggacgtaagacctgttcaaatactcaaaagtaagtgatttacagaaaatcagctagcatgagtcagtcccagtcttttttaaaaaatagattgttgaaaaaaatataaatactgtatttactgaagatgggaaagtggcaatttcaggagcacagagtgactttctcatttgcaaaatgaggataatggattagatcatctttaagactctccttttgacctctgaaatccagctttatttctcagtaagagcttggtcttttaaattcatatggatattctagttaattaatagttatttcatatagtcttttaaacaaagttgtagttatttctgtgtggatatcaccacgttttaggcagaagagaagcacttgccttgccatggaaattgtaatagcaatgaaactcaaactctattaagcccgaccaactctacagctcagtttgaaatttggaatttaacctactggagatttaagtagagtaatagctaaacacaaggccttacattaagaactctctggtggggtacacacatcattctagaatatttactcacccccttttttggcttcttcagacagacatcagatttatccctagatagatcatctggtctcatttcctgacacactctagttcatttctagagacagggaagatatatttataatgacctaaaagtagggactatgtgccaagtactgaataggaattgtcatttaatcctcacgaccaggtagatacaggacaacatcagttttacagatcacagaaatgaggccctgggaagatacatcactggcctaacgtcacttagtttgtcaatagtagagttggatttgaaccctgatcatctaatttctcagcaagcgctcttaaataccacactcaaacctcaatgcaattaaaaggaactttaaaaaaattagatcatcatatgcctagacagagcaaagtattgagaagagctgagcaaagtgtttctcattatctgggtcctccacatccattcaaagagcagggcgtgcaccagcctcatgtgcagtttacctggaaatgtgccgtaaaggtaaaatacacaaaagatttggtcacagcatgaaaacaatgtaaaatatctcattgatcattatgtattgattgcttgttgatattatcatatttaggttagatagctatattattaaaattaattccatctggttcttttaattatgtttaacatttactggaaaatgtaatatcacatatgtaattcttccacttgcattatatttatattagacagtgctgatctagagtatcagttatcaggttaattttacaatgagctacactttggaattttatcagactagagccacatacacatgttcagcttgaacacctctttgctagagaacaatataacccattcaattcagtctcaggaatgccaggcttatattcttcttcaaatcgatagcttcttaactcaaagttacttaataataaaagttattttctccaagataattatcctgttaaaaatgttctacccttcaatataagccacaggcttgcatgttaagtagctttcctgcaggcttctgcagctcatgatgtcagaggtaggtcaagattccttatcaccaaacggagcccacgatgacacttgtctgggcagacagaatcctccactaacagcagagtaagactgaagacaacagagggtgatgcctgtcccttaaccctgagaaaatcccagtaggtggccctgtctggctagggtgggaataccctctgttaatcatactgccagatacgttgaagttttattgcatgttggccaaaaagctttctttaaatgtactcaagcttacctatttataatttttaggcttttatgattttaccccatatttcaagcatactagtagtatagtggttcatactcttaattaaaaacaatttttaatttgctgattatcattttttcaggcctgtctagtttcatatagtgagctaatttttacatatatcttatagaaaagctgggcttacataaaaaatatctgcaaatatgtaagcataaagcaacagcctctagtaacaataatgaaaaaacataacaacctgcaaatcgctgtgttcacttgaacagtcatccttccataagacggaaataagaagagcccttgtaccactgcttgatcttctgcaaacaaatgttaactccccctcactggtaccacccatggaataaaaacaggctatgtggactagaaccaaaatcctctctaactggggtgagagcatggctgatactttaaagcatttgatatctgagacgttaggtgagtttcttagtattattttaagtgatttagatgtggatccaattaatagccacagtcataaatccccaaactccagttcacctgtgtcatggcataaacagggcttcacttcagcactggcagcaagggcaggttcccaggaggcagatcccaggagatggaagaaggagaggagagtatgctgagaggaaatgtgctccctggggaagacctccccatagcagggctgggatccccagtgggagtctgggtatttatgttctgacactggccttggcaactcagcatcgcaacgctgccacatgagctcatgatgtcagccacacagccacaaattgcaggacatgggcagagaagcagtagagaaagttagaatttctagattgaggtctagaaccttgtcttggaactgtgctctgtatatctgagagtcccatggtcacccccaacctctgatggagcaaacgtttatctgcaaggagagggagctggggaaggcccagagccctggcttccacttccatctgaggagcgaggccttcgtctgctttcgttttttaaaaggttctttatttgcgcaagtctgaagtcgctggatgacctcatctcgaagactagcgtgctgtgtgctttatcacatgccatataatagcaagaacatgttatactcacacagtttgtataattaaaggacttacattttaaggaaatacaacactggtgtgggcataaagataacaatgaagaaaaagagtcattaaaacttaattgctcatcacatgtgccagccaagtttaagaactacaggttaaaatgacagcattctgttagcatccatgcccccagtccacacatacacacacatgctctgacgtagaggcaggaaaacaacatggtttaaagatgtggttcctggacctggttgcatattgcaattacctgcgacctttggaaaggcactgacccctgcctgcagagacactgatccaattagtctggggtgaggcccaggcatcagtattttttttaaggtcccctggtgatcctgatgtgtggccagggctaagaaacactggctcaaaagaaatccccagaactagcaaaagaaaatccagatttgaattgctattctgctagttcttagctgtatgaacttcaaaacacaaccacttcctccattagataaagaggaaaaagataaaacattgacaacaccagcccactcaccttctagggccattataaaaatcaatttagattatgtaagggaaaggctaggtaaaaaaaaaaaatgaaagtcagtataaattatgtttttacttaaggaataactcagagcaacattaaattctcctatgctgagaaccctgagacaaagcacagaagcagcctaagaagcgagaatgatgaaaaaaatcaggaaaaaagggttgtgattctgggttttagctacaaagccaacgtacagccttcctgcctcctgactatgaaaccagtgatttgtgatttgagcttaaatctctttatgatataaaatgaaaatgttctgggctcaggacaattagctagagaagcccatgattttacaggttggagctggaactgaagccccatgcctgcccatgacttcagaagaagatttaatctacaggcatttactcctcgcggaaatggaagaggtgactcttggggatgggaggcaggagactggccaacaggaaagtgtccaggtctttgtcctgaagaagctcatcacacaaactggaaggtgaaaatcaaaagcgacatatttgctaatgggacaaacaagaggaagccgctcagttctaaggagacgcggtgcgtgatgggttctgagtcccggcgccgtggcctgtgtggaaagtcgggttctgcaccgcgtacgctgggtgcggttgcaggtggacagcagcttcccttgccacgtgcaggcgccgagccagcctggctccccgacccacgcaccctgtgcccccaggtgccagctcttgcattacaggagcccacatgaccgggtctgaaaagaacctaaaagtcactgtctcacagagtatttgataatttttagcatttctattcacagcctagctttctctggagcatctcacgagacgtcagagtgcgattctaagagtgcagaggagcgctcgacagcccgcaggtgcagggcggggcgggtggctgtgcccgggctgagaggagcgggtggggcccgactgcccatccagggcgctgctctctgggcctgggcctcagctgcgtgggctctgcttccctctgttggtgtggagcgggaaggaaggaatcttcccaggcaaaaggggcagcgagcagggcaggtgaaggctctactatcctcagatgcaagaattcctgcagagtgactgggggcgggcgcaggggcctgcagctctggggtccgtggctcaggaaagactgaaggctgccctgctcagcctctcctgaagctgagtcggtgccgctcaggccagcctgcggcctccttggtttgggatagcaattctattcccaaacgttacatgaaaacaaacctgaaattggagaaaaagtccttgtgaaatgcacaaaagacttacggttggctatggaaagaactgttgggaaaattccccacttcgatttcctttgctattttttattttcttgtggatgtcaggactccatattgccctcagcagtgacacggtttctggacaggacactgcaaacccagaggtggttcgtcagcactcggggacagcctcccatccctgttggggctcagcgcggggccctgccgggacaggtgcacagacatagccgtctgtgtggccctcagggtcccagcctccacaagccacattgagaacactgtgctcaagtcacacagagagcaaagtttgtatttgtaaatttaaaaaagacgaagtggttctacatcctgatatcacaagcaagtttgcttccaaggaatcagacgtattggataaactgtatctgacaaactattctccctaatttattttaaccccaagtctgtacacagagcaatcagaaagacatttgagataaggagagtgggataggagaggaacggatctgtggaaatcggtgagacggggaaccaaggcacgctcttttccctgaaacacactctgcaaaagaacattttcctctgtcttgcatgtttatgtttcatttgcaagttctgcttacagagaaaatctgaagtcatagagacaggatcaagaagatagaggctctggatctggggccaagacagccaccctggaggcatctggagccagagggtcccagcttagcagctcggggaagtaaagcctcaaaactgtcgttgacatcaggtgccactggcctcatggggcctttactacggcagctgtgtccatcttctatgtaatccaaagggctgagggataagaaaaagaacaagaacagcaccgaggagggaaagaaaatgcctgtgtattcttaggggaacctgccaagtgcactaaggaaaaaggaagagtgagggcttcagagctccgtccccagtgcccaggtactacagatagagagaggacctcattccccattcccccacgctgactgtgctccttgaggacagagcgcccttggttagaggcagatctgcaggagcagggcgtggagggtgatggtgagcactgttcccacacaggtggagctgggcttccctcggagctaaggaggtggaacttagaagaacgaaggcttccaggtgaggggcctcagggggtccccggggaacaaaacacacccctgaggaagtagtaactggtataagatggtgtgtctgtgtcccttaggtgcgcagggccaaagcttccgcctgaggctgccctggcccttctgggaaggacctgcccctcggcctggggcaggaggtggacaccaacccccaggtgcaagaccggccccctccctcctcccggctcctctggagtcagacgtttttgaaaatgcacaaagcagaaggaaagatgtgggacgagatccttggaaggaactcaggcttgttcatgcccagttccaagaacgccagcctgctccgtgcttggcgcgcctctgagggatgcttctggatagcatcagccatgggaaggcaacggccaccagcacggggggcaggacagggccccccgctttcagtggaattggatggtcttgctttaaaaagtagtggggtgaatacagaggagagtaaggaggaagagaaaaaaaatctgggttctaaaagatatcttcatctatcagtgtaaaatattaaattatggtgacagctcagaccctgaggaatgaggaacatgagaatggccgagagacaagcatggttggtcacaggtgacggttagcgactcacgggcggtgccccggtcacttgactctgcttagaaaacaactggccatctgaggggagccctgtggtgaggggagcccctggcatcctctcaacttatgccaggccccaagcacaacaaaagcctggctgtccttgttgcatatcttaggatggtttcaatttagaaagaatgggggaagagagttggcaaggactgagatcagatgaattttgacttgagctcagcacagcatcacccagaagccgcgtctgatgcccgcgcctgatgcagttcatctgaggccaggcagcccagcaaggctcagcttaagccactgaacacatgctggagactgcattgcattcgagatatgaacggaaggaggaaagagagggcagacagtgaagttgaaattacctcattctacacatgagaccaaaactgagttaaatctgcttcactttctgcctgttctttttactggggaggctgagggtatctaagtcacatgtaactaggaataaacattcagcccattattaaagtgtcagcggatgctcatttcaccatttaccttgtagaagaaatcaattattaagtatctgttgaaagcaatagtgtgtgcaaagacttgggcagggtattgtagaagacattatactacattatattatacaatagtccctgtccgcaagaagctaacattccgggtggagaagcaatcaatgtgcataaatgagatcaataacgtgcagttaaaagtgatgttcttttttttttaggtggtgatctccccttcaatctaggtattcaggcagagaccggatcagcaggtgaacaccagtcaagatttccggagaatccctgaattaggagagatgctggatggtgtgaaatctatgatccgcctttcctgatcacagtctgtgatactaaagcgtgctgaggcttcagagcagatgtgataggagctcaggaaagaggaagctgagacagaggagccaggatcagagctctgtagcccgagtgtgatctgatgggaagagacagatgaggaagggcgttccaggcagaggaaactggtatcacactgcattgaagccagggacagggacaagggcaatacacctggaacaggaggtctcctgagaaacatttcctctgctgggtgctgtccactcagtaaattctatgctgtgaggccatagagccagacagctttttctgccacccagctgtggcaagaggttcaccctgagcatcagtgctttgcattatgggagatggaaaaccaacccaaagggaatgtggagagtgtgggggtgggggcagaggaggtgcagagaaagatagagagagagagagagagacagacagacagagagagagagagagagacagacagacagagagagagacagacagagagagagagagagacagacagacagagagagagatagagagacagacagacagagagagagagagagacagacagagagagagagagagagacagacagacagagagagagatagagagacagacagacagagagagagagacagacagacagacagagagagagatagagagacagacagagagagagagagagagagagacagaggatgtagacagagagagaggggacgggaggtagcagagagagacagagggagagaggcagaggaataaaagcagagaaagagagagaataataaagctagagagagagaggttgggggggaggagagagaggtagagaaagagagagaagaataaagccagagagagagagattccaaaggctggcaacccaaatacatacaatcaagcaacccaagagcggagttacattttaaaaactcagtaggataaatatagaaaatatagacaattttattctatttttcaaggaggtgcctataaaccaagccagagccagtcaaaaggaaaccctgggtggttgagaagctttgctataaaagtcacctgaggtgcagctaaacttcctcctgtcactgctcctgaaacaaaagctatttaagaggcaagaggaaagagtgccttttaaaacaagtggaagaagaaattgattccaaagaggccaattctctattaaacaatgcttggcctgtttggtaaagtgtcactagtcccatttagatcatttatttttttttaagagaaaaaatgtgattcacaatgacaactatttccattttgagggtttttccttttattcaagaaattaaaaaatataaacaaaagctttgtaattactatcgagatatttttgtgtatgggcatggtatatgctttttatttccatcttagcatttcagcagtggagcagatgttttgtttttttctagaaatgctgtctggctaatgtcattaactccaggagaagagagagggggagtgagagtgagaaaggggcgtgtgggactctgtctgtggtacctcaggcccggtggggacacagaaaggagagacacttcaagaacgggtgccacctcctgctgccccagggcaccatgcgtccctctagtaaagagaagctggtggatggtctcggcctggagacaccatacagtgcactgcgtcaggagtaagccttgcctctttgtgggcaggtcatcaccaggcctcaccggtgtgtgcagggctggccagcaccccagagcctcctcatagcaatgcccctggtgcacagaaaacaaatgatgctcactttagtcccagggcagtgccaacagcagctgggccaacacccccttcccaggtttctctgcaggaagctggaggacctttcggggccaattggaaccacctgccttcccaggtttctctgcaggaagccagaggacccttcagggcaaactggaaccacctgcaatgtccctgcttcaagggagggccagcaacaacacaagtatcaggggacctcccgcctttgcgacatagaatgcacacaaccctcacccgtggcgccgctctgagtctctgcttccaaggcttctcagtgaagtcgtgaccctcggaggttttgaaaatgatttctgatttgagtcatttctccctgctcagctcaagtaggaagcatcatgaaattgcatttgaacattcctaaccacaggatggcatgacaggggaccgtgtgtggggtggatgggacacctgcacaggggcgtaagccaggcccatcccaggcccaccaggaggaggccctggggttagtgctttgaaacctggcagaaacctgctctctactaccagtacacaagattcccaccaaatacatgcttttctgcagacagatcatggcgttcatacttatttcatacataaaacccccagagacagattttaagattcctaccattcaaatgcttcatgcctgtctccactctccccttggccgtgccaacagttgcatgtgccactcaggatgctcaaaggcattcactccagaaggttccagggactgctcaaggaagaacaaatgtgtcctttctacagcatgaagcattgccctcctccttctgccctcccagggagggaggacagccaggaaaataaagggaatgtctttgggagccgtctgaggaaagaaacaggagccccaaattttggtaaagcaaaaccactctgctctctccctctctcccacaaaaggggatattgaggatgcctgagcccttcattcttactcacatctgcttcattctctgcgtccacgccacttaaagttacacaacgaggacctgagaagaaagctggcttcacagctggggttaattctagaaggaaactaggagaagcaaacatccacaaaatacccttaacttgctcagcccctggtgccctaacaaagctatgctgtgaggaccagtttgttctctgattaagcctggcttttatgaagcctggcttttatttttgggctgaaataaacacagaaacacttgatttgcaaaccactgacacaaacacatttcccaggagcctcagttgttggcctctgaggcccatatacgtggaagattctgggaggatttggatctgacactcaggatcatatcccttctgaagagacatgctagaagtacaaaaacttaaacagtgaaaacttatgtgataagagatgcaatgagagaccattcgatgaagcttaaagtctgaacagtcttctggtgtggatctgtcagggaaatattccagcaggaggaatgttttagtttaacacatggctttacaataataatctaccagatgccatgaagaagcaggccacaacagcacaaacttttatacattttcattcaaagtgaacttttctctaaaaaacataaatacgtaatgtgataaataataccttgaaaaatagataccttagattctgttatccatagtcacacacctgagttctgggaggagtaaaataagataatctgtattcaggggaacatgagcttccacaagtccctgtgccaccagcagcttcctggtcccaatgtcaagaagcacaagacacggcatgttctcgtgggaggtggcaccctcactgaagttagccagagctgccacacgtcccgcagtgctcaggaacagtcctctcactctctccacggtaactctgtgtttatttttttattttattattattattttttgagacagtgtctcgctgtgtccccaggctggagtgcagtggcacgatctcggctcactgcaacctctgcttcccaggttcaagtgcttctcctgcctcagcttcccaagtagctgggactacaggcgtgcaccaccacacctggctaattttctgtatttttagtagagacagggtttcaccatgttagccaggatggtctcgatctcctgacctggtgatccatccgccttggcctcccaaagtgctgggattacaggcgtgagccaccgagccctgccaactctgtgtttattaaacaggggcatgacttgttcatgaaaccaaaaggcttgggttcctctccagggacttggcactaagaatttctctaagggggagcacccatcaatatgtggagatcctggctctacctgacagcagcctgtgccatgatctcctcctggtgcctagcggcccatgtgagccgccagcagggacccatgtcagaggtcactggagagccccatggatgcctgcgggctggcaagccaggaatccagttcgaactggtgtgggcaggaggccatgcttgtgatttggaagcctgagtgtgcaccagttagtttgggacggtgatgtgtgaggcaagggtgggagttggggttcttgcttggaaagggaaatttgctccttcactcaagatacgcaactagaggttgctgacattcttacagcctttctcagtgcttactaagtacgatacactcctggatgtctttctagtgcaatcacaagtattcaggacattgcaaacctcaagcacccgaactgttaatcacatgtttttcttcagctctgcttagtgctgactgatccatccttaaaaatgacagtgagagactcttactcacaaaggagaggagagttttatccaaaatgattgtttgaaacatccagtcccattacaaactttttccatgtcatcataatctttcacttgtcaatccccaaatcttactttggcactagatcatcttccggcagcctactgatgtattgtgtccttttaattaactttaaagcaaagggaaaaaaaatcaataccatttggtatatcaatggcttagaagtcattcccaagctgtttaacctggcctcaagttcgcttattattatgaaacactaggatggagcagtaaggctttatatcaggaaaaaacacaaaacaagattccataaacacataaactcaaaattctcctgtgaaaatgtgtcttctttgtgcctaatgatgacttataagttactggaagtaaaactgatgtgttctaacctaaagacattcaaataaatatatgtttatgaaaacacatataattggatacatgtgagtagaggcatttgacttctgattgcctctggagttccttttacttactatggagaagatcgcatgctcatgtaacctaaataactttaatatctttgtttcatagaaaacagtggaagcaaagcagtatattgtttctaatactcagctttcaggcttgtataatcagttttaggtgattcacaattgttcacaaactgatcctatcaaagtccaacaaactgtgaacatggcgagaatctctctctttacatctcattagtgtgaggcacaaatttcttgaggtaatttacatagtcacattctcccagcttgaacaatactccataaatgaagcacagttttcccaatgataatagtaacactgaagtatcgtttttctcagcaaggtgatgctttaaaagaactttgtcccatgcgcattttgagttgtctaacctctggtggtgtgggaggagaggggaagtggacgttctcaaatccacgcgatgattcttagcggattcatagagttggctgtgcaagctttctttgattcacacactcacagagccgcctggagctgggcatctctcttcacatcttagtggacatcagagcagagatcaagaaggctgtgtgctcgtcttctactctaccaggaaaactaagtcctgatttttgctgtgccataaaacgcccactctcctgcaggagctactggtcacagcaagcactcttggctgtggcccattctctgttccaatcctcagtagacaacatggaagcctacatttacatgaatccagcgagtgttctgtaaacccagaccttttgctctgtgccagccttgcactcagcagacaacatggaagcctacgttcacattaatccaaagagtgttctgtaaacccagacctttcgctccgtgccagccttgcacttttctcttcgcccttgtgcagctcagtgtttcaccctcccctaccttctctcttttctttgtttccaagactctccctgcctctgtctctgtcttttttcctctctctgtgtttcatttcctctctatataagaaaactttatttgaaacagacatggtgaaaactctctttgctctcctatataccttagttcacatacgtaggtagacacattcattttttcatcactttattagaaagcattcaactcacctttttcagccttattatgtgtcaggcactgccctcagcatttcgttataagagaaaataaaacaaaaatggaaggattggtcaatatagccattctaaaagttttctttaattaaaaatttaaatatgggcctggcacaatggctcatgcttgtagtcttagcacttgggaggctgaggcagtaggatcacttgaggccaggagttcgagaccagcctgggcattatagtgagaccccatctctactaaaaaatttaaaaagttagccaggcatgatggcacctgcctgtagtcccagctactcaggaggctgaggctaattgcttgagcccaggagatcagggctgcagtgagctacgtttgcatcactgcattccagcctgagcaacagagaccctgtctgtctaaaaaaaaaaaaaaaaaaaagaagaaaatttacatatggtcatatcatagagattcactactgggcccaaatattaagttcatgtgaatttgatcaaacctaaaattttagctgtatattatgtgtcaggcactaagttagagtttgttgatacaactataaagaaagcatgattcaacctctataaaggagggcaggctcatcaatggccctctttctattccaaaattgatatccacaatgggctaatattgccatgatcaattacctttaaaatacattaaaataagtccacttcaccactggtgcagaaaatgcacacacagagaataaaataaactgatatccattatccatccattatttcctcaaatgtgaaacatggcagaatattgaaatagaaattcattctgcaaacaggtgctcaacttctggactaaaattttagtagatagatgagtaattacctaacttattagtcagtgaatgctgtctaaatattcagaaatttttggaccaatcgatttaaaaatgcacagaagtgatcgtatgattttggtttgttcttttatgtgagtttgttcatctatataaggtgagctttgaaaatgtggggccacttttcctttgaaatggtgaggaggaggggttgctatacttctatttttgccagatctcaagaaaaacttgactgagatgtcaaattgcaatgactatgcctgccactaaatatgctgatatatgcacattcctgtggcggatgtctgcttacaatgaacaatgagttctttccgtccctagaaagatagacagctttgtgcgctcaaatggctgggatcgaacaaaaagtggaaacctgatcaaattcttgtaactcttagagaatttaaatgggctcttttgtctcatttaaaactttgctgaaacccaaattattaattagattgtagacgtggtaatgtgcagtaatggtttgatgcgtgaacaaagtccttgagaggggccagttgactgtggtaaggagtagtatttttgttataatgaagaagccaaggcacttttggcttttagtactatttgtgaatgatgtttgatcataatcaacattgagtcccttttgcataaatacatgtatttatttttagtcattcaataaattattcaacttacatttactcatcatctactatttgccagggagtagtcaatcaggctccatttttaattctaggttaaaaatgggaaaaaaaacaacaagaataatagtagtcatcatagtaatagtttgcagatactctttatgtttcacaaacattatcttcttgtatcctggcgatcaccttcatcaacataatgttcagcatcacaggtggagatgcaatgtccagtatcaaaagacttgttgaaaaagcggatcgctcaactttgagtggccgtggttccacggcatgctcggcttggcgggccgagccctgtaactcttgtcttccgcgggggcacctttacttcttactgaggtcatgccctcttcttcctttataccccaagggcacccagcaccattatcagtacagaccaggagtcagccagttcctaccaactgatgcttattttccaaacatatacaaagacaatgtagtcaaaacatcttaaaatcacatgtcactgttacagagtctccctgctctcttaatcaggcttgggtcaggatgagggatctagtcattagggctgagatttattttagccacaggagtgcacttaggcagcgtacggactgtgttcaggcagttctcagcaggccccactggatagagcacacatcttagaggacaccgtgttaagaacaattcatttacccacagaaaccaagaggagacgtttaacaccaaacaaaccaagggccgggaggagggaagcagcttgtctgaaaatgaccacagttcatagttgtgttataatagaaaccattgccaaggatagccaccttccttctcagaggacaacgtatgtaacgcgacattcaaggaagaatcttccccgacttctgctgcacacattgaaaaacatcgagcaacacgtcacatcgaagtgtcctgacttaaccacagttgtcccagctgcgggtagttgtcagcaatcccaagatttctgttttgtatttctcattagaagtgtctcttgaagacccctttattccagaacaaatatttgaataaggattatgtggaaacaagaaacaaaaaagacactgaaaaataaagtgagacgctatagctgtacaggatttaacaaaatattaacaaattcactatttaaattccaaatccgtctaaaaattaaacaagtatctacagatcaccagaaaaatccatatggtggaacgtaacacactgaactcataatacacattctccaggggatacagtctggtgttgggtaaagtaataaattcattagcgagtagcctgaaaagttatgtaactatggtaggtaagtgagtggtgtagataaggctagctattgggataagaagaggcagacctctgaaggataggcagggcttagcaggggaagagtaacatcagttgtactctgaagtgaggacgatgacttaaacctctctctatagtccacaccaagtgtcttgtctgtgctaatgatcctcatcatcctcttcatttttatttaataatgagcactaggtaacttttcttttcttccttaatcttttaatgctttttagcttgcttgtggtgaagtttcagggagcaggttgctgctctgtctgtatcactggaagtctagcagccttggaaatatgtattctgcaactcaagcccagtcataggcaacacacaaatgaatggccatggctgcttcagaaaaactttacaaaaacagcaagttgtctggatttggcatacagaccatagtttgccaaccctggaaaatgcatctcactaaaatatttatatgggtaccctctagtgtactttctagatactgaaagagcaggcatggcattaggaagaaacgatcactaagaatgaactgtcttgtgggtgccactagccacatgggctcttgagccctggaatgtggccagtttgagttgagatgtactttcagtgtacaatacatacttagatttgaagtttgcatagaagtataagatatctcattaaaattatcctgtactgtttatatattaaaatgattattatttactatattgggctaaataaaacattttttaagtttatttttttgatactgggaatttggacttgctttggagataaggtaaaattgattatgaaggaggcacacttacatcacaaatctctgcaaagcctatataactcaccacaattgaagaaaagcccaggcatttaatgtaaaggatactacaaattccagttaaaaacttcaggcagtgtatgcaaagaacatttcacagtggaatatattggaccaaggtgattatattcattcctacagttgatggctgaaatgtgtgccctgaaccaacacttggtttaaaatacacagaaatgaagtgcaacatctaaatatctcttttccctaaaaaagttaacttgtattaaatactaaagtaacttttagttttaaaaattatcattaaacagggaggattccttattaccttagaagcaggcacttcactgagactgccctgctactaagatcactgttgtagaaagaactagcaaaaatcttgtgttagtccattctcacactgctataaagaactacctgagactgggaaatttataaagaaaagaggtttaattgaaccacagctccacaggctgtacaggatacatgactggggaggactcaagaaacttactatcatggtggaagagtgaaggggaagcaggtgcatcttcacgtggtggaaggggagaaagagtgaagtgggaagtgtggcccactttcaaacaaccagatctcatgagaactcacttacaataacagcaagggagaaactgcccccatgatccaatcacctccctctccaacactgatgattccagttcaacatgagagttgggtggggacacagagccaaaccgtattacataccaaatggctgcctatttctggacaatggcatcttcgggagccagtgttcatctgtcccacttaatgtcaatgaccccttcattttaaaatctgaatggtgacatttctgatcctggaacaggagcaaggtcaaaggcttctttctttgccatgaacccgagtgtgaagactcctggaattttgtgcccagactcttttcctcatcccaggttttgccctggtgggacaaagtattgagaaaaaggaagacttcctctccagtatttcaattcaacttccactctcatcattaacattgattgctgtgaataagctgcaggagtttgtgttttcaagggtccttctcagttgcttgaactcaagaggcagatgcacaactattgttttttaagtggtatcaaatggtccaaaggaaatagaatgagacagaacatacataagtaggtaaagtaaaatgctgtgtgtagaatcccaaggttttcaaataggagtctggacgtctggctcctggaatctttattccacatcattgtcacagtaagtctcccagaaacgcagcaaaacagctggtcacatgcactcatgtgtcctaagggccttgggaatatctttccatgcaatgcaacatgcctatttccaaatatcgaggtaccctacataacacagatcaaagagaggtgatcaccagtttcagaagaggtaacctcactgtgaatcagaatgcctggaaaacccaggacagaaggtccctcaaatgatggtgctctggtcacagcaacagcactaaagagagttccacattcagtcctgaccctattctctcttcacaccaacagagatttactgagaaccaactatgtccaacatttctgataggaatatacatctatgaagaacagtgtttcatagcctcatagggtaggttacaccattatataaatagctatcaatgcaaggtagacaatgataaggatcataaaaatacaccttgctaaagttcaaaagaaaagggctagaattcatctggaaggaacagagagggctatgtggaaaagtggcattttaaccagactttgaagagtgaatagggtgtgtttgcatagacaccagagaaagacattgcagaagtaacagtgtgagtcatcgaagcacagacaatgaatagtgtttggcccagtcctcacggcaatatttgaaatagatgagcataatgcagggatagaaagcatgcttgagaatgggcggggaattacctcaaagagtggggtaaggtgttgggtttatttctgtatgaaatagaaagactctggtattgtttgagcagaaaaacgccaaagctgtactttgcaataattgatctgaaaacagaatatagaattcatttataagagtgtgggtgatagtgggggtgtgtggcgtcatggctactattaaaagtccagaatgaagataatgacaggctactctaaagtaatgatggaagaaatggcagggataaaacatttgggaggacaattttagagatagaattggcaggaagtagccactgattggctgccagactaattatcccaaagaagagctctgaccttgccattcaactatacaaaaaccttcagtaatttcacattattgagagaacaaagtcataaacttatcgcatagagactattgtaagtatgacactcgtgatctccaggacctacacttcagtacactctacctatactccacctatgcttcagcatactgtatctatactccacccatgtttcagtacattctatctataccttacctacacttcagtactctctctatattccacctatgcttcagtacactctatctatactccacccatgtttcagtacactctatctatactccacctatacttcagtactctctctatattccacctatgcttcagtatactctatctatactccacccatgtttcagtacactctatctatactccacctatacttcatgtacacttcagtacactccacctatactccacctatgcttcagcacactctacctacactccacctacgcttcagtacactacctatgctccacctatgccttagtatactctatactccacctatgcttcatctatacttctgtacactctacctatactccacctacacttcagtacactctacgtatactttacctacacttcagcacattctacccatactccacctactcttcactataatctacctatgcttcacctacacttcagtacactctacctatactccacctacgcttcggtatactctatctacactccacctatgcttcagtacactctacctataccttgcctacacttcagtacgttctacccatactccacctacacttcactatactctacctatacttcacctacatttcagtatattgtacccatactccacctatacttcactataaactacctatacttcacctacacttcagtatactctacctatattccacctatgctttagttgatatactctatctatactccaactatgcttcagtacactctacatataccttgcctacacttcagtatattctacccatactccacctacacttcactatactctacctatacttaacttacacttcagtacattatacccatactccacttatacttccgtataacctacctatacttcacctacacttcagtacactctacctatatcttacctactctttagtatactctatctataccttacctacacttcactatattctacctacactctacctacacttcagtacactctacccataccttcagtacattgtatccctatttcacctacactttactatattctacctttactccagctatgcttcagtacattcgacctatatcccacctacacttcagcatattctatctatactctccctgtgcttcaggatactctacctgcaccccacctatacttcagtacattctatccttactccacctacactttattatattctacctatacttcacctacacttcagtacactctacctatactacccctgtccttcagtacattctatgtagacctcacctacacattacttttctctacctgtactccatctacacttcagtgtactctactcatactccacccacttcaatatactctaaccatactctgcctacacttcagcatactctatccatactccacctacacttaggtatactctacccatactccacctgcacttcagtacattctatgccacctaaactttactgttctctatctatactccatctacacttcagtatactttacctatactccacctacacttcagtatactctatctatactctatctacacttcagtatactctatctattctccatctacacttcagtatactctgtctatcctccacctacactttagtataccttctctatgcttcatctgcactttggtatactctacatagactccacctacactttactgttctctacctatactcaatctacactttagtacactctactcatactccacttacacttcattatactctacctatactctacccacacttcagtatactttatctatactccaccttcagtgtactctatcatctacactccacctacactttgatatactctacccatactccacctgtacttcagtacattctacttcacctaaactttactcttctctacctatactccatctacacttcagtatactctatctatactctacatacaacttcagtatgctctgtctatactccacctacactttagtataccctatctatgctccacttgcacttcggcatactctatatagactccacctatgctttactgctctctacctatactccacctacactttagcacactctacccatactccacttacacttcagtatactgtatctatactccacctacacttcagtatactctatctatactccacctacacattggtatactgtacccatactccactcacacttcaatatactctatgtatacttcactggcatgttagtacactgtatgtagactccacctacacttttatgttctctacctagactccacttacactttagtacactctatctatattccacttacacttcagtttactttatctatactccacctacacttcagtatactctatctatactccacctatacattggtatactgtacccatactccagttacatttcagcatactctacctatacttcactgacacatcagaacactctatgtagactccacctacacttttctgttctttatctatactccacttatactttagtacactctacccatactccacttacacttcagtatactctatctaaactccacctacacttcagtatactttatctatactccatctacacttcagtatactttatctatactccatctacacttcagtacactatactactctctactacatctctattgatgctctgttgtctaatcaaaaacttcctctaaatcattccctagagaagccatgtgtattctcttctatgagcttttgtactataattagctgctagaaccctacgttttcttcaaagattattttaaacaatatcttttatatgttatccccactccagcctggcttgacattgtgtctccctcctttcagaaaattttaacacctaacttatatttaccacttctatcaaagtccaaacaattatacagttatctataaatttgtctttccttccctgttggtctataaaatatctgagacccacgggcggttgtgactcactttcttataatccctagcatctaacaaggtaaagagttggttgaaaaaatgaatgaaagaaaaattccataaatatctttcagcagaaagagggctcacaacaacattcctttacccaactatccaaccaaagaaaatataaaacaaacaaatagaaaaatgaagaaatattctgcttcatggatctgtgactgcctttccccaattgggtcaaccctgaagtgctggcatttgatactgtacccattccccacaccccaaggtctcagctgtttcttgtggtccctccagaccccggatctgaacacaggcaaggatttgatttcaaaactacaaatgacatgtaagaaacttaaaggtttgataaccaagaccacataagagtcagaaaaggaggctgatgtcaaacccaagctgacaatgcatgagaattaagacacgaaccatgttgtatcttcctccagaccaaatcacacagatgtgtgtgtccaacttggatattctatgctgatgtatctagacaaggatgcagctgagcggcctggatcaggctactgctctgccttatctaataaacattctccagttctccttatctaacttggaaagagatcccaagatgtgagatgtacaataatgttggtctcagatgggtatataagctgagagccctggagctaccttcctgttattaaatgaagcaccggaggctgtgatctaaagaatgagaatgatctcttctgtcacacgactttggggggcaccattcaggttggcctccgtgtgaacaggagtgttgtgcatgcttggagagaaggtcggtcctccccccatctctcttctcaaactatggctggctcttggacagatgtacattgctgcaagataggggagcaggaacaaataagggagcatgcaaggcctctgttcccacccacgccaggccctcgttttaccccaaaaccttgtatatttggcctacggtgacttgaaacagtcacttcagctgtctggaacataaatgaggtagtgtcactggcttcaatgtattaacaagttatgcacaaacagtttgggattccaaatacatttctttgccacatttaggtcctccacctacctcacagagtgcaaatgaatcataacactcaatgacaagcattgtaggtcacattgtgtgtgcagcaatgctgctgttggggaaacaagcctagatttgtgggtgacagtgaagagagactgcagctgtagactttacacagcacctctagctactggggtttggaaaggggacttgtggaaaggagaacaaagtcgcctgtgtgatgctcctcatgctcccttggccagccctccccattctgttccgcttatgtttggtaccagactgttcacctcccttcccagtgtctctgtctttggcttctgatgaggttgtttcctttccttagtgactgagaaacaatttattctctatctctccctttctctttcacctgcatgcacttctatggcccagggtagtggctcatgactgtaatcctagcactttgagaggccgagacaggtggatcgctcgagctcaggagttcaagaccagcctgggcaacatggtgaaaccccatctctataaaaaaaattcaaaaattagccaggtggggtgacatgcacctgcagtcccagctactcaggaggctgaggtgggaggattacttgaacgtgggaggaagagcttgcagtgagctgtgattgcaccatggcactccagcctgggtgacagagtgagaaaaaaaagaatataacacttctgaggtttactaagtattttcatcactagtagcttttttgacagtttcattctatgctttctaccccattcccactcttcttatgtttggatcccatggagatagagacaaagtcggcattaggctaaccaaggacagaggagaacatattcattgctgcatcaaggacatttcactcaaaagaggtggtagaagactattgtaagctggggtgtggagaaatgggaagaaaggggggttctggccagaagcaagcagagaggaagaacagcaggctgtcacagagagagaggaatgtatctttggctacttgatgaattagctgatggttgagtggctattgtttgaagaatgagtgaagcagaggattcaaaaattgtcagtgtcctgggcagaggagaagaagaaaagaatgaaaatagcaatgaacttagagctgaagaaattacaatttgtgttcttttcagaatatatatgactgaaggattcatatcgtgtattcactaccttcaatacatcaattaaggcagggtgaaagaaggagctttttctccatgtccttggcatagtaacagcatctttataaaaagtaaagctgataaaattcagtacattgctttctgaagatctcagctgataaaaaaaaaaaatcttggaaaatcaagtgcaatcagcggttcactggcccttaaaatgtgctgtctccactaccggttgtcttaacccatgctcagaggtgggtatagcaagggcttcaggagtcagtctctggagaggaactggggctcagtagagataatgcctggttaatttaagtgggatctgaaagcagataacaaatctcacattctgaataggctttacttagtttgaaattagtttaaaatacctgtttttttttttaatggaaatggtataaggaggaagatagaacatttctcttcaaagactcaatatagggaaagaccctacttgatatcacacaggaaatgggggatgaattcactactatagtaaagtgccaagggtgtggctatatactatataccatataatactgtcttggtcttctcctaaaaaatttaagtaaaatatgatttatactcttacttttagagacactatacattctgcaagtcatgtttaaatttgatcttagtctagaagcatgagctcttactaaatccaaagccatgttgaaacctgaattaaatagcttacttatctcgatacatacgtttataaataacgctggggcccaaccctcactctagtttagagaccattatatgtttatttttctaacatacctctctctgtgaagaagaaagaaaaaagttcttatttggacatagtgattttcatagcaaaggagaaataactattctcattattttcttaaatgtttttagctgttttatgacagttcttatagttatttttgcgtaccatgagatcaagtaactctttaatcatcttgtaaatcattcaataagaaacaaaactccaccaaccaataaacttctggactgtcatatgttcagatcatagaatgaaatgatatgcatttttggaaactttttaaaaagcaaaccattaatagttttccaaatgaaactgcctgccatatatatttatgtataactccccccatgtcactgtgaatcatatacaaatcataggtaatataacagaatgaatacttaattacacactatcaaatatcattaaataatgaccattcagaacactacatctatttaccacacataccatgttcatagtaatatagaaggcctggtcctttttccccatgtatccaaattaaactggttttcagggctcatcccagattccacatgttcaccagttctagtggccactggccctgacaaatggctttcccttctgtgatttctttttttaaaatttaatttaatttaattttaagttctgggatacatgtgcaggatgtgcagatttgttacataggtaaacatgtgccatgatggtttgttgaacctatcaacccatcacctaagtattaagctccacatgtattagctatttatcacaatgttctccctccctcaagacaatcctaagcaaaaagaacaaagctgggggtatcatgctacccaacttcaaactatactaccaggctacagtaatgaaaacagtatggtactggtacagaaacagacacatagagcaatggaacaaaatagagatctcagaaataagactgcacatctacaaccatctgatcttcaacaaacctgacaaaaacaagcaatggagaaaggattccctacttagtaaatggtgctaggaaaactggctagccatatgcagaaaattgaaactggaccccttccttatatcttattcaaaaattaactcaatatggattaaagacttaaatgtaaagcttctctgtgctttctatctcagggacacttcagagactcacatggggaactccagagcacacagcacttttctgttagtgtgtcaactgtccctgaaaacttttgggggaattgttgatattataaccttttctctggttatgtcttgggtcctcagctggattttcagttcttaaaggcaaggattatgccttacactggcttaagatttgcacctacagacattcagtaaataagtgtttggtctattgaaaatcattgtcggcagccaaagtaagcattaaatagaggatgtagaaaatcatcaatatattctctgtctatgaaaagctttgtattgggggtttggtttcttaaacagtatatatcctagatagcctgaactctttaatgaatatgtttacttattttatgattatgaagataatactggtgcctataacaatcctatagatttttgtgggctttatgtgatataacccatgaggaaagcactaaatttactgtacccactaagtattagccattgttattattgttttcagggtgccttcctgatagtctgtttttattagtttctcaatataatttatcaacagtttgaatttgtgtacaagagagtatgggtccttggcacttaacattactcattttatgatcttccaaaagtatgagttttctagtgggtctatgtttacaacatctcactctaagtaagaatcagaaatagccaaattgtatgtcttaagcatatttctattgcctgtaaatttttttactgtttttaatttcaaatggataaaaatgtttctgcatttgttttctttccagccccattcattctatacatagttacctttcttttattacacctctccatttattttcatatgagaagcatttcccaatacttagagaaaagttccacatgtagaaatttgcacttttgaaatagtgggttgctgtgttaaataaaacatatctgtgtttgaattttctcagtggagcctccttggtaatagtgacctggaaaggctcctttgactccggtcaagagtctgagattcaggcgtggagagagaccactgcccaacctcaacatgagcttgatttctcagactcctttccttttcccactgtgggcctgatgttcttctctatttcgctgggatattttggggacaatattcaggcccactcttttgagttggtgagaacatgccatcggctaccatggtaaaaacctagtgtttatttgtacccacgagttcttgcttgtcattttgggtgccttctgctctaggagaccagaagtaggacatggattgtataatagattttagctgctaaaaatgcattcctgcttaacctgtgcataccctaaatactgcctttaaaaagaaaggtaagacataaagccaatggggctatttccttaaggatcatgccaagccatgttaatggcatatatctccctggcctacgtcctgagaagttaggaagactcatgtagtcaccagggtggttcgagagaaaccaagtagtaactgcagagctgccacggcacgtacgtttctgtgaattgtcaaggcaacccaccacctacagctggcattatttctgtgtaaagtaagataaaattctggttacaaaatgtataaaatcaatagagaaaataacttaagggaaagttaggtttcagttacgtgtctgagtgtcacatggtccagtgatttttcttttctttccttttatttatttatttttttttcgagacagagtctcgctctgtcaccgaggatggagtgcagtggcgtgatctcggcttactacaatctccgcctccagggttccagcaattctcctgcctcagcctcccaagtagctggaactacaggcatccaccaccatgcccagccaatttttttttttttggatttttaatagagacggagtttaaccgtgttagccaggatggcctccatctcctgacctcgtgatccgcccatcttggcctcccaaagtgctgaggttataggtgcgagccaccatgcccggccagtccagtgatttttctggatgaccatgaaacatttgatgagatgaatttcacgtcaacctgcctgaccttggtagtcccagattagactcatcaatcaaacaatagcatctactctaaatactcaggttcctggtgttgggtttgcatttgcacgtctctgcaaaatggtgacaaacaaggggcccgtcggtgtggtcctgctgatagcatgacagctactgttacacagtaatgcctttgagattgctgtccatgtgaagatgccaaacacgcagtcagcaagtgttagaactgggactccctcactttaaacaagggcaccgagaggcagaaaactgcaatcatttgtttcaagtcatctccgaattctctagagagctacctaggaggaaggtcttctcaatgcagggctccttcatagggactttatgtcattgtctaggttgactatgtgtggaaaatctcacttagaaaattaaaaaagacaaaaaataaaaataaaaaatgaaaaaatgtttaatattaggtaaaaatatcctcctggaaagtaatggaaaaatgaagtttccctgtgtcatgggtcatttttaatattttggagagttagtcagaaacttatagcacatgtgcaacctagctgatataaccaaaccaggcagagtaaagtctctctgactcttggaagagaccaaaataatcagtaaaatgattttgtaatcatcctcctgaccgtgcccttagttaaaaatctaagagcaggtgccaagagggactctaatgcaagccaaaaaattggaggccatgttgttataagggcccaagccacatgctccccagtcaaaggaggaagggaaagagactcgatcttgtaggaggaaggacgagatgtgtgaaaatcgtttactgattttttattgatagaggccgtttttgcaatgctgactgcccaatcagcaagcctcacacttcagttatgcctttgaggctaaaatacatgattcaatttgcacatgttggattttgaaaatgtaaagcatgaaatttacactatcattgactctactactccttacacaacttctgcatctaatccttggaatgttgatatttaccatttggaatatgtatcttaggcttagtgtattttctaactaattccacatttaatatacatatattgaaatgttaggtaataaaaatgagatgttacctgttgtctcacaaatttgcctttccactcttactaacccctaggatcagatactgttttgatcattaactttaaaactagatgaacaggtggctttgcccatttgtaaacaggtgtgttaacttgtccctggagagcagatacatcatttcttggctggcaccatggatgtggatctcttaggaaaaaggattgtttttgagctaatataatcccaggaacagcatattagctaaaaaaacacttgggcagcaaaactatctccattcttgttctcaggactgtgaaaagaattgcaaaacatcttggaagattcagaatacaaattcagtggaaaatttcacatgttaattcagtaccaaatgtgccacattaaacaaaggacgagtaagaaattgatctgaaatttatctgagcaaattattaagattttatttcctattatatacaagaacctagcatcaaccaacccttctcactttatataatctcagaattccatttttaagcaaagacatgtggctttttgatgcctgagctacttaaatttccatactctgagagactataaaatgctaattctaacctaacttgtcttttacagggagtaatggcaaaattcttaattctaaataggcaggtatatgcaatcaggtctgactcaagggaaatgtggcaaatagtcattggaattgtctgaaatacatgaccagtttctaatttgaattctcctctcctccttgttttgatgtttctgcagccaatggtgagccggtggataaccaggttggcagcccctttcagctgtctgcactggggcaggactgcttatgtcacagagaaggcagagacaagtgaatatgacacaggggatcttcctgtttgcttggaaggttggccctcagtcaataacctagggcttcaccatgccaaatccaaaatgttctgttgttgatctctggtatcaacagctcagaaactgcagaacagacccctgacagttaccaacactttcctccaaacagcattctgtttactgtttcatgtattctcaggtaagcaaaggcttgctgcgttggaactctgcataatggaaggggacagggaacgtgtacttagaaaccatgatggatgagggctaactatccagaaccttcaagaatgtgtgactcttgattttgtaagaagtcaatacactgaaatcatacgtgccgttgaatagagaatatggtgatacaatgccatgctgttgagtactgagttttggaatggtcacctggattcctgaagtgctgattacccaggaaaggggcctcaggcttcactcaactcttcttcttaagtcataagaatgctttaatctatttcaaaatgcattcaagaaaagtaaacctagaagtatttatgattaccctttatcagaaatatgcatatatatatatatatatatgcacacacacacacacaagtacacacattacctgactttttgtggggcagaaatttgttactcagttctatctcatttggctctgcacatagtaggtactcaatatatgcacattgtattaattattcagttatggcactaagagggaagggaggtgctgaccttaaggggtctcgccttttctcttcagcattgactttgatattttctttctagaagaggacagtgaggagagcccctgcctgccaaccattgttgctaactccagcttgtctgtcactgaaaactttaaaatgcagaatctaaaaataattaatatatgtgcaagtaggttcagagggaaggagaacaaaagggagaactgctaccccagtggctggaaagtcccactggggtgcagacatagtcccctgatcttgagcactgagtgtcttcccagagtgacgtgtaaaagccccagagcctctgccctggggatgagggtcttggtgttggcagtgtgtcaagcctcatccatggctgtctttttcctactttctttagtgtgctttgtcttgcgaaagtgctcatacagtaagaggatgagagggatggacagggttaaattcatgacatggtgctcattcacaccacactagccataggaacactacaattaggcataaaattttatttctgtgaaatatactctaagtcctagaaaaaaaaaaaagaaaaaaaaagccagcaaagaaaggaatttcccttggagggtgggggagacaagcaaaaaccagttactcttgaagagaaacagcacaacactgttagaacaactaccatcattgacgccagcctacaggatatgaggccaaaaacaggtttgaatacagaaaatacaagtcattatgacttatcctgttgatcactgaaaaatcagaaccactgaataatacacctagtttctacatttccaagttatttccaagtacaagtggtctctgtctcatgaaggaagtcagcaagtctatctgtaggaaaggctggttcacaggaagccacaatcagctgccattagcacatacagcagaacagtttcattcttgccatcccttataatcatttccccctcgctcctgcaactggtgatgagcaacgctttccacgacccagacaacaaacagctggatggatgccaggagaccatacatccgtggtctaccatgccctttttaatcaacttcctaattaaaaaatgccatgctggcatgaggtatgaagggagtaggcttggaatatattttacaaaatagcatcccctaatcctggggttgttgaaaatctgtgttcttacagatgttgatgagttcttctggtgcagagatagaatcaatttgcctgtgcctggccctcaagacatattaaatttatcctggaggaaactggattctgaaaagctcttgcccagatgcattagggcaggtgggagtttcagagaagcacagggtccaccggcagatgcggcactgatttccgaatgttcacaatctaccaggcagctccagagcagactcggtttgatggctctctatggggtgccctgcagactcgcttatttctacaaccagtctggctagcattgtttcatggcgacaatgctctgtgctttcagcttctgttcagatggcacaggctggtggaattcgtgcaccagggaggggaggttgggccgaatttaaagtaagcccttaagaatggtttattgcttttagggttcagtggtgtggtagcccctggagtcaagaggtgatgccgacttttgaaaaaccattctgttgagggccattaaaacacactatgcatttaggttgagataacggcatgaaggcaccactcagaacagtgtttgagctagaaatcctataatgaaaatctttgtcaatgtactaaaaaaaaagacccccataaattattaattcatgagttgtttgatttagagtcctaaacctgacattccacacttgaaaatttctcaagcaagtgcccgatatccttgaggtaattttctttaaagaaattggagtgttctatgtaaacagtcagacttcagtaaaaagcagtcagtatgtaatattgagtcctaaagttctttcaactatattaatgagtgcacaaacacatctaaagcaggtttacatggcacacatactaaccctatggctcaaatattgtcagcttacacacattttcacactggcatttaaaaaatacacatatacacgcactcacaaaatcatggaagaggggaattatagtactcctaagagtgtgaaaatacatgacagtactgaattttaaaaggaatagagtcaaataaccttttgaataaaaaatatttacctgttttttttttttctttcacaatcagtggaaaccccaccaaagcaatgccctctatggcttcggtgagcagagcaggcccactgagacagcagacgccccacactgtccaatgttgcctacacagggtacttaagtcaaagagcacttcatctttggactaatatcttggaatcacaacaattgattaaaaattttgccatgaaaggctgcttttctttccaaagttgacactcaaccttaaagtgcaactagacagggaaaaattcccttagaaatcaccttttcagacaggtgcacatcaccctgtttccagtcctgggacctttcattgtctttgcccgtgagcctgctccacagcctgagaacaaatgtgacggagagtggcacgcggggctccgtgaagtggagactaatatgacacaattttgaccctaaaaaaaaaaaaacaaaatagctgggctccacctttgaaggcagccaggcacaaagagcatcgtggagaaggggctttcagggatctctgcatagaaatgcacaaggtgaggttaaaaagtaaatgctgatattttgccccaagaaagttataaaccaccatcataaagctaaaagcagctatattaatcatataaagcttggttcaactctaaaatgaaatgtagcaatgagaaaataatggaactatgactttatgacttttctctaggtaagatttcatgaatctgcttgaaaacaatctgatatttaaaactgcttgagttaaatttttaaaaactcaatttttttcttcattctagtttaccagcaaatttaaaaatgaaatagaaaaagaaatgtgtctgtgtgtataaacacacacacattgaaaaaacaatagataatttacctattatgcagaaaaagctcaatgtgagtactaagaaacttgcagaatgagagggaaaatgatcaaaagcaagtttcagcagcttcacatgaagggttaatatgtttttaaatatcttgtgtttgaggtttagattcattaaaggtggtttctttcttttttgaaaagatatatttttttaaacagaaaattttcccctccccccaaaagttgtattttctgtcaaatattcactgttattgtttaaagcaaacagctaaagtaaagcaactctttagaaaaaaagcttaaaatgaaagcaaaataaaatcaagtgatctaaaatattcaggaatctataaaaagacagttaaagaataacaatttctacttgagttctacctaaaaagcaggtgaaataattaggtcagttaaaatgaaaaaccttgccttttcgggagaataggaattattaaaacaggatagaactatttatcagtgaattcctaccatggaagtataattaactaaatattaaaacacccatattgcagtagtacagtcacagaattatataagaaatgtgtcactgatgacaatagaaaattaggattccagcaggctctttattcttacttctcaactcagaagactgatttgcaaaaatgatctccatttttctgaaaagaactcagagtatcactgtgtgctaatttccacatttcctagttgtagattctacagatcaatagaaacttcagttcaattttcacaatctccagtaagttgctggttaaattagctaaaatcatcttccagctaggaaaaatacatactagtcaaaactaattatgtctgggctttaattgaaacaacatttgctaattttgctggtctcgatgcacggtttcagaaaatattaattaaacacattgaataatggctgctgtaagtttctaaaaacagtcatctctaaacagttaatttccacttcaggcacatgcacacgaagacggatcaagccgctaccccaaaccggcagcaaatgactattcttttgttactgaccatcaggagttcaactttgctccactttgggaagtggaacaaatgctctggtgaagacagggagcacaggacatatttacctggaggggatatcaaagagcagcctcaagacttgcaaaacaaagtcgtcccaatgaattatctgtgcctacagccgcacttggcaccttcggctaagccagcgtctgacaagcagttgttcccacggcagccacccctgccttccatcttagggactcacccagaaaattctccaacctgctccacgactacaaaactcttctaatgcttttgaacgcccaccatttgttctccattcatccaatcaactttccactgcacatcttctctctctaccggcgcccaggcaaggggccacttctcatctgtatgctaattattttgccacatggacaaaagtaataatgctttcagacaggaaactaacaggcctgaagtcgaagatggaaattaataagttgacaccactaaacgacagggaagacgggcatgcgtacagcgctctgccgggcgggtgaagtgcagcctccatcaaaaggcagcagacagacagcgccgggctgcgagtcccgcctgtgctgcgtgcatcaggctcacgctcccttagagaccacatcgctgcagcagaagagcctcggaagcatcctgctgacttaccctgtctcaggctgcctccttgaagcaacacaaaacatatccacttccccaaatcctaaggtgggagggaacttcactgctgatctagatatttttcaagctacagctgtggattaaaccagtaatttctaaccttcctgtgtatcaagcttgcaacacagtcagacacgagtggagatgtgtgcagtatgctgcttgccttgtacccacaggcccctaaatctctagagcagaatgtgtatcatgagcagtgctgtatttaatgtaatagatgagaactgtaaataccggagtcaggctgttagcagctaccagctaggcaatatatctaaaaatatctctcgtatcattgatgttatggtaaattcatgctgtggccaaagaaacctcacagaagtaagctgaacctacagtattttagatggcattgctggttaacatccaagcaaaacaaaaagaggttccaaaacctgtcacttcttaaaataaaagaatggtgacacaagagttaactctaaccaattcttaaaatcgttttcgggttgccaacctcactatattattctgtttcagtatgagcttcttgcatcgttttcttttaaaacaaaagctatgaaactacttgtctaagaaagttaaaacatttttcaccttttattattgtttgaagaaaaaaatatagaaaaagttttctttgaaaagacaagtcctaatatggtttttaaaatagctaagggaacatagatacctgatgttcattagcatttttttctggcttaaaaaagtgctgattttataaatggcttcttgagtcaagccacagatgttttactctggtggtgaccataccgtttcactctctgcaaacctctctcctataacactcaccgctatgaaaggctacgttaaatcataaaggctactttagcacctcccaccctcgccccaggaaactagccttgaatacacagactcatgtttaacaacaactccgggcagcatgcagacatagcagtgcccacaatggcattacactgaaggagaagctcttttgagagagggtccattgttggcgcgttcacacgcctaaccaagagactttaggaagtgttgtgtatgcaatcaaatgagagctggagataggcaggcaggtggagaaacaactatttttgaagtacttaagagaagaactgggagctgcaaccaccaggcaaattaagaaaaaaagaaatcctatgtaacctttacaataaaaggaaagaggtacctttttgtggaagagctggtggccatcaagccaaatcctgttccgcagtctgcttctcacccacgcagggctctgtctgccgtggagagaccatcgcacgtgctggtcacagttccctctgtgtttccattccattcacccctaccctctggcgcccgcactccaccagcccactatccacagtgagtgagagtcgagagcagaacagcacgagggagcagccactgcaggctttccacagagcacagctctgactgtggtttccgtggggagactgacagagaagccccaagttaccaggaacaccctcttccagctctcagaggtaattcctctgaagaccgagctcttccctgatgtgttgggaccagacttactggttactatagaggctgcaattcccttcccatcgagccctgctagacaccactgcagtctgaaagcaaggaaagctttaagagaatgtcctgtaccattccatcttctcacaacacaatactccttacagtaagactaaaatattcccccccgccaacttttccaataatcaccacgtggggagcagagattattttaaaagaggtacatggtaggaaaattttcctagcagaacagcctaatacagcaatgcttatcactctttctctatctaataaataagcattcatgcattctttctagttttataacacctggcttacattttctctgccatctctgattacttctacagataccctgaggactcattatgatgtcaaagccaaaaacacttccattgtagaaacatgcatagaaaaatcactgtgtatgcttgaacaatgcaggtgtgaaagaaacacagagagaagagagggtggcaaaacagacaaacagggaccaagttaaagagagagggggcagaagagagagaaaggaaagtggagagaaagagagagaagagacaagacacaaagatattacaaacagaaccacattgcattgaaatagcccactgatggaaaaaatggatagctgttgcctttaaataatctaatatcagaaaaaatcatgcaataaaatactataaaagtagaatatttgtattatttcatatgagttatggtcactataggcaatattttaaatattggggtggtatgtcaatttaaaatatctttttcataccagcaaccatgatatgtagatatgacactgcccccaaccacacacacacaaacacaaacctacatctatttacttcttcaagtttgtggtatcttttgtcttcagttttgtttggaagaaatgcagatcaatgtcaggtgttgtgttgtggtacagaatacagtatgatgaaacttagcttggtgaaaaatatgttatttgcaagtttttgttcaagtttatcctcagttactcctttctaaagaatactacacaacttttcaaataaaaaagaagatattcaaaaaaagaactcttaaaaacttgaaataggaaaatgcataacatcattgcgctcaaattacgctatggagtaattagattataaaaatttaccaaaactgtagatctctctttctgagtctaccattcatttgcctcctgaacagagttctggtgagactttgcatcaaggtagacttcctggcaaaggacaacatgcattggaaacactggttattgattgaaaattatagccctggtctaaaagggacacccagccaaaccaaactgtaagtgcaaagcagagtggtcattatcaaagagcatctgactagtccctctaattccacagaggagttttttttaatataaaatatttaagggtaaataaacctttaagttgtttgaagttaaaatgtatccactaaaatatataacaagtaaacaaagtctttcagattgtatattatgtatttctaaaataatgtctctccctcaaattaaattggcttacaggtagagttggaaatctagtttatgcatgtgactttgaaaacattatttacttgacaaaattaatttttcacagagaagtaattggcttttaaaaattataaatgtaaagtatttataaaagcagctgaacaaataatcagattattaactcaattttttaattttaagtataattgtaacaaatagaaaaactttacaaatctttgaaattgcataatcacttatttcttttccctaatctattaaacattgacacagaaagcagacagaaaacatcagacagtgaaataattgggtatattcaagagtaaggtacaaaatagaaacattttcaagagagtaaaaaataaataaataaattaggtgaaaaacataacagggacagtgaaaacagcatattaaagaagtctcattctctgaaactatccacatagtcctaaggtcatgctttgacagcttttataaccccgaagaagactaggtactcatattcctttaataatttttgtacaccactcatatgtggtcacaaatcattgggcctttaccttgatctcagcttctaacacaaatttgtgaaattggcataagttctgctgttggatgcaagtttaactcaagagaagttgaaatttgtgtgtcatgcatactttctaccttactgtgacaccagatagtcctggtgcatcttttcaaagatgaattttattaataattacatgtatttggataaaattttccagttgaaaagtaataatgtttacaattttccaacccacaactatacatatatacaagtaatttttaacatattgatatgtttgaatatttggaaatagagtaaaatatgtgtataatggcagatggaaagtctttactaaataaaaatgttcaagtatagatatctttgctgccaccatcttcaaaacatccaaatgtgaccatgaaggcttctcctacttctacctcaactagcacaatcattaaggtgatgaaagtgagccattttcacattgccaataaactaggaggaagtcagtcactgttgaatgcaatcgctatcagctgcggacagctcctggtgctgaaagggaaggcagagaagcctgctcacaatagctcactccaccagcctttgaaaaatcacagcaaaactgaatgaggtggcaagtgctcagcctgaatagcactgtctacagaacaatggcagccaactctaaatcctactataatcacattaatgagattaatcagtgaattagcagcagtcaaatgtcagggaggcaaggaagaatccaaccaagattggtaattaactttttgtgggtgggggtggggaggagagaaaaatcaactgtgctatctcataggtttttttagatgttgataattttgattcacgaatctgaagactatatgtacagatcaaaagacaacaacataatccttcatattataatatagatccagatctcatattactgattcttatagtcctctgagaaagctgatgtcactttaaataatcttcataatctatcagaattttattgttttaaattctttaaatgcacaattaatatttaaaataaacttatttctctgaaaatcaagctaaaatataaagaaatatggctgattaaaagcagaaggattatataacaactgttattgtttatgaaaagtgtatgatagtatggtaagagttttcaaagtgcaatcaagtaaagtaccatcacacacacacatcagtagtggtctatgttagttaataaagaaaatttatcactcaagtataactttaaggagacttttaagcaattaacttactgcatttgaggtgatagaatcatacatgttcttttaggtcaatcagaaaaaacaaacttcctttttttctggaatgtttctcttagtagcatttataacttacaatcaacactttggattcaaagttcttgagaggtgaaaacttataggaatgcaatgctgtttttttttttgaaaaggaatattttataaaactcttttcttttaaaaataattacatttttatctgtatgggagacatgactttattatttttaaagctacatgacactaaatgaagatgaacaattagaaagaccctcatatgccagtaagggtggttttgggatgctttggtctatgacgttaattttgtttagtagaaaatataaacatttgaacaaaaaggctcttatataaaatagttttactctaagtaacttagaaattatttagcttatatagctttgatggtacaagaaattgtcatggttaatactaaattcaaaatctgttctctatattttatatagctaactttcatataaatatttacatatatatttttgctttattcagatctatcttaaaactaaagtgtagagtttaatcttttagtttattaatttaggtgttacaaaaagacatatttctgttataaataacattttctttcattattatgaacttcaaacatttaagttaaatttaaaaatctttatttgagtttctccacttaaacaatataaatcaactttcttcttaccatcaggtaaattcatccaaaatagctaacattttaattgcctttgcataaaatgatgtgcttcatttgtaatgtaaagtaatccagtaaagtctctgggaagtttttgtttcagtatcctcttatcctccaaacaccatacatgcaccccgttttgtttttgtttctttttttcttaataaacaacatcacagttaagtcatgcaacctaatacccattttagtttaaagacagatttttttgtggattacaaagcctccagtccaggaacatttcagctaccagccatgctgtaaaaataactttaaaaaggagcagacaatggaatagcagcctcagcccttgagctacggtaaaacacatcctgctcactaagttccccgaaaaattaacctaacgaacatcacgtacctcacaatgaccacaaccgctcacaagcgaaagacaagttcaattttggtaactgtgctggctcaaaatacacagacagggaagaaaaccctgttccaccacaagtttgaaaggatgatgagacacatgcatgccaccaagacgcagaaaaggtggctttttgtcttcagtgagtatggatatcataacccatagtccagggaatgaaaaaattaaaatgcacccaccaacaatgagcaaaaaacccggggtgcttcaacaagactgcagggaaaagctctctcactgtttagtgtgcagtagcttagggaaaaaaaaaatgtcgcccgggcaggaatgacaaatgcagcgcgataggctcgcaggcctcagggatctgtttgacttccacacacccccatgcacacgctcccactcatcctctcctaggcttttttttttttccacatttttttttcacaagctccaaatccccggcatatgaccttctgttaaatagataaaaaaaaaaattgcttatcagtcatgcaaatgaggctgaattcattttccacaacagatggcctcatagataatgatgatggaagagagaaaattgaatgtctctcacaaggtggccatggcaaccgagagcagaataatatcaataataaactcactgcataataaggttgtcagtcctacaaatcaaagtctccagctaaatcaggtataccaccccagctagttaccaggtaaatagtacacacacacacacacacacacacacacacacacacttccacagagtggcttgaaatctttcatggtcactgtaaaatgtgtacgtgtgtgtgtctgttggtggcaagaaggggttgggggagagaatagttggataatgaaatgacaatgtgacttttttcttttcctttcctttcattatgttttctgcaatagactcggtttcatgcaggaccttctaactagccatattgaaatcgggatgcggtgctgaaggctttctctcctccctctgcctccgcgctctcgctctgatgtgctgcattgatgcaatagcagctcgcctcaggcttccaccttggctcccagggggacatcctgcaaaatgaatcagcagccatcctgagcaggctgattaaaatgaaaatggcaaggcacatgtctgggcggaactggagctcagctttgctgcttgtctggcaagcatgctcaatatagctcttgctaataatggcttactgcctttcattttttaaaaaggtatcacccttttcccccttcactgactggtgttgtctgtgtgtgtgtgtgtggtgtgtgtgtgtgtgtgcacgtatgtgtgcgtgcatgtcgcggggggaaacgagaatggatggttctattcttctaattttctgctgctcacatgcagactgcctgcctgacagcaccattattttaacactgaacttacttcagcttttcttttgggacagggtgggggggcggttgataagtcttggggcagaagggctagttttaaaatcaagctgcctaaaaggcccagacaagatttttacactccagattcaataatttctaaccaaatctgaagcaacagacctcgagagaactccgatgctctgcttcacaggctcacagttggacatgctgaaacacagcctatgaagaaacctatttctgtttcgagcatttgcaaccagcctgttactgtatcctagatattatgcaacacagagaattaaaacagagaaagctactagctaataaaataatcgaacacaattgaaaaaataaatcttgg

SEQ ID NO: 388 - DNA, 181652 bp, Homo sapiens
  source 1..181652: mol_type = genomic DNA
agttctacacccggagagatcctgcgctggcgggggagacagatagagacacaaatacatttcacaccaggcagcaggtgatgattagtgttaggagagtgtgtgaaccatgagactcacacacagcgttcttcagattctaggagaaagggaggaaaggagctagagagatggaggttgggtttggggtggggagataatctgatggttagacattctggcaaaaagttcttagggctttataatccctagagtgtggctccacctgggcctacccctcctggagcaagctttgctttcagagaattcccctccactttctcctgagagccttttgctcaggcaacctggctgtgacttgggaggccatttgaggatgggcagtgtcccctctactgaggtacagtcctaggcaaactgcagactactccatctggctcttgttccccctccacctcatccctgtcccctgggtccagttaggaggaaaggaagaagggcttgggaaacatcttttaaaagcactctgctgctctgcttaactctggcaggcaagggacccagtgcaaagcctcctcttgattccctaggtttgacacaggcctttacagttccaaagcccttctacctgtgaagctggtattataaccactataaaagaaaacagaaccagaggggttcaatgactttgacaaggtcacattgctaattggaatagaaacccagtttcctgatctcaagagttactccttcccctacaaagccctcagccccctccccagtcaacgctaggccccttctctccaagccacccgtgtcctacccccatcccctacctcctgggctcaggagggcaaccttgagcctcagagactgaagtagggcgggactgggagtttcctgggggaaaaccaaagacggtttggggttgggggaggggaatgagcaccctggataccattcctccacccctctcccgacatctctctcaggcccacgggcccactttccctcccgcattctgagccgccctccctccgtctcttttacctgcacctccacacctcctcaacagatctttatcctggacacggcagggggtccccgtgccctccgagaatccaagaacccgccccgcttctacgcggaaagctgggagaaaaactgcttttcctttatttccccctaccccccactcatccgcccctggagctccgctcgcagatacctccccctcccgagccagaaatagacacactatctctcccccacctccctccccgtgcgcacactcgctcccctcctcctgtttgctccccgccttccccttccctccttcctctgctcggagctgcagcctgcagcctcgactcgggctggctggctggctgagtgcggccggggcgctgcccggcagtgcggtgtccacgggactgacaggcaggcaggccgcgggctgggatccggacaccaaagcaaaagcaccgctgggcgccggaggagccgcggggcttccatccttcctttgactgatttttaaattttaatttgtattttccccgccgccccgccccttttcctccgaccccgccctatcgctccccggcttccctgctctttcctttttcccggcttccttcctcgcgtttctttcccctgcgccctcggcttgcctctctccctcctccctcgctctctcccccttctctccccttcttcctcggtttcttccgtcctctctctccccctcctcctcccccgcctcctcctcctgcgctcccgccccctgccccctccccccgtgcctgcagacgcgcggatcgtccatgcgctcctcgcgggcagaatgctgggcagcagcgtcaagagcgtgcagcccgaggtggagctgagcagcggcggcggcgacgagggcgcggacgaaccgcggggcgccggcaggaaggcggcagcggcggacggcagaggcatgctgcccaagcgcgccaaggcgcccggcggcggcggcggcatggccaaggccagcgcggctgagctgaaggtcttcaagtccggcagcgtggacagccgtgtccccggcgggccgcccgcctccaacctgcgcaagcagaagtcactcaccaacctctcttttctcacggactccgagaaaaagctgcagctttatgagcccgaatggagcgacgatatggccaaggcgcccaaaggcttaggcaaggtggggtccaagggccgtgaagctccgctgatgtccaagacgctgtccaagtcggagcactcgctcttccaggccaagggcagcccggcgggcggcgccaagacccccctggctccgctcgcgcccaacctgggaaagccgagccggatccctcgaggaccctatgcggaggtcaagccgctcagcaaggcgcctgaagcggccgtgagcgaagatggcaaatcggacgacgagctgctctccagcaaggccaaggcgcaaaagagctctgggcctgtcccctctgccaagggccaggaggagcgcgccttcctcaaggtggaccccgagctggtggtgaccgtgctgggagacctggagcagctgctcttcagccagatgctgggtaagtcctgccgccccgccccgccccgcccctggctttctcctaaccagctgctggggaaggtgtggggaaagcgaagccccctccccttgcgccttcccggagggccctcctgttcacgatcaggctgtgatgggcattgcgcccagatgtgctgagctggcccacctccagatgcgcatggctcaagtgtaccttcttaaagacattacaggcgggaacccgggctcgactctggcctgcccgaggtgaggctggacaatgggatggggggtgagggggttacaggctctcagaaatagagccagaatcccaatatggcaaaacctgggactggtggaaacctccgttgtggtgtggcctgcgcttgacaggagcatcccgcattgcaaggggagcgtccagcgagagcccggatctagaggacagatgtgggagagcagatgtgagggctgattggccccggaacacagctgaggctccacttcctctgtggatcccgagtgggagcgcaagtcggatttccccgcggtgtgaggattctggctaaaagaagcgtctagggccgggggcgggcgggctgccagctgtgcgcatctgggcgcatgtccgatacctcagccccggctctggccccaacccctacacccgcaggtcttttagggcgtgtcgaaagctctgggcgttagcgccgagactcctgtttgaccgggaagcctttgccctgtggctaatggaagccgagcaggcgggaagggaggaacaaagcttgctcgagtggaggaagcgcgcagagctgttccattgttctccgtgcctgaagagtctatgcaaaaaaacccgaagcgggccccggaactgctctttctctccccggagagcccctgccctcagagaggaatagatctgggatgtgccggacgccaggcggccatgcctcgggaactggcacgggccctcttggggccacggaacaaggacggtggggcctggtgcccaggcgagctgctttggctgcgcggacttgttgcggtggctgggttgtgggtcctccggcgccgagggacccgagcttcctgggtacccggcaggctgcccgcccgctgggggctgggaaggggcgtgccaatgcgcgtgtgaaagggcggggccgagtgacgggcttggcgggtggggaacatgcaagagctcgccgggcggccctggagaatgcgaagccggaggagaccggttcggcctgctgcagtcttcctaggaaccctcgactcctgtgtgggctaggatgagggtcctctgacaggggcaaggatttgggcctttggagaaccgatccttacgcaggaggccgcaaatgggctttgcaggggcaatcaggagactggacaagggcaaaagaagagcagccttttcccctgggagcccctcctgaaggtggggatggctgggtgggtgcggaagctgaccaggcagcctcactctgcaaagggaatgtgccacccggtcctcagtgtggggctgagcctgtcaaaggccctgcctcagtgaatggggcaagagagacaataagggaaaaaattaataaatttttggcaggcaccatggcaggcaccaaggagggatatggacaaaatgcaactggcccatgtgatagagagccctgctgagggactgaaagcagggtgagagaggaagggaccgtgtgtgtgtgtgtgtgtgtgtgtgtgtgtgtgtgtgtcagactgagagagggacttggcgagggagggcaagggagtatcggggcacagaatagcagaaggcacagaacccttttcagggtcaaggctttacttgttggggataacttagctggtctgggtcctctccagacctggatgccctcacactgtcccagaagctgactgcccattgaagccctcttagttgctcctcaagaggagccaaacaggtctgagctggctagggagatgggaggaggggcaggagtggggaggagggcaggtgcagggagggcgagagaggaggagaagctgagctgtggtcccttattcctgcttagcagttgtcacttctcaaagcacactgacactttcagtaacctcggaagtgaggagagaacacctccacttcccagttggggaaatgcagagtcaaaagcattgagggccttaaaggcatctatgagttcatggtggaagggagattccacattgatctcctgaggactaagtcgcagctcttcctaggagacctgattgagagaggaagagtcagcaggcagagggacctgcccaaggctatgtctactgggtatgggccaccagaactgcctcgatgaccctacagagggctgaggggcttagctctctggggtggggagagaagggtggaaactcccaaatctgcctgtctccagctgagaggacccaaagttggggggtggggagttggttcaggctgtagcaaggcagagcctggtgtcaaacagtggtagggaggaaaggaggggagttggtgacctccaaactaagcttttccctgtgtgaagggcagagggtagactgcctgggggaggggtagagggagaggaactacagagggaattcgtcttccagagccaatgatggtggtgttcaggtatcagacaggccctcagtgtacagcagggtggcctctggggagaagaatggtgacttgatgtttcaggattgtgattgaagacactgggcatttgtccccacctcagtggggctcagtgtccagttatgttcactccatagtaccatcctagatccaagaggctgccaagaatcaatttctgaggcggagggagggggtgggagtgaggcagcttcaagtcagagcctttctgtaataagagggaaggactgaaacctgatcatccccttcccagaaatcagctggggtcccagatggtctaggcaggctccctgtcccttcgctaaccttggaagctgccaaataactagggccccactggggaaccctagcaacttggaagactgaggagtgagtaccgagggcaaatgggctaattccaggaattagatgcctctggaccctggcccgatactcacatcaggcagtttggctccggaagaaaggccacaaggcccttggcctgggtctgggggctaagctggaggctgcattcctgagttctctgtgtagaagtcctaagctctgtgaccccctctgggactcagtttcctcatttgtgaatggaagagaccctcccatggctcatccttaccccctagggatgggaagggggtgtagattaaggtgatcagacctggaaaatgttccaagtggcttaaagagagcctgtattaatacagcgcaatagaatacagatgcacctcaatttatgatggggttatgtcccgttaagaccattgtaagttgaaaatattgtaagtcaaaaatgcattgaatacacctcacgtaccgaacgtcacagctcagcctagcctaccttaaacgtgctcagaacacttatattcacctacagttaagcaaaatcatctaatataaagcctatttcataataaagttgcatatttcatggaatttattgaatactatactaaaagtgaaaaacagaatggttgtatgggtactagaagtatagtttctaccaaatgtattactttcatgtgatcataatgccaaaaaagcagaagccgaacaatcacaagtcggggactgtctgtactatagtaacaccccaaatcttcctacctcatcttccctggacctgaggatctcaaagcaaaactagtcttttgacactccaggtgttcatgttccttccttctgtcctccaggaaaagggggcaaagtgagacagctaagactgcccaaggtcagggagtaaaagaacccaggaacctggacttcctagtccctcttcatctcaaaggtgtctggacccacacaagcggttgtcatgacaacagttaggccttctgaagtgcaggccaagtagaaatgaggaagaaaggcaggaagctattcatttctaagccagttgattgatgtgaattttttgggggggaggggcagtgcaagggggtcgctccagtgaatgtgctctgggatactttgagtagcaggagaaagaaatgtgttcacaaatacttcgttttcctttttattcagtgcattgtggggctggggtgggtagagaattctccaaagaactgccacccagaacagataggtgatatgtggaaacttatccagcaccctcagattccctgaggcctagcaggagagtgaggacaaagctcactcctgcccttcctctgggcagcagcagtagtgatggaggatgcttgtggaatcacaggcaggaggaagggctgtggcaaggtgcagcagcctgcaggtttgtgtgtatgtgtgtagagaaggcactggcacaaaaccttggagctgtgaggcctcctgccttcctccaggttggtaccaataatatttcttttctcaccgtgtccagaaagttttcttccaaggctaggcttgggcccccacccaggtcatgttcctctcctttgggcattgccttgttctgactgctgcagtcaaaagctgttggctttgactcacagcccatggctctgcctctgagagtaccgcatggatgaataagtaggtcctaggggcagttcctctgccctggggagaaggtacagatggaggagaagtacccagagctactctggctccctgaaccttaagccaacccagggagataccctttaccatccatcactgatggctctaaccccaggccacaggccccttctagacctgcattgaatgggtagcaggaccaagtcacctggagtcctgggatgtttcctgacactttcttcttgtttcaccccttcccactttctctgcccaatttgatactgtggctgcaaatgcccaccccctacctcccaccccctaccacccacccccatcacaagctgccaacaccagatccttccccttctgctgacctccaatcttgcctttctctgcagctatccttccacacacatataccgcacctcacagcctctgaccctgagggtgaaggtgcaagctgctccacgtggtgcaagggagagccagtgctgtatggagcaggctgagcagagccctcagggtccataactgcagcttagccacctctgcagcacactgcaatgtcttcctggatagccaagtccctttctctctgcagagcgctccatctccctcacccttccctgagatttcatagaatcctagaatggaaattgtctagttgagccactacctcaagccaaaattaatcccactatagcatcataggcaggtgggtgttctgtttacactctcctagtgacagagggctcactaccttattttccaggaaagcactcattattagatagatatttcttctgttgagctttgattctgtcttctgagaatttctacccgtgggtctgaatttgctctctggatgcttacagatgaagctagcctgcgtttcccaggatcccctttcttatatttggggtcagacacctatctatgctccattcgtcttttctgcttttgcctcttccttccatttttcttccatttctcttcttttggaacaagacctgataggagatgtctgacctgttcaccctgactcacgggcccagtggagtccagctctccacctggaccccactgtctgcatctcagagtggctccctaccggggacccacagcacctggctggtctttctcctggcccaaccaggaagctctcctccccaaagcccaaagcccaaagcccaaagccttctccctctgcctggaaagcctgagccagccaacaaggggaaatggacgccacatgtttctcatttgcgctggctgacctccccccacaccctgtttggattacccagatgtgtttgatgtcccagagcctgcggccttttctctcatgcacaggaagggccgggtggggaggtagggggggccaggcccagctcactggccctgcgtgggcaggttccctcctataggaggcagacatcacctcccacaccttcccccacactgctgcttctggggactgggcctcctgaaggaagcaggacaccagcgccttcagggttcagctcccccttgttcaatgaaggcaggtctttgcttccttctgacccacagagatcgggggcagactgggaagatgccccaggaactgttttgatctcccatctggaggctgagggaggagcagagttgcacttaaggtgtgtctggcatggctgtccagtgtgggcacagcagcgtgtgcctgggataagcagggtgacccgcttttcaccatggtgctttgcaccttctataagcaccttttttttttctcagacttgatgcctttggaatgtggaggggtgtgttgcataggtgggaagctcccattaggggagaatgaggacccattgggagtttccagattgctccagcccattctggtgctgaggtagagatgggagggcatggagagcagcccatctccaggttcaccccctaagagctttggctccagcaggccccaggctctccctgccagcgctgttgtatgttgcgtgtttgacacacacttctccaactcagctccagccaaacctcagcaaggcagccagggctcggcagggtctgggccttggcctgagccatcctggaatctattttagacatctcaatgatacatttcagggccactggagtgggtggtttctccacagcatcttctaatttctgggcgacagctttcactctgggcttctcagggtgctttctcctgtgagttagaggtgtggaaagcagggacaagtgcagtcccaagccccagtatgctgtgtgtgttcccagcgttggttcttatggaatctcagagttgtggtcaaggttatccagttgaggtgttgctgttgggtgtggtctggtctgaaaggttgaatgttataagctccaggtgtttccatggagagctgggctcataaactacgaccttgggctgagcaggaagatagcgaatgttgagaaagcaagactgaggcaagtatgacgagagctattgggttaataggttgtatggcacatggcacaaacccctagaactcgggtgaggttgggtgtcagggtgtgaagactaagtgtgcagtgaatggcatgtgttcacatggatcagtgcatgtaaacaaactcaccggcttgcagcacatatgcacatactgaagggacatttgcgtgcatgtatatgtaacagctgggcaggtttaaaagagtctgaaatatgaccctggtggaacagcttcccccaaacagacccctaggcagagcccgctggggtttggactccttggcttctttcccagaaaagcactgtaagtgctggttactcctcagactctgaggacacaggcccctttgcccttggtgacccactaaccaggcccctcccttttggggaagctggcagccacccagcaggccctgccttctctctgtaggatccctaaactgtcatggggtctaggattccaacatccccagactgaggctgcttcctaggagctcctgggacctgattatcccaagggggaaatgaaaagctcaagaatcaaaagaatcagtaatctaatggttatcaataacatgtatcaatcacttggtaagtgaaagtcattgttcttgttcctcaagccaaaattaatcccactatagcatcataggcaggtgggtgttctgtttacactctcctagtgacagagggctcactaccttattttccaggaaagcactcattattagaaagatatttcttctgttgagctttgattctgtcttctgagaatttctacccatgagtctgaatttgctctctggatgcttacagatgaagctagcctgcatttcccaggatcccctttcttatatttggggtcagacacctatctatgctccattcgtctttctgcttttgcttcttccttccatttttcttccatttctcttctttggaacaagacctgataggagatgtctgacctgttcaccctgactcacgggcccagtggagtccagctctccacctggacctcactgtctgcatctcagagtggctccctgccggggacccacggcacctggcggggctttctcctggcccatcacttaatactcacaataattctatgatcctggcacttacaagtgaggaaactgaggcactgaaatacaggtaatctggccagggaaagtggttcacacctgtaatcccagcactttgggaggccgaggcaggtggatcacttgagctcaggagtttgagaccagcttgggcatcattgcaaaaccctgtctctactaaaaatacaaaaaattagccaggagtggtggctcacacctgtagtcccagctacttgggaggctgaggtggaaggatcacttgagcccgggaggtggaggttgcagtgatctgagatcacgccactgcactccagcctgggtaatagatcaagaccctgtgtgaatacaggtaatctgcccaaagccagtaaagcaagcgagcaacagagctaggatttaaacttaacccctatggtaacctgcctccaggagcctcaagactccctcaaacattgagtctgattccatttaattcaggagcaacttgtcaagaagttagtgtcggcagagcactgtgcttcctgagactgaagttctgggccctgcttactaggttctgaaaggctggatgaggagatagaagtgtccaggctcattccagtacaagcagaatgcagcatgctgcgaagaagccagaaagggcaactgagggctcggccagctggaattggcatcagtgcatagggtgtgtgggggcacatgtgagatggtggggaggggacatgctacagaagtgatgtgagttttgatagaagggtgagattctggcagtagaggtaaaaaaaactagaaaaggaagggaggaggaactgtgggcttaatggcaggtagtgatgagtcctgtctggcttagagagatggaaaaggtggtgaaagaggagatgagatcagaaaaacaggttggggtgggatcatggctgatccgacatggagtgcactgggactcaactgtaggctctgagcagatatttgagtggaagagaccaatcaaagttcgtccccaaaggatccccaaaagagtcctgtgcccgctggtccttggagatgttgctgatcgatgagatcagccagccagggcctctcaagtttcacatctgtctgctccagggaagattattcttgcagcctatgcagtgcccacatgggatggatggagggagaggactccttcagcctccatgcccagaggttggccctctgagagggtaggggcaccccttatcctaactcttagcctaaactcaagtcttcatcttcctctgttcctttggtatgccaccaggctgttccagttgccatgccctgggaattgattaggccctactgtgtgaggtgcagtgctctgccctgaccaagagttgttcctccactgccccagccctgggaagtgctctgctgaaaacagtcccacaacccacagcaaagcttgaaccagactacctatagcagaaccaagacattaaaccaatttgggactagacaggggagcttttcaactgcacgctattcagtggcaggcataagtggtgtggtgccacgtactagctctagctttattgtttgatccaagaagccttcctgaaggagccggaagttggggaggaatttaaaggagttttaaaggaatatttataggaatcagaggctgagcacagtggctcacacctgtaatcccagcactttgggaggccgaggtcgtagaatcgcttgagcccaggaattcaagaccagtgtgggcaacaaagcaagactacatccgtacaaaagaggtttttaaaaattatctgggcatggtggcttgtgcctatagccctagctgctcaggaggcttaggtgggaggatcacttgagcctaggaagttgaaactgcagtgagctatgattgggccactgcactccagcctgggtgacagagcaagaccctgtccctaaaaataaatgaataataaataaaataaataaaggaatccaagacacttggcacaatgggagaagacattccagttatccagctttgtttgtttgaaggtaggagaactagatggggactagctggcttggagccctccgagcagatggtccttcagggagtgaagacagccggctgcgctggggtaggagagcctgtggggagtgagggtttcccttctcctaaactcaaaccttcatctctctctgttcctttaagatgccactggctgttccagttgccatgccctgggcattgccatgggattccattgctgtaggagtgagaatgttttgccatagaggatctggttttgccgtggagtccaggtgtccctaggagctattgtcctagagttcacaggttgccatgggtgtaggtactgtcctgctgtcttcatgctcccacagggccttgatggtgacgtgatgtccaggggtggagcatttacagcatggcctccctgtcatcctgcccatgactgcagcacccgggaaagagagtcacaacagcagggaaggcagcagagcctatttggggtgggggagcaggcaggccagtgctgctgctgctcccactgccacagtggatggcagcagacatgagagtggccttcctcagctgtagtggcggggctgagaccctgcactgcctgacactctgcctgcccagtggggtttgcttgctgcttgacaggcagcatcgagaggctgttgctgctcctgctgccaccatcaagggacccactgggctcctaggagcaccagcgtcaggcctccctacttggcaccccaggactctctgaggtttcccagcccagcctgtagctttgggaccactgagggcctgctgcagggtctgggctccttggaagggaacacttagcccctgagactctaatcgaggccatgcactccacagatagttcaggcatcttcatcctgaggacccgtgggggaccatttaacactcacagacatgtctgagtcactggaaatcagcaacaataaggactaacatttattgagcactcactgtttgccagctgtgctagcgctttgtttgcgtaaacccattttatcctcacactgagatattaatcaaggatcatatgcaaaatatttgacaaccctcacaggtttcagagctggaggagtcctgggggccccctgttaactgtggttgctggattgtggaggtcccagaggaagggcccaggtggccagggtggcagggggagcacatgagggctcaaaaaagcacctatttgactactgtaaggaagtgtttcatattttttagcaaccaatatggccttattggtgcatgcttgttgacttgttgacactgttatataagatttaggtataaggaagcttaaggaagcctaaaggaggctaagcaacttaccccaaaggaatgtggcaagttcacggtcaagctaagcttaaacaaggcttgattcaggctcatgattcagccgctagactctactgcctcttgcacaagtagcaactcactgctctccctgccctcttgatgttctagaacccttgcactacatcagtctagcaatggtccttagagcccaggcctataggaatcggttctctcttgccctccttagcattcctcgagagtcagtatctgccaagtacccttcctcccaagcctctcactgtctagtgtaggaagcagacccacagaggggtggttaggatacagtatcgtggctagtgctggacagagcaaagccctggagcttcaagaagagcctccccagatgtacaggaagaaatagggccaaaatggctgggatgaggataactagaatggtctggaagagtgggggcctgaaataagctgtttgtctgcctctttttgactgggaatgctggctctgtcactcactaactgttgatcttgaataagccacttaactgcctggtaaaatagggattagactccccagctcccagatctgggagactggatgagatgctgcatgggaaaggactggtgcagaggctggcacatggctggttctgcagatgtcagccccatcagcatttcagggaacgacttcccttttactctcccctccgctcaccctcagcctgtagcccctgatttctagactagatttcccagagtgctgcatctagcggagaagttagcttcttcatggaagatttaaggactcgtcataatatctatcatttattatatgttatgcaccaggcactgttctaagcactttacacgtattcagtcatttaatcgtcacaacaacctagtgggttaggtactactcttatcccctttttagcaatgaagaaactgagaggttaagtaatttccccaaggtcacacagccacgaagtggagtctgggtatgacccccaggcagtctggctccagtgacctgcctccttagccactatgccatgaggcctctctccagtggagagcactggcattcttgcatcccacaggcatcgtaagccctgttgggcagcagcccagatcttttattctaaacagggtggacccactctgacgtttcctataagagtttagtggcacagggaactgagcctagaacatccctggacccacttgggtacctgccgcaggctgaggacagtttgtaggatctatggctgatgcacttttaccactatctgtgtttaattctgcattctgcacacctatcctttaggtcccaaagggccagtatgtctgctacaggggataggtgtgcaccaagactctggtgtctggccttggcctggagccctagtgtctctgagtccctgactgcctggggcgatagaaggagcaccagctttggagtcatgcgtgtgagggttcagatcaattccagtgcttaccagctggctgtccgtagccctctttgcacttactcctcatctgtagaatggggcttgtacccacagcagggggggtaattatatggattatctagaagagtgagcatagagcacctggcacaccatagatgaccagtaaagctagttctatttccacttctcctgcaggcctgcagacaccctgtccttcctcaccctaaccaccatggctctggagaacctagaggcgactagtgctcacaatgggcttcattcacagaatggctccagccactgactttgtttcaattcagccctgatactttagcttagactcttggttgtgcatttacaagccccctggagccagcttaaacaaaagggagagtttattaaaggaaccagccatgtttccaggggaaagggacgaagttttctatgcctcttcacatgctctgcattcttgctccctctgtttttctacacatctgattcttctcctcttgtaccacagactggctgcttctgcccccggtccatgtggcggaatagggatgcccatggtttcatgcctcctctgtccaagacatcagccaattccccctggggcgaaggggaacggtctctgattgacccacccatcacaatgagagaagaaaacattctccagaagttgcctttggcaaaggttttaaggttatatgtcagcccagtggttgtttagactgtgatgaaaagaaaatagaagaaataatatggaaaaagtcaacagaccgtgagatgtggagaagattatcaaagggtagcaccttatgttcgagcccatgacccatttccaatccttagcctgggcctggctcctgttgagatcaaggtgaaaactggccatgtcctcatttctgggcagggatgaagattcaggcctgacctatagctttaccttggatttgtcatttccctctctgtcccgggttcaatgaaaccacctgctctgttcacaatctctccattggccaacaagccctctggtggtcctccatgcttcctcccagggctgaggcataaaatctgcctcagtggcctgttatcacacagctgggaggacatctggggaggaacgaggccaagacatcctggttccttctcttctctcatgggggaacaggtggatgggcttggtgctgatccattatttcccacaagcatggggctggagctagggtattgggttgtggggagggtcccctgtttttgccttacagggtgggatgttccatgggggagatgggaaaaaatttgccaaagaggatctagccctgcttctgagccagaggagcccagcctggacctgggcctggggcagggggtggattcctgccattttcccacactctgcatagagattggatttcctgttgaaattgtatctttggattacaatcgtaaagttcccagcttctcaactcaagctgtttgcagcagctctgtgtagcctaagtcatcgtcattactctattgggttctgggagggaagatccggagtatagtggccaaatgcacaagctatggggtcagagagacccgaattcaaatcctgattctgtttgagaccagcctggccaagatggtgagacctcgtctctactaaaaatacaaaaatttgctgggcgtggtggtgcgcgtcttataatcccagctactcgggaggctgaggcaggagaattgcttgaacccaggaggtgaaggttgcagtgagctgagatcgcgtcactgcactccagcccagggacagagcgagaccatgtctcaaaacaaataaacaaacaaatcaaatcctggctctatattaactagccatgagattccgagtcaattaacctccctgagcttcaggttcctcatctattaaatgggtcaaataatatctgtctcataggattgctatgaagattaaatgagataatgcatgtaacacactgagcacagtgcctagcaaatgaaaagcgccccaaaattgattgttttatattactatctcattgttatctacccactccactatgtgggtttatagaggaaggagtcatggcctctgcccttggcagctccctgtcctgatggaggagacacagtgctgcactcgacaacccactggttggttggaggaaacatgggtcttgcctcagggagctcccattttagtggaggagatgagccccagcctgttcttcctgagtcctctattttcctggatccttgctcatgagccgtggtatgccctcagcctgcccctctgccaccagtccacccatctcctcccttttcccctgcagccaggcctgccatctctagaaagcccccatctctcctttctgtgtccttgggcccaggtgtccttgggttactgggtgacttgcttttcaggtcctgcctgtgtgtgccaagcttgttctcaagaagcatctccccaggatgctagttcctctctaaacaccgcccagattgcagacacaaaaattagacctgtcggtttgcacgctgtctgccttaaatttgcatttgattaagaagcaccagcgtcctcccacccatggttcttccttcccaaccttcttctctttgaagtgctccccccgcaccctgccccaccattctcccagctctctccctttgctgtgctcaggaaatcctccagttgggctcctctccgttgcctcggccactcccgcagatctgcttggcattctctgcttctggcctcttttccgaggccagctctgcagagtttgcctgggtacaatgtgttctcattgtgcctccaacagtgtcagttcctggagctcactgtcaggaatccagcagctggcttagaaatcagctgcctttgctgagggctcatggagatggggtgaggcctatcctccatttctgtccgcactagccacaagcactagctcatgtaggaaaccactagatgcagaataatctttgaaaagccctctcctctactcttcccatctcagtctctctctggaggggtgagggcaagagcaccccaccccccccactgcccaccacctcctgaggtcagctggatcaccttcactcctcccttggctgaaagacaaagagagggtaagaccagggtgcttcttagaacacctggctcctttactgcagacacacctttggagaatcatcattaagatgactgaattgcctctgcctccctgcccactcccagcccgacagtaaacctgctgctgcttggagtttttctaccatctacgttgcatcctccctcatctctcaattatctgtgctagtgttaaaaaaaaaagccattccatctgcctcaaactgctcttcttaagattttgggatagcagttttcctcttctggtttccagtcacttttgactatgactggtacccattttgattccttgaactcacgtgtaaaggaagtgaaggagcagggagctccgagggagtgggcagctgaaggccactcacccatcggtaagtccctctgaggtcagagggagcgggttgccagagggaatgagccccagaatcccaccattctcataaacagcccaccgctctaatcgctccttccccagcaacactgggcctccgatctgcccatggagaaggctgggaagccagcacctccttctccatctctacctccctcttgcttcttggctcccatatgttcagggaatgcaaactgacactagtatcagcctgagccaggcataattggaaagggaatctttccccacccccaaccttgtcttgcctccctccttacaaaaaaaaaaataaatcatatattatctcaagcagctctgttatgtaggaaacataagtctggaagaaaagacagatggggtgggggatggtttatgagggcggtcgagcaactgtcctttatatccactgaggagagatcaggagaaaatgatagtaacaagaagagcaagaaggactgaggttagactttaagaacttgcctttatgataaataagagccaggagtgatgggcggaggaagccagggccatctccctccatgcctatctccccagcagcccacatccttggcttactgcctgcctggaagatgttgcctacctgtaccctgggggagaaagagcaagtgggacagggctgctgaatattctgcctttctcctgggtgggagcggccttccctcactctcagctccctcctggcctgcaatttcaagggcctgcagattcaaggacttggggtttctgggaggcagggaagtatggggctctgtgtgggctccttggcagaaccagcaggcagccaccctccaccatgttccgtggtaggatttctctcaacggaattaaaaaaacaagagccaagaatagaggcaaggacgccatgctccctctccatgaagccaggcccccagagaggttcaagacacctctgggtcagaattcacctgagagtgtgggcgcagctgaggctgaggatgtcccctcacctctgattttaatggcaagccacaacatcacagcatcaaagctagatgagttctgagagattaagtgcaaactctttcattttgcagatgaggaaactgaggcccagagaagaacagaaacttgctaaggatcacctggggctcccctgactcctggtgcagtgatttccccactaaagtttaattaagccatccccttccttaggctgtaaagttaggatgccctgactgggcacacacagctggttcttgaaacaaaggagtgggctaagtgctgttcccaccctggcagatgttctctggagctgatggtctcctacagacagggaaggagtgggtgggaccatgtcagagccaggtgggatcatcatcccatcccatctgacagatgaggaaaccgacatgcccaaaagcaaaatttgcccaagtccacccagccggtgagtggcagatcagagaccccaatccaggtctcctgccatctattcctatcctgtgattcttcttggttcttattttagacagtggacccggggaggaggaggatgcgctgcctatcacagtagcacctcagcaaacagctgctgttggcctgacccatgaatttttaaaactgtctgaggttttagggtcaagtaacaaactcacctctccctccctgtggcttttaagcctcataaatatgcttttaaaagtcactccgcagttcctcccacatacagagactcacatcatcgctcagtgaaacctgaggggtggtcagagctgctttctatggctgagggtggtggttgagggatcctcttctggaagatgccccaagtgtagggacatgcccagaccttgatgttccagggtggaggccctcaccacgcatctgatgggccagtctcactggccagagtcccatcacaggccatggccataggccccaggaaattctgggtcattggtgtcagcttgaggcacttgaaaccatagcgcccatgtcttcctcctgctgagggatcctggggcccgggactgcctcaggtttccccttgagaaaaattaaggtggtgacagcagtgggcagagtatgaagtcatatctgccaaagtccaagcccctctctcaaagagcaggccagcaaggagggtttgggatttcagccccagatctaggaggctcccatccctccgcctcctgccaccccctaccagcttcctggcacccctaatctgatggctttagcaggctttgtactcaaacgggagtgagctttgcttccacacctcttaaaaggtgattttttaaggatgaaatgtgatgttcgttaatgggcaccttaaaagccttggcacagagaaccgtgtgccatggactggggcatgccagctccatccactcgctcatcactcctgtccactgccacccatggctttcctcctagggtctctctgcctgtgtcctagcccctccccatggtctcagcaccgcttacttgtatggggtgccgctgtggaaggcaccttctggggactgagactccaagggtagagaggtggtgctgggcgtgggtcgatgcagccccccaccccactgcttggaaggttggagcatggaagggtgaaggctgccgagagccacctctgtagtgtataaaattgacactggttcctagtctcgtgggcttttaacggtcctgcctgcctgttccagaccccattgtgtggacagaagggggcctttgggatccttccctccaccttctcacctcacctcgctcctctcagcatcttcattagctgcgttggggtcactcctgcagcttgcttccttttcctaactcctctgttgagcagagccatgggcggtgtgctgagaaacagcatcgggtccttggatgggttttctagggaaaatgcatgaccaatggcctaagcgtggctggacctagggtaggaaaagaatggaaggtagctgaggatggagctttgggaccctgtgtagcactgtggttaagatctcaggcatggttagcaacaaatggcatggggatcctcaacacctgtcgggtatctactatatgccagtctaggaatttcaacaatgaacaaatagacccattccttctcttcatggacttacaactttgtggggcagatggtgtggagcaaatgatcacagaatcctcaactcacattgggtacatgttatgtagggaagtaaagggtgcaaagatttggattagagaggctgggccagggagggcttctctgaggaggtgagccttcagccagggctctgaggctgagcaggagtcaaccaggcagagggacagtatgtgtcagcacagaggtccgaggaggctcaagtatttgaggaaagtggaagaaggccaccgaggtggcagtggtgcaacatgaagctgggaagatgggagggtgagagggtgggctgggccaaacagggccttgtagatgagggtcaggattgtgaattttatccctacatccagtggaaagacaagaaagcttttaattggggaaatgacatcaggtttgtgtttttccaaagtcactgaggctgctgtggggagagtaagtgagagaggcaagagtggtgggttcctggaagacactagaagctgttagagccatccaggtgacaccacagtggcctgggtagggaaacatcattgcagatgtgagggttggaggggcagtaaacagattcctgcaggctccagggagggagctgaagtggagaggctgaagaactgaccagggattccccgggaaaagagacagggacttgtgggcctggtgcactgtgttccctgagcccacagtgaggtttctggtgacaccaggataaggcttctgaaccccaggagcatctctgatcctgtgcattgattttttttttcatttttacttttttaaaaaataaaagtacttcattttgcctaaatacaaaagttccttatgtataaaggaaataaatttgataacaaaaccctttagttttctaatagggatacctttttaaaaaggtaagctcgggccgggtgcggtggctcatgcttgtaatcccagcactttgggaggctgaggctggcagatcacgaggtcaggagatcaagaccacggtgaaaccccatctctactaaaaatacaaaaaaattagccgggcgtggtggtgggcacctgtagtcccagtaactcggagaggctgaggcaggagaatggcgtgaacctgggaggccgagtttgcagtgaaccgagatcatgccactgcactccagcctgggcgacagagcgagactccatctcaaaaaaaaaaaaaaaaaaaaaaaaaaaaggtaagctcatctcagctgtacttagggcacatgagattcatataaattttgagctcaggaaagatggaggagcaactagagtgtcctgagcaggcagatgtggtggtaactgtggcagcagcagtgatggtggcagtgatggtgatggtggtagagatgatggtgatggtttgatgatagagatgatggtgattttttgttgatgatggcagtgatgatggtgatgttttggtgatgatgacagagatgatgtggtaatgctttctttgatgatggtggtagagatgctggtggtgtctcggtaatgctggtagagatgatggtgatgttttggtgatggtggtggagatgctggtggtgttttggtgttggtggtagagattatggtgatgttttgatgatggtggtggagatgctggtgatgttttggtaatggtggtagagatgctggtggtatcttggtgatggtggtagagatgatggtgatgttttggtgatgatggcagcaatgatggtggtagagatgacggcaatggttttggtgctggtagcaccaatggtgatgactagagcagtcatcctatctgcaacttcagaggcaaggttagtaaaggacactcactgttatggcagttgtgatgctggtcatttctgccccaagtgtgcccagttataagagctaaagatgatgtctaaaggacctacttacttcacttcttgaggcaaacggtattaccgagcccaggaccgtgctggatactgtggagttctagaagaagggtagaagtggtccctgccttccgcgagggtattatcttccccaggatataaccaagtgctaaatctcagtgtgccatctccctgtatgacattgatccctcttcatatgtcctttttacgggctgaactgaggagctccagatatgttaaggtgctccctcttcaaagccgacacctcccctccatacctgcttcctgccccaccccacctacacatacctctgagcaggtatgagacaggttagagtgggcaaatggaactttgttggaccaacagggaaaaatgtggacactgaggctaacagtgctacagtatgaccttgagcaagtcattctacctcctggggcctcaatttgctcatctctcctaaatagagaataatatttgctctaccctttctagctcaaaaagctgtgcggaggaccaaatgagatcatgaatgtgaaaactcctgcactcctaagcgttgggtggacgtcactgggagatgcagaccctgggcacgctgggtctctaggcagtgggcatttctcacagaatctcctagctatctggtcagcagacctggccataaggggctctggtctgggagttcccatggggaaccatgccactggtcacaataccgatgctggcttctatctctggtgagtaatgtcaggctgtctcgaggttaaaccttaaaagagaggctccatttctccacaaggagcaggcccagcttagggtaaaatgtcagagatataagactctctctgccatcctgatcctccgcatcccggcctctctcccactcccactctatcagcagtgtcccgtctctcctctttagcctgccaaagctttcctctctcttcttccttctctactttctctcaggactgaaccaagaactcactcacactgaggccactactaactgacaacagcctaaagcactgtatttgaaacgttttttctcccaccttgatcctccaagtcagaaatacatttttcagcaaactcagtacacacatactgagtcaaaagttttatgaaacaatactatgcacaatatatttaagttttttgtatgtgtgatttcttgattgtattgtatgtggtctaattttttttcaattgctggttgcaatccactacattgatttcatgatccacaaatgagttacagcctgcaatttgaaaagtccctggcctaaaagaaccttctttctaagcacagaaagtccctgggaactggttgtcaagacagtttacccagattttggataatagagcaatttctttgtgccaggccctgttctgggtgctttatgtataatagttcagtgaacccacacagcccttctatgaggtagatgttattgtgatcatcattcacattttatgggccaggaacctgaggcaaagaaaggttaagttccttatctaagctcttactgctagtaagtggcagaactcaagacgccgtgtgtttaaccattgggctctgctgcctttcagggtgtcatagaaataaggtggctttgcagagggatatacatgatgctctaagaaagcctataagaagtccctgtggtcagagcaggactcagatgcttctggaaggcaagcttggtttgcatgttgtaaaaaacctgccaaacagactgggctctgagaacttaccgcccaacagacgctcaagctcgactgccctgtggacgcacatagactgatggcgatgccagtggggacgactgaagcccttggggtgcatgttaggcccacatgtagaactctgcccactggccaatcagcaagcagtaccgaagaaaagcctgactctggtctttacaaaaaaaaatactgccgttaattttaaacacacctctttttgcaggctaaatagaaaagtgagcttaatctacactcttgctgttctttaatgaatttattgttttaggctctgtgagaatgcaataaaagttaaaaatgtatttcagaacacagtgcaaatgtgtctccgcatttgatggattgcttttgagtccaacacttccggcccgtgggcaggcaggccccacagatgggccgcggcatctacgagcagagcgagagtgcgtctataagggatggtcgtgggaggcacacacttatcagatttcatttctgttctcttctcttggcatagtagctggagagtggtaaaatgggagatggagagacagtgaaacagctgaagtagcagcctcaattatttacagaccagattgtcagcctcccaaaaaatgaaaattgacctcacatctctcttctccttttcacagctgggagggtcaggcacattactattggccactctcagcattggccattctcacctccccatccctctgcatcctcagctaagctcaatgcagaaattcaaacgcaaggaacaggccctgccctcagagagcccccattctgatgtgggagagagggcagaagagttcaagacccagatcgttaacaagggaaggcacaggcataggacagaatgtatgtagccgtgggcactgtaaggggcatagcagttgaatagcagccttgtctagagcctagatgtggaatattgcccaagagttgcactttgtaaactgagtctataaataccaagagaatgtcgaagagaagctattgaagccaggtagagttagggaaggattcttagaagaggtcaaacgtgaagggcagcagtcatggagaaggtgcttcatctgaaggtagggcccagtcagtgccttgaagcggcaaccaaagactaggaaagcctaagccaacatttctcagtcctgttggggactgcgccagccactgctctaagacctcgctgccaggcctggcaggtggccagcccaggtgtccaggtgcccagatgccccacagcaagccaaggcctcaatcctcccttcacttgattttctgtgagccttgcttgccagctaaggtgtagggccctccttagctgtggacgcagagccaagttaagtcgccatggtaaccctctggctgatggggacttgggttgccatggaaacttgtctaaaatcaaaaagtattttggaagaggggttgcagcagagaggaagggtggtgggggatgtctgccgcagtgccgcactacccatgattctgttctgtgcccttcttgggttcctcctggaatgagtgtgtgttggggggggttgtccagggcccagcccagggcttctaagaaatagtcattgctggtaccaggagccctcctggaggccctccagcaaaacatgtatgttaggccattcttgcgttgctgtaaagaaataccagaggctggataatttatttaaaaaagaggtttaattggctcatgtttctactggctgtataggaagcatggtgcaggcatctgctcagccttcaaaggagcctcagggagcatttacttatggcagaaggtgaagtgggagcaggcttgtcacatggtgacagagggagcaaaagagagagttgtgggggtaagtgccacacaattttaaataaccagatctcacgaaaactggctgggcacggtggctcacacctgtaatctcagcactctgggaggccgaggtgggcagatcacttgaggccaggagtttgagaccagcctggccaacatggtgaaacccaatctctactaaaaatacacacacacatagctgggtgtggtggcgcgcacctgtaatcccacctactctggagactgaggcaggagaattgcccgaacctgggaggttgagggtgcagtgagcggagatcgcgtcactgcctgggcaacagagtgagactctgtctcaaaaaaaaaaaaaaaaagaactcactatggcaaggatggcaccaagccatgagggatccactcccatgacccaagcacttcccatcaggccccacctctgacctggggatgacctttccacatgagatttagagggaacggcctccagactacaccaggtaccaatctgtccaccaccatgtcacaccaacatgtcctccatttccttggtgaatgcttgacagtatctttcagtgccaaatctgctccttgacaaaaccataaaagccacaaagttaatgtcctactgctgcctgtcccctgctcctgagatccctgccccgggatcctccatgcttatcgtctcctttctgaccgggcacttcttgtcacaaggccagggctggccagcctcgtgtaacctcagcttcctcttcaccatggtagagagataaaagtccctgcttttagacagtgcacttagcctgctcaaaggaactgctccataaacactactattacttaccattaacttacaacaaaaaatgaaccaggcacttggtaaggtgtttgtattttactcatcccagaggaatttgcacatttaaatatcgtctctttccctccatcttcttccccaagttacctttcctgaaagtgggatgatgtttaaaacaaagcgatggaatttgaggggtacaacccctacagttctgtccaaattcacttctctaaactcatgttctccctccactccaccctaaaccctggcctcctgaggcaacgaagtttgcctatctggaaccattttctgaagctggatggcagacggggagcctcaagagggaagaaaagaatggcaaacttttcattggcccagtggccggcctcataaatcatcattcataattagaattatttattcccaaatcaccatcccaagccccagtttcccctgtacctaaagctcttttcacttctagttcaagagagtcttgccccctctctgcgtctcaaaagtgatctcttctcttcctctaaactcacctgaagctttcaccaagtatgctggccggttctgcttcctaccctattgcctaccaaaaggagataattccagcccctctttctgagatagggtgttaatgaatccttactgaggcacagacctctggcctcctgcagagaggtcctcctggaagtgccctggggactctggagacctggcctcccagcagccactccctctgcttttaagaggaagctttagcctgagaaagtttgactccttcctgaaagctgcacttatttcagccaggctgggctcaggtttcagggctcagggactctttctctccctttctccttcccaagactgaaatgcagctgcccagaagtgctgaggaggacacagagtcggcttcctaggcacaggcccagctctgtcccctttccttgtgctgggaccttcagtggaggggaggagtcagggagcctcagggaggcaaagcaggccacacagcgagggaagcggctggggagagctgactcgcaggaaatagtttcaccccagtggtccaggctggggttcccggtagctcctccaccattctccccgcaacacccaaccagctctgcttttaaaaggtgaacacaatctttcagaagctgcagcccaagccctttctggccctggcgaaccttccccattcccctcttgccaaacatttttataccaaaataattagataattaataatcatgtcaaatactgtgtttctggcactccatactttttaagctttggaatctgtgtgtaatagatctaaatagcagcccacaaacttggccaggcaacaaacatcccattcttgattgtctttaaaccaatgtaattctacttctgagcccctaccctcctgagtggcaagacatttcaagtcagaattactggggtctggttgggcgcggtggctcatgcctgtaatcccagcactttaggcggctgagatgggtggatcacttgaggccaggagtttgagaccagcctggccaacatggtgaaaccctgtctctattaaaaatacaaacattatctggttatggtggtgcgtgcctgtaatcccagctacccaggaggctgaggcagaagaatcgcttgaacttggtgggtggaggttgcaggagccaagactgtgccactgcactccagcctgggcgacagattgagactccatctcaaaaaaaaaaaaaaaaaaagaattgctggcggctggcatcctttcccccaaccccaggctcaccccaggtccagaaggtctgagcaaagcttggaaaacaggaaaggaccactatgttgtgatccctgcaagtttcctcagtgcctctccagttctgtgccatgggacatggacttctttgccaaggccagcagcctctgcccaatgtcccttcctcctgtttaccccaccccgtccccctcagggtgtgggaatgcatctgactgcttgctcctgggactcacggtgcttttttcatttctagttcaggagagccttgcccactctctgcttctcaaaagtggtctcttcccttcccctaaactcaccatcttttttgtttgtttgtttgtttcatttctgagatggggtctccagcccaggctgaagtgcagtggcatgatctccgctcactgcaaccttcgcctcccaggcatgggcgacactcccacctcagcttcgtgagtagctaggaacataggcatgcgccgccacgcctggctaattttttttattttttggtagagatggggtttcaccatgtcacccaggctggtctcaaacttctgagctcaagcagtttgcccacctcggcttcccaaagtgctgagattacaggcgtgacccaccatacccggccaaactcaccttcctaatagcctgaagctttcaccaaacatgctgccccattctgcttcctattctgtccaatgtccccgaagtttagagttttgaaacctggtgacctgctcagaatgggagctggggagtggaattacacagagggaggcaccatgaattaaacatctcagaaatgtatcctgccaaatgtgattgcattttcgcaccaccctgataaagtaggtaggacaaatattaatatccccaaaaggtaaatgagggagctacgttatgaactgacttggcagtgagtttgtggaaatactagaacacaagtccgggcctcctacctctcaacgtaagctgctgctgccaaagcaagcctttctgaactttcctgaaagctgctgatagcgctccaatggctggtgtgtttcaagtgcttattgtgtgcaagaaactgaactaagcactttatgagtaatagtttgatcagtctttactccaactctttgaggtaggtgctcttgtccccattttacagatgagggtgttgaggcacagagaaggcaaggactccgctggaagtcacagagttgataattgccacagccaggatttgaaacctgcactcttaactcctctcctatagtgagtttcctagtaacttcagccccttcagcgaagaagaaaggagtgataaaggagtaactgtatcagcaattttgtttagctttctgacttcacccagcctccaacaaaagaggctgctttccaaagtcccaggctgcattcatccctgcaaattcattgtttcttaccacccactcaccaccacaacgaatctccccacaagctcaaactcaaggacacacctccctctgtctgtcccccctcccaacccaaactcaacagcatcagctctgagagaaaaagtcgaaggaggaaggctcccaccagagagcccgtgaggcatccagtggggtggagaggggtttggcagcccctcccctccatctgcttccagctgggacacaggatgctagggaggggaggctcccgtggagacaaaggtcggggagcccagaagggaggaggtggttaggatgctgggggtttggaggtggggctatttactgggggggagacagcaatgtgcaggagttacccaaatgaagccccctcctgcctgactgcagcggggagccaacctcctgagcctgcgggcagagaggccacaattaaggcagagggaggccagctggccctcaaagcacctttctcttcacaaaaccggcagtggtctcatttacaactcatctcccaaagggcttggaggtgcttggagaaccagaaaccctggtcctctaattaccggtgtgcatctgggaaagtgagtcagccacgtgaaaatgagcagcccagagctccttccacccctaaagggcaaggtcctgatttttccatctcagactgcctggcacccctgaggaccccctctgctgaaagctgtttgtaggtaaccttctctgtggtttctatagacctcctccttcctctcaacatctcccttctgaacccctacaaaccagttattgaaatgtatggtgcccttactatgtaccaaatacttattctatttaataactctgcacattgctgtcttcccccagtcaccagatacttcacgtgtcttaagtcctcatgataggccgacaaagttgaaattatttttgtcctccttctgcaaatgaggaaactgaggcagagaggttgagtaacttgcctgaagtcatccagctagtaagttttggaaaggggttttgaacaggtgtctggttcctggccactgcactctgctctctcagggaggctttgctttggagtgatgcaaagagggatgtggggcatggagcataggtttgtcattcctatataaatcataatacttgtaaattatttggaattcttctgtatgagagacttgtctgctctcccccatttattcagtgattgatttatatcacaatgtactcatgggagtgtttatcttatactctgagttataattcagtactatgtatgttagtctgttctgcattgctaaaaaggaatacctgaggctggccagtttataaagaaaacaggcatatttggctcatggttctgcaagctgtacaagcaaggcaccagcatctgcttggcttttggtgaggcctcagggagcttttactcatggcagaaggtgaacggggagcgggtgtgtcacacggcaagagagagaggaaggaagttccagtctcctttaaagaaccaaggctgggcgcggtggctcacgcctgtaatcccagcactttgggaggccgaggtgggcggatcacctgaggtcaggagttcgagaccagcctcaacatggagaaaccccatctctactaaaaatacaaaattagccaggcatggtgacacatgcctgtaatcccagctactcgggaggctgaggcaggagaattgcttgaacctgggaggtggaggttgtggtgagccgagatcgcgccattgcactccagcctgggcaacaagagagaaactcagtctcaaaaaaaataataacaaataaataaataaaataaaataaagaaccagatcttgggtgaattaatagagtgagaactcacccattatagagaggacagcactaagccattcatgagggatctggccccatgactcaaacccctcccacctccaacattggggatcacatttcaacaggagatttggaggggacagaacagccaaaccatatcactatgttttttattttgttgctcaaattaaatttattttgttgcacccttcgcccagtgggggtctggagggtgctgctctagcctttgggacagagaaaggagaatggtgggcagggctccactgcagaccagctgggctggcctgtctccccagctgtgatcgcaacgccacacttcttgcgcccatgcttctttacttctctgtacctgaccctcaccctggttcaatcgcaagtcttgttgcttctgcctctgaaatattacattgtctttcgtccccagccattgtcctattcacaccatcatctccttcatgaatgtttcctgacttccctccttccagttcacccccatacactcctctgggggtgccttcctaatgcacagctgagaccatgtcactccccagaacagaggccttcagtggcttctgcagaataacatcctgatttcgcatccagcatttcaggcctccacaattgcactttctcacctttctagcttctcctttctcttccctacccaaaccatctgccagcatttccctgagggaattctgtgaaacttgttaattggcattacttaaaaataaaagaccctgtggtcaaataaatctaggaaactctgggttgagaaaggttaaacagattttctgatttggagtctctgagactttgtatactaatggggttcgtgagtccccaggaatgggtttaaaatatgcagaatctccccagcgtgtttgtccatgggatcctgctttggcagaacactggtagggccagcagtccacgaggccatgtgggaacattgcttcctgttcggtccagctggactccttgctctcccccgagtcagcctcattttctggcctctgtgtcttggattaagcaatatccccagcctggaaacacctacttcctccatcttcacctataaacatcttacccatcctttaagaatatttttccagccaggcgcagtggctcacgcctgtaatcctagcacttggggggccgaggggggcagatcacttgaggtcaggagtttgagaccagcctggcaaatatggtgaaaccccatctctactaaaaatacaaaaattagccaagggccgagtgctgtggctcacgcctataatcctagcactttgggaggccgaggcaggtggatcacctgaggtcaggagttaaagacgagcctggccaatgtggtgaaacccccatctctactaaaaatacaaaaatcagctgggtgtggtgatgcacatccgtaatcccagctacttgggaggctgaggcaggagaattgcttgaaaccggaaggtggaggttgcagtgagccaagatcgtgccactgcactccagcctgggtgacagagtgagactccatctcaaaaaaaaaaaaaaaaaaaaatcagccaggtatggtggcacatgcctgtaatcccagctacctgggaggctgaggcacaagaatcacttgaacccgggaggcggaggttgcagtgagctgagatggtgccattgcactccagcctgggcaaaagagcaagactccatctcaaaaaaaaaaagaaagagaaaaatgttttccccatggtcccccacccctaccgcagccaccaacctcttctgaggttcttttgaacctttgtgacaatgcctctgatggcattcactggctgaaactattttagcttttttctccatttgtctgacagcagtcccccactctccctggtcaggctctaagaaccttggtgataagggcagtgtcactcattatcttattttctttagcatctactacatattgtagttctccttggcatactcaagggattggttccaggaccactgacttataaccaaatctgtgcatagtcaagacccgcattcagctctgcagaacctacgtgctatgaaaagttggcccttggtgtaggcagttttcacatcccgggaatactttattttcattacatgcaaggttggaaaaaaaaaaaagtaatgtgtaagtggacccactaagttcaagtccatggtgttcaaggggcaactgtgtatcaacctggctgtgcctcagaaccatcgatgtaatttttaatttcttactaaacttttaatattagaatagttttagatttacagaaaagttgcaaggctagtacagagggttgacataccccacccccgtttcccctgttggtaacatcttacattattagggtacctttactgcaattaatgaaccaataatgataaattattattaacttggaagtccagactttatttggatttacctgggttttagctcatgttctttttctgttccaggatcccatctaggataacacattactctcagtcatcagatttccttaggcccctctaggctgtgacagtttcttagactttctttgttttcgatgaccttgacagttttgaagagtactggtcaggtattttgcagaatgtcctgcagtggttttaactgatatttttctcatggctaaacagggattatgtgtttgggggatgaagaccacagaagtaaaatgccattctcatgacatcctatgaagggtctataccggcgatccccaccctttttggcaacagggaccggtttcatggaatacaatttttccacggacaggggttgggggatggggtggagatggttttgagatgaaactgctccacttcagatcatcagacactagattctcataaggagtgtgcaccctagatccctacaatgcgcagttcacaatagggttcaccttcctatgagaatctaatgctgctgctgatctgacaggaggtggggctcaggcggtcatgcttgcctgcacactcatctcctgctgtgcggctagggttcctgctgtgtggcatactcaccttctgctctgtggccagtactggtccatggcctggggattgggaagccctggtccatgctaccaacatgacttatcactgttgatgttgaccttaattatctcgctaaggtggtgttcattgagtttctccacggagtgttactgtcctctgtcccctcccgccctcccccatttccatagtgtactcttcagaaggaagtcactgtgtgcagccacgttcaaggagggcttcacctcctggagggggagcgtccacctaaattcttctttatgggagatttgtctcttctcccccattcattcatcattcattcattcatttagatcagtatgttcttgtggatgtttatttcatactttgagttataatccagttctacattttttattttgttttcaaaattgtttcagctttggctgttaggggagcacttttaactggcatctgtgtccctttgacatactccaatctttatttacatatttatttccttgcttttcggccctacaagatgctctaggttcattttgcacattccctgccccagtgctccaagaatcagctatttctccaaggaatcttagttcctttaatgggaggaggtttagaatctgagatctgagtgctgggtgtgcctattgctatcactgtggtgcatagacctaggaatatatgtgtttatattaacccatgtatgtaaacatagctgtctatctctccatatatatgtgatatatatgtaaactgtgtgtgtgtaactaaatattagttaatactgatgtctgcaacgctaacctaatagcacgtggttcattctaaactttcttcctttatgcagcctttttttttttttttttagacagagtctcactcttgtcgcccaggctggagtgcaatggcttgatctcggctcactgcaacctccgtctcccaggttcaagcgattctcctgcctcagcctcctgagtagctgggattacaggcatctgccaccacgcctggctaatttttgtatttttgtagagacaggggtttcaccatgttggccaggctggtctcgaactcctgacctcaggtgatccactcgcctcagcctcccaaagtgctgggattacaggcgtgagccactgtgcccagcctatgcagctttaaaaaaccccaattcttaatacaaaaaattagctgggtgtggtggcgagcgcctgtaatcccagctactcgagaggctgaggcaggagaatgacgtgaccccggaagtggaggttgcagtgagccacgatcatgctactgcactccagcctgggcgacagagcaagactctgtctcaaaaaaaaaaaaaaaacccacaaccccagttctggccgggcgcggtggcttatgcctgtaatcccaactgtttggggaggccaaggtgggtggatcacttgaggtcagaaattcgcactggccaacatggtgaaactccatatctactaaaaatacaaaaattagcctggcatggtggtgggcacctgtaatcccagctactcaggaggcagaggtttcagtgagcggtgatcacgccactgcacctccagcctgggcaacagagtgagactctgtctcaaaaacaaaacaaaaaaaacctggttattctgaatcacagtcttttaaggctgggccaaaggctacactccaaaggctgagaaacactgtagcaagcactcaaatgcttgctaaatttaattgagtttagagaaactcagaccagccccatcacagatgtgcaggatttccagccttggggctgtaaggcaaatgagctcgcaccttcccccaagtgatgctctgtaggaaacagcttgtaatcattgagaaggtgtccattaccccatgtttgggtgtttctgctcatttcctctgtatctggttccctgaacacctgatatttcctgatgtgaggccagactaactgggatccgttaccgcctgtggcagaatcttcggtgacagtccctgcctgtcccccttggcccagcagccagtacatttttcctctgtggtgataatcagggcatgtatgtgactctaaaccaagtccacaagacttgaaatgacttacagatcattttacaaatgaggagcaggtccaggaaacatagccagctagtggcagagcaagtagaagaacctaatcttcctgtgctcttcgtatccacgctgaaccccgtccattcttctgaatgccctgggctggaattgtgatgatacatgatggatacatgggaaactcctgagctgcatgtctttaaggccactgtgaactaaaatacccctgaatgcagtcttggcttgctttctgcagaatgtccctgtaaagggtacctgagacagctgcagatcaacatgacaagatgttctcagctcactgcttttatttcacacacatctgaagctccagagccagagaagaggctgtggagagatgcacacctaataagcaccgagggacagctgcctggcccttctagatggaagggagtcatgttggtcctcagagaaatccaggcacccatctttagcaccttcactcctcccccaactgcatctgcccctcctctcaatcccccatactcactcccctcaagctgccctcttgctgccttcatccctgccccctcagtattccatccagaccagccctcccccagggtaccatgctctaacattatctctcacaccttccccaggtccccatcaaaacacccatttctttagtcaaggtgtttggacagcagtctgattaaactataggacaaattgcttcagaaattcagacttgtcatcccactttgaataggtggggagcaagcccctgactctaggcatttggatgcccagttgttaactgcactggtagatactttgtctctagtgtgtcccagacatttcctgaccacatttctttatgctgaactgaaaatcttgtgatcttgtttcaagattgcattgatttgcatctatctcctatcccccactccaacccatttgcttatttccatagtttctgtaggcaggttttctcttgctagttatcttgccacctttgcctcctaaagagcccttaaattggcttccgggcagcaatctatccttttctttctggaaaatagcccaacccctgcagcctacctctcctaccagcctcagactgcactcaccttcccccactgtccacagcaggaaggacagatgacaggaggaggctcacttttgctgccattgcaaaaacctcgagcagcagctgctttgtcactcaattcagaagctccttcctggtgtgaaaggtattttgcaattatgcatagttactcacagttacccattaacagaaacctttcagctccttgccagcttcatcttaaatgctttttcctttctcccttcagaagtctttataagcatacggtatttaggaaggtctcctttgccaatatatacagtattatataaattacaacatggagtgactaactagtggctctccctctaaggattttaccaccgaatccaaatatatttcactgattgcatctaggcagctataggagtgttttataggttgctttttttttcccccagggggaagtggctggaaggtggcacaggatatgttctctcttaaatcatattaccactcaaccaaggatacatctattgtgtatccagcctcccacctcctttccttcaatgggaggattggtaagagcttaaagctgaggcccctctggagacccctaggttcgtaaccaaaagggaccaggatggatggggtttcccacttatgataataataccaacaataacaactatgatatgagtgcctgccagatactaggcactgtgctagcacttaacatacgttatctactttaatcttcctaatagcccttagaatatacataattatctctgttctacaggtggaaaaaaaatgagacttttgaacataaagactcttagttaagtttgcatatttcatggtagagccaagacgccaacccaaatctgtctgattttaaagctaccacccacctaccctggatattggttcggagtcaactagggccctaaaactagtgaacatggtgccccaccctttcctgaagcctggcatttgtggcctgggaactgatgggagagtatgaacatctgagggcgggcaagtttctccaaggccctccctcagatgggggaagatggggaatcaaaggttctcattttccctccaaccacctccagcagtgtcatcccaaacacgcctgattctgctgtatgtaattaacgaggaatgactgcccagccatttgatttctaattgccacataacatgaaagtgacaatgcagatgattacatgtgtcagatgaacttggttgtaagttttatttaaacactaaattctttggctgtgcactcagcctttgtattactcacgtagcaaggttgtcggctcttcatttaaagaggaagagatggcaggggtgccgtcaactgttctgatgagagcaggtccttcctggctctccctgtgtgccaggccttggaccctgggctccttggtggggtgagggtggttagggagggtggcactggagcagagtagaccatggcaggttagtgcttatggaccaggtaaacctcttcccaggagggacgtgaatctgcacagcttgtggtctccctactcccatggaatcaaggagaacttcctggggaaaatgggatgttttgaagaatctgttgaatgaaagagtgaagaagatgatctgggatattagaaatgataatatttctctgaataaaggttttacacacaaaatatgggcaccacataacctgatcagagctgaaacttagccatccatgatatttacatcctgcccactgttcaaaaccaggaatccctttttgcgggcttttcattcaagggaagaggctcagatatcacacagttatcactgacacccgcccccatcgaaaataattattcagggattctgagagccaacgtaattagtccaattaatctctagcgatgaattattctgtccgataatcgtcttcggaagcaaaggattcattagcgtctctggctgacagcagggagtcaaatgtccttttatctctcttccctgtccctgatatgatagaatgaaattggctctcactttgataaattctgtctctattgaaaaggaggttggttagggcagcagcagaggctgggacctaggttactagacgtgttgcctgctccacatgcactgctgaccttgagtttaaggcctcagtttatcccatggaaacatggggagacttgagtgcaagctttgtgatcagttatcaaattaaccaggtaccttcatgggcttccaagaggcagttaatcccagcacacaccctggaagaacatgcccttctctgctgagcattctcaacgaattctaaagaagtcctccacctttttgtaggaacttactttacataatttagtcatattgaaggcactaagtgatgagtagaacccaaggtgcctattgaggtgcccatcaaaattccaacttttactgcacaaattataggatacgaatccaattatgaatccaaatgtatttcactgattgcatctaggccgctacaggacagttttataggttgcttcttttttcccagggggaagtagctggaaggtgggacaggatatattctctcttaaatcatgtcaccactcaaccaaggatacatccattgtgtatccaggccccagctcctttccttcaatgaggtggaggattggtaacagcttaaagctgaggcccctccagagactcctaggttcataagcaaaagggacaggatggacaggctttcctacttacaagagtagcattcttgcctgttctgggggttgtttttaattgtcttgctggagcacatataccctttccttatggtacataagccctgactctaggggtaacacatatggagatctacctgtcctgtggccgcccaagaccacgcttctgtttgtaccttcccctaataaagcaccttttattaaatacaacaacaacaaaatctcaacctaagctttgagagagatgtgcgattgggggagtgcggtggaagctctcctaggggcctcagagcagctgggttggagattctgctccccagagtgtgtctatttcctccatggcctgtctgtggcagagtgctggctatttcctccgtggcctgtccgtggcagagtgtgtctggttcctccgtggcctgtctgtggcagaatgctggctatttcctccgtggcctgtccatgcagtgtgtgtctgtttcctctgtggcctatatgtggcagaatgtgtctatttcctccatggcctgtctgtggcagagtgctggctatttcctctctggcctgtccgtggcagagtatgtctatttcctctctggcctgtccgtggcagagtatgtctatttcctctctggcctgtctgtggcagagtgctggctatttcctctctggcctgtccgtggcagagtatgtctatttcctctctggcctgtccgtggcagagtatgtctatttcctctctggcctgtctgtggcagaatgctggctatttcctccgtggcctgtccatgcagtgtgtgtctgtttcctctgtggcctatatgtggcagaatgtgtctatttcctccatggcctgtctgtggcagagtgctggctatttcctctctggcctgtccgtggcagagtatgtctatttcctctctggcctgtccgtggcagagtatgtctatttcctctctggcctgtctgtggcagagtgctggctatttcctccatggcctgtccgtggcagagtgctggctgtttcctccatggcctgtctgtggcagtgtgtgtctgtttcctctgtggctcgtctgtggcagaatgtgtctatttcctctgtggcctgtctgtggcagagcgctggctatttcctccgtggcctgtccgtggcagtgtgtgtgtctgtttcctccttggcctgtccgtggcagagtgctggctatttcctccgtggcctgtccgtggcagtgtgtgtgtctgtttcctccgtggcctgtccatggcagagtgctgggctccaggtcagcaggtctttgctttcctggtctcaggctctcttccccaggaaaatgaacattacacatgggtacgagattttgcatatcacttcagtgagtttctagaccctctgttaaccctctagaccctctgcatgaataactccagatattataatacattgatcctgttcttgaggaacttaaaatccaggaagtgaagcttggggagggggagttgttaatgttaacggttcagcacaacagaaaggaggtggtgtgataatggagtgggtcttaatggcattttgggtcagttaattctttgctatagagggctgtcctgggcattgtaagatgttcagcagcatccctgccctctactcactagatgccagtaacaccccctcccaagtcatgaaagtcaaaaatgtctccagacatcaccaaatgtcccctgaggggcaacatctctgttgagaaccactataatagaggcaccgtagtatgctgagcctcagcggaaggtgtggtcatttctgggtggaaggaccagagaagcctccctggaagaagtggtctgaggtttaggaagcaaaccaaaaggcagacttttttattttgttttggtcagctttttatccctagagtctaatatggtgtttggcacatagaaagtgcagagaatgctcatcaagtacgtaaacaaacaaatgaatgaggaagggttgaacatgcagaaaatggaaagggaaatgcattccagattaaaggactagcatcagcaaaagctcagaggtggaatgaacaggtgtctctagggaatcacaggcagcccagtccctgttccatggataaggaacagaatagcggcttgtatgaccctggcttaggacgccgtggaatcgccttttctggagatgcttaagaaaagttctgcctgaaggaaaggaaaaggagtggtttatagaactgcccactaattgatcacaactccgtcctgataaacatggccatggtcttggaatatttctcaacacagccctctaagaagttactaccagtcatttggagttggaatgccagttgcacctgtttaactccctgactgtggtctagagacctcatgtcagaactgggggctgctgttctgcttgaagccagcccagaaagggaggcattagcctctcttggtcattcttcacgctttgtgtgtggctccattttccaggccatatctcttttccctttaccctgccccattccttctctgctgttgagctgccttgtggctgagttctcgtctccctgctgtctcacccgttattcaacgagcctgtgttatgtgccctggagatacagccatggacacaccagagttgctgcttgtcaggtgtggatatagagaagcaggcaggcaattacattacaacgtggtgaatgctgagttgtgggtaacagaggctgctgtagggcagagcagtgtcacctaacagctggttgaggaaggctttgggacctttttaggaaaagacccactgaaagtagggtgctcaggtggagtgacagatagctccagtttataaatctggaatggtgagttttactgtagttttttcaatgtgtgttaaagagttgtgtgtccagtaaaatatatatgtctgcctttccagggaaaatcactgtgactccttggtaacaggagtttgtaatggtctggaaaatgcaggaaaatctttagagtgagttcctggtctccattaaaagcatttatggtgtctggggagccatttccccctgatttgtgtctgacaggggagcactgaggctgagatatcagggaggaagacaaaggctcacatatgtgacaagtcaggtgttcactgggaacacggcatggaacagggctatctctaagtctgtctgtaggtaggatcagaggcagagccctgcagtgggcacctacagagagagaagaatgaaaagcatggcctgtgcctccagggagtcaagccagacacttaccaaatcaggagaaactggcagagatagtagctgctggtatttgagaggcagaaggcaagagttgagacaataagccaatagggaagtggggtgagagggattgcatgagatttcccaaaggaagtgagctgtagagatgggatggaatgggatggcagggcaggagagagaaggctatagggtggcaaatggagacatgaggctgcctccctgtccatctcttaaccagaggactgggaggcgggacaagtatggcaggtgagtgggtggaggaggtgccatctgactatgtgcccaggggatgcatttgtttagcaggcctttatggaaggcctacaacatatcaggcactgtgccaggtgctaggcattcaaagataaatagcatatggcctttgccctgaaggcagatggatgtgtaaagaggtgtgggtgatcaagtgatacgcaggctgtggtagaagtctgttacaggctgcagcagggaccctaaggaaggaatagtgatttctaccaagaggaggggccagatgaaaggcagcctgcattctccatgggaggaggctgaatggaggctgctcactcaccatcactcgggcagcatttcctgggcagctgctgtgtgctgcccagtgctgcgagggtgtggatggagctacataagggatgtagtgtctagtggaggagacaagaccagcaggcaaaaggagttgtcactgcaaaggcagtatgtgatcgttgatgagaggggctcagagatcaaatgttccagagcttgaaggggagtgatctctggagtggccaaggaaggcttcttggaggaggtatgactggaattgggcattgagggctggggagaagtgccccagcagggacggtcttttagatggaagccgtaggagggatggaggaagcaaagatgcagccaggcatcggcctgaatgggcaggagtatgtgggacactcatggaagatcaggccaaaaatgtctgtagagggtcttgtatgtcaggtcaaggactcaaatgccatctgagagatgctgaagtctcatggtgcagagactcaagtttgcatggataagatgtgcttttagacaccttgggggctgggggctgggggcaggacctgtctgaagccatctcagccatcccccggcctccagccagggcttggtgctcctgtacaaaattctgtctccacagtgtgtcccccagtttggcttcctggtgggggaggggacacacacagacatcaattcagtcaagactctgctcacgcctgtccccaggagcaaagccttggcccgctgttcccatggcaaccgccagtcagtgctgagcaaaggagggtgccagaacacggagagctggaggggaccagcagccccctagtcatcacagtcatcactgagaactcccccagttggggtgtagaggcataggggaagtcaaagcaatggctgggaaaccttgagggcaaagggactccctttgttctttgaaggagggaaaggaagtgctgaatggagccaggcagctgatttcccatcgcttctctcatccctccttctgagcctagggtgccccctttgcgtcctctggctcattaaagatagatgaccctggggagggtgagggccggggtcaccagctgctggggcttcttgccctgagttaggctggggatcatttgcagggagaatgcagccaggaccaccagccctggctgcagagggaggagggtaagtctgggaagctggccccagtgggtgatcagcaacatgtccctaagaataggtacatgctattgacaaagatgagaagtgaaccgggagccgtaaatagccaggagcctgtgttctctgggctctgtgttctgtcggttgcttattcattgaaagtcagggatgggcgagatgcagtctccagagtgacgcagtgggacgagccctggagctggagacagagaagctgggttctaatcccagccctgctgctttgtaactgagacctaaatcaaattgcttatcagtctcttcagctgccaaacgaaccaagaagctgcctcacaggattactgaaaggctcacacagcaggaggaatgtgaaagaagctggcacacagtaggcatttgcctccttgcttccaaatgtagagggacagtagagatcgtctgccaaaagggttcatatatccaaaaggcagggttggccagaccctgagtgctcatgtcgcttgtccactgcctcctctggagagcctctggctaagcctagctttggcccagctcttaagttgccccgggaccagcctcttccatgctcaggcctcttggcccccctggatgggctcagggcaaaaggtgaacagcaaatgccatcaggcttttccctgtgtacccagagccatgctctccccatgcctgctcctccaccgagggctctcttaacagctttctcctctccgggcccttagcttagggcctcacttcacctttgccctgtgtatagttccgggttcaagctgaactttattcagcacacgaggtgggggcttcctcctgtcaccccacctctgcccttgtccgagggctccagccatgctgggttcttcccagaactccaacacatttgaccagccagggggaaaagggggtatggggaaggcactggggctctgtcctggaaagatgtgttgtcgctgaactcaggtgcagctttgtagcttggcagacctggaaaatctctctaaggcatgtttgtttcctgggaatttggctctatttacttggggaccaatccgaaggtgcctggtgactgcagcatggtgcctgggccaccgtgggctggatgcaggccctggagggcttgggcaagggctgagagaaggcctggctgcctcccaggcattccctgacctccactccattgcctcttcttgtaccttcctggtctcactttgataggggtccaaaggctccccagagcagtcccaggcctgagaccccaccctgccaccaccccggcaggagctccggctgcaccgctggttctggagaaggcccagcacatctcctcctgctcattccctttgctttcctcttcgtatccctgccctactctcaggagagcagaaatggggctgattccttctctaagaaggagaaactgaagcccacaaaggctgagcggcttgctcctgggcatcggaagaagcggggactggaatccaggggtctctgcatccagccttgcacttcccttccagatacatgggggccaggtagtggggacagggcagactcagggagtgggagtgggagcctccagtcccacacatgtgttacccatgaaggagagggtggggttgggagaggatgggagcaggagagggtgggagcgggagagggagtggccctgaagctctgcttttggctgcagctggttcccaggctcctgcattggaatcgggcggaagaggaggattctgaatgatctgattaggcagtcgagagcagccatggatcttggcaagcaggcgacacaacctgcctgccagacgctctaggaaggttcttccgaggccagaagctttacaggtttcagagctgggacaaagcccagtgaggagaaagggctccctcgaggaagcattggacaggagcagtgactgccagtgaggcctggactggctggcagcccgatgtcttggaggtggagaaatgcttggcctggctggtggcccatgactccctgtcttctggcagttctgtatctcattcattgcctgcagtggaggacaggcttcattctgtgagctgtgaggagcgtgattccagcatgagtcaggaagggcctcctggcgtccgcctctgttgtctttttggtcatgtatcattcattttggaaaaagcacggacttcagagaagactgggattcagatccctaccctacaagccgtgtgaccttaggaagttaactgacctctctgagccaaacatctataaaatcggagtactcatacttacctcagccgctgcattgcaaggacagaatacatattcgtgtttcgcaccatgcctggcgcacactcgggaaatactgtcttttttccttttccttcccttcttgcctcagaacattgcctgcttttctcaccttctgatgctcactaaacaaaaaatttttttaaatgcaaaaactcttcagcacatcttattaagtctcactgtaggaattctctgccttcttaattggaagtctcccttaaagctaacctagctccttcttgtttcaattgatacccaagccctggagggagttccggggccttagtctaagccgagtccttttggtgagcagtggaaccatcctggaaatgggggggcatgttggtggcagatgggccgagtcacagggtccccagtggtgggcagtagaggggtgaagggatcagtgacacagcaggcttttccagaaataagaaccctccagggaggcagccaggcagggtggatgtcagctttttgatggaggagcagatgctgtgcaggctgaagtggggcaggggaagagggaggtgtgaacggcagagggagcatcgccttctgggcagccctaccttgctcataccttgcccccagctttctctctcataatcctcctcaaagctcaaccttttcctctttatcctcaagcctggctctgagatcagcaggctgtgtcgtcttgagcaagtcactgctattccagtgcgcctcagtctcctcatctgtgaaatgacctctgaggcttgtgccagctctgacttttgatgagttttaacattcagcctcttctgggcttgcagcagggctgtctatactggtccatacacaggctggccagaccttatgccagcagcccagtcaccctgccatatctgctttgtctcccattccatcccattcccatccccaaaccacacctcttctcctacggtgtcactttaaaacaatgtgtggagcacccactgtgtttgaggtgtcagaatgggatttggaatgaatatgccaggtctctgcccttcaggaggagaaagacatgaaatctaaacaacagctcagctgttatttcattttataggtgagagaactgaggcccagacattgaataccttgcccaaggtcacagggcattgaataccttgcccaaggtcacagtggtaaagctgggatttgacaaagactctctagctccgtgtcctgtggcctctcgtcgtctgatgcccagagccagtccttcctctcttgtggctcagcctttgcataggctgtatccttcctgaacctgagacttgccctgttgcctgtggtcagattcattctttcccttcctttggtttcagatcagtggtcacctcttccaggacctcccctgtgactcctctaacccacccaccttatcacttttctagtcagtccccaacagaagctctggcccccatgcacggatgatgcctgaccacagctgcacatgccaacctcttggctgcaagctccctgagggcagcccctattgtatgggtggactcagaaccctcaagacagtggctaagtggaagccagtggctgctggtcagggcacagcccggcatgatctggtggataatcagtgcttcagaggcggtgatgttcactcatttgatgtgtctcccatttgaaatgcagccacttccaagggaatcacgtgggattcacatcctacatagaagactgcaaaggcctggtttggagaactcaggaaaggtctgtagccaggagacctgaccccttgagttctggtgcaggcaggagtgtgataggcagaactactcccatcacaacagtggcatcttcagataaggtgccttttgtcacttggccactggtaggttctgcgaaaggaagtgatgtcagggatttagggacaggcctgggggtggagggctgcacaggagtgggagtgggcaggtgggtgaagtcaaatgacaaaagcctgcccttacctttgctactggttctcttctgccgctaactcaaatatatatcatctggcaagtctctgtctaactcattctgggcctcagtggcagggccccagaaacctgaagacgggcccgctctgtaaaatgaacttgaaagtgcgccaaaggcaaacactttatagaagaagagccagtgatggcacaagacagggatgccctctctcaccgctcctattcaacatagtgttggaagttctggccagggcaatcaggcaagagaaataaataaagggtattcaattaggaaaagaggaagtcaaattgcccctgtttgcagatgacatgattgtatatttagaaaaccccatcatctcagcccaaaatctccttaagctgataagcaacttcagcaaagtctcaggatacaaaatcaatgtgcaaaaatcacaagcattcctatacaccaataacagacaaacagagagccaaatcatgagtgaactcccattcacaattgcttcaaagagaataaaatacctaggaatccaacttacaagggatgtgaaggacctcttcaaggagaactacaaaccactgctcaatgaaataaaagaggatacaaacaaatggaagaacattccatgctcatggataggaagaatcaatatcctgaaaatggccatactgcccaaggtaatttatagattcaatgccatccccaccaagctaccaatgactttcttcgcagaattggaaaaaactactttaaagttcatatagaaccaaaaaagagcccacattgccaagacaatcctaagccaaaagaacaaagctggaggcatcatgctacctgacttcaaaccatactacaaggctacagtaaccaaaacagcatggtgctggtaccaaaacagagatgtagaccaatggaacagaacagaggcctcaaaaataacaccacacatctacaaccacctgatctttgacaaatgtgacaaaaacaagaaatggggaaaggattccctgtgtaataaatgatgctgggaaaactggctagccatatgtagaaagctgaaactggatcccttccttacaccttatacaaaaattaattcaagatggattaaagacttacatgttagacctaaaaccataaaaaccctagaagaaaacctaggcaataccattcaggacataggcatgggcaagaacttcatgactaaaacaccaaaagcaatggcaacaaaagccaaaatagacaaatgggatctaattaagctaaagagcttctgcacagcaaaagaaaccaccatcagagtgaacaggcaacctacagaaagggagaaaatttttgcaatctacccatctgacaaagggctaatatccagaatctacaaagaatttaaatttacaagaataaacaaacaaccccatcaaaagtgggcaaaggatatgaacagacacttctcgaaagaagacatttatgcacccaacagacacatgaaaaaatgctcatcatcactgggtcatcagagaaatgcaaatcaaaaccacaacgagataccatctcacggcagttagaatggcgatcattaaaaagtcaggaaacaacaggtgctggagaggatgtggagaaataggaacgcttttacactgttggtgggagtgtaaactagttcagccattgtggaagatagtgtggcaattccaaggatctagaacgagaaataccatttgacccagcgattccattactaagtatatacccaaaggattataaatcatgctactataaagacacatgcacacatatgtttattgtggcactattcacaatagcaaagacttggaaccaacccaaatgtccatcaatgatagactggattaagaaaatgtagcacattgccgggcgcaatggctcacgcctgtaatcccagcactttgggaggccgaggcgggtggatcacgaggtcaggagatcgagaccatcctggctaacatggtgaaaccccgtctctaataaaaatacaaaaaattagccaggcgtggtggcaggcgcctgtagtcccagctactcgggaggctgaggcaggagaatgatgtgaacccgggaggcagagcttgtagtgagccgagatcctgccactgcactccagcctggggacagagtgagactctgtctcaaaaaaaaaaaaaaaaaaaaaaagaaagaaaagaaaatgtggcacttgtacaccatggaatactatgcagccataaaaaaggatgagttcatgtcctttgcagggtcatggatgaagctggaaaccatcattctgagcaaactatcacaaggacagaaaaccaaacactgcatgttctcactcataggtgggaattgaacaatgagaacacttggacacagggtggggaacatcacacatgggggcctgttgtgggggtggggagctgggggagggatagcattaggagaaatacctaatgtaaatgacaagttaatgggtgcaacaaaccaacatagcacatgtatacctatgtaacaaacctgcacattgtgcacatgtaccctagaacttaaagtataataaaaaaaataaaaaaagaaaaagaaaaagagccagtaatattagcacagaccaactccagtggctctaagagtgctccaaggtggtggaaacttctatatctgtgctgcagtagctacgagctggtgtaatgatgtggctattgaacacttgaaatgtggctagtgcaacccaacaactgaatttgaaacttcattaattttagttaacttaaatctaaaagatgctcaatatcattaggcactagggaaatgtagatgacacctacagtgagataccacttcatacccactggatggctatcaaaaagagacaatgacaagtgtcagtgaagatatggagaaattggaactctcatatactgctgatgggaatgagaaatggagcagccactttggaaaacagtctggcagttcctcaaaatgttaactataaaattaccatgggacccagtattgtactcataggcatacattcaaaagaaatgaaaacatgcatccatataaaggcatggacgtgaatttcatagcagcattattcatactaggccaaaagttgagatgacccaaatgcctatgaaatgaatagataaactaaatgtggtatatccatacaatggaatatcattcagccctgaagaggaatgaagtagtgatgcttgctacaacatggaggaaccttgagaacgttgtgctaagtggaagaagccagatgcaaaaggccacatattgcatgattacatttctatgaaatgtctagaataggcaaactcacagagacagaaagtagattggtggttgccaggagttggagcaaggggagaacagggagtgactgctaatggccacagggcttcttattggaatgataaaaatagtctggattagatagtgatgatggttgtacaactgtgcaaatatactaaaaacaattgaactgtacattttatttgttttttttattattatttttgagatggagtttcactcttgttgcccaggctggagtgcaatggtgcgatctcagctcactgcaacccctgcctcccaggttcaagcgattttcctgcctcagcctcccaagtaggtagctggggttacaggagtgcaccaccatgccaagctcattttgtatttttagtagagatggggtttcatcatgttggtcaggctggtcttgaattcctgacctcaagtgatccaccagcgtcggctcccaaatgaactgtacattttaaaagggtgaattttggtatgtgaattctctctctctctctctctctctctctctctctctctctctctctctctctctctctctccccattctgactagtggcgacaatattggactatgcgctctagagtcagactatctggatttgaattctggctttgccatttgctgttatatgtccttggacagcttactcaacctccccaggcttccgtttttctcaactgtaaaatggggataataactgggctctctcaaagagttgtcctgaagattaaatgggctaatatacataaagctgctagaatagtgcctggtacccagccctgtagaagagttagccaatactaatcttactagtgtcacaaccagaaatcccccagggcctcctccaattgtcatccacacctggactcagcccctccccactcccgtccccatttgcctgcagatggttctctctgctgtgtaaactgttgccataacaaccactcccagctcccagcagcagtgacttctttggagcagggtgtcacatgaagggtctgggcaggatcactaatggaaaacattttcagtaaaccttgaggttcactgggcaggaaagtcaaggcctgttggggaacagagggccacgtctccaggctgagacaggcaggccaccttctgcaggaggccagccctctgagcccagcccggaagtccaagtctttaaatgagagaagacagaatatgttcgagagtctgctatctgatcctataacctatcattctgatcctataatctaacattcacaaggaaatggggcagggaggtgtttctcctgaggtggagaagtcaggatagcaaactagcactccttccaaacagggctcgaggccaggcaccctctcctggtcccacagtcctccgcatggaccacccttgaccttggcaagtcctttcctaacgtgatcttgttgctaaatattagtggctgtggaggtattgctttctcctggaactttaagctcgtctccccggcccaagtttgctgccaaaggctgcacttttgcacacggctgagcagggctgagctgtcctgtgacaggctgtggcctgaactagccatccgcgtggggctgccctgtggtcactgcctgccctcagctcgctgcagagagaggctgccactccccagaaagggtcagcctgggtgtggtggagggggtggggtgactgtcctcccagctcatcaggcagctcccagcctcaagaacactgcggaggagcagaggtgaggcctcagagcacagatctgaaccctgatctatttaatatttccccaggggactggagcagaaaggccagctggagcctcttggaaactttggccctgaatcagagcttgccaagtggggcttgtgggtccccagaacctccctggtgccgaaggctggttggttaatcccagaagccaggccctgctccctctccccaagaaccgggtgggctccccgtcatagatactgcaaactcaggctgttctcccagcctggccacgaggcctagggttgcgggaaagatgtcagccctaggagtgcagagtcctgggaggaaaggagctgtgctaagcaggagactgagggagagagacctgggcggtggctcccgagcctgagcgagacgctgtccacctcgctgcgctgcagtcgcagcaaggccacagccggctgaggaccggcaacgcccccttgtggccattctcagcaacaagcccccagagagcctggcgggggctggactggggctgggttctcttgctgcaaggctgaggtggctaggtgacttctcttatcccaagcctggagatgaaggaggcggcttttcctgagaacagacttgtgcctgaagagtagatttgttctgaaggccagggacactttgcgtagccacttggcatcaggaagtcaagccctggttttgtaatggacatccaatactggtggtatgcaatgagatgtaaggattttccaaaatgtggccttatgtagcacaccctccactgtgggggtttgcaaagatgaggccccatctccatcctgttgaatcagaagctctggggggtgacaccctggtatctgcctttttagcatactctgagagaaaagatgcttttatgggcttcagccaagtacaaaaccatagaaccagactgtcaaagctgggtaggggcttgggtatcctctactcccactcccatatttgtagatagggaaactgaggcccaaagaggggaagtaattcaccctagctcccacagctaagtcatgtgtgcccccaagctagaactctaaaaattattattttttatagtgatgggctcttgctgtgttgcccaggctggtcttgaactcctgggctcgaggtatcctcccatctctacctcccaaagtgttgtgattacaggcataagctactgcccctcaccctctttacgtgttctaagttgtccacccggcatgccctgctttacgattcctcttagcccagtgcccagtggagatgcattaccgagggtccctaatccaagccatctcactcagtgaaaatcaaaaccgtaggtgatctggaaagatacctgcctggcagttccaggctgagatggccgtgcatgctcctctctctggccccagatttgcttctatttcctagtttttctttccttgcctcacacacccatgtggccaacacattagtcctttagtcctggctctttctgggtatgtgtccccatgcagcaaacaacaggagtgccattgagcgctgggctccagttcagcccactcgctgattgagatggttccggattctctggggtaaggatgaaaaccctgggagctcccctggggagcaggagcactcaactacgagaagcatgagatttgccatgctgcgggggttcggtgacaactgcctctgacaatattgtgacttaagtgggggaacgagggaaagataggattagtaagagaacaaatagtcccctgcctgcatcctccatggaaatggggtgcctctggtgtgggggcctgccagcatctgttttagagcttctcgggtcatcagatggcgaagaaaaggatagagagaggggatggagtcactgtagggacagttactgtgctctacctgaaggcagaggggatttgcttgctgggttatctgtcagttttccatacctgcccccagccacactgtaggatggagcctttgcagtgaatcagtgcaaggtcactggatgcaagaaccagcagaaccctcctagtccagctctgagcagtgggtagagacctggagtttatcgttagaccaaggagtgcactgaggtgggcctgcaatgctctccctggctggagtttgaaggtttgtgtccttgagtggaagagaggaataaaaatgattcccaaagacgtttgactcattgtaagcaccagacgatcatcaacaaatgctggttgtgagatgtgcagataaactcccactgacctgggcttcaccctagggatctaacagggtcaggaaagatatttttctctctctctttttgggagttattaagaaggggtgtgtgtgtgtgtgtgtgtgtgtgtctgtgtgttgtgttgcttatgttgcttaatccttcttgtttccagatcatttagcctagcctggatttgggacccagtcccaaaccatcccacatgattaatttacattgcagttcacctcttctggtgatacatctctgtgtgtttcatccccagcccacagcatggagtgctggtctaaagatccctgggccaagagtgatagctaccatgccattcacaacctggtgacactgggcaggcccctcccctctggacctgagggattgttgttcccccaccaccaccctgaaaccgccgtgtacaaaatgagatcctttcaagttctgaagtgccatgacttgaaaacattctttctttggctcacttccgttccttctgttggttcccacctcatccagccactcacagcagaagccagtctagaagtcaggtgcaaatgcagtcctctgtggcctctgccctgagccaaaccactaatgtgggatttgaaacactggtggaaataattaagatttcaacagttattcagtttacttaattgtcagccaataattaaaattttatagaacttggggaaatttgactgccgggtgatggattcccatgagtctccttcttcctgaacgtctctgaattttggggggttattaccctcggttgaaggctctccacctattactacatcagattttagactgcaggccagaggggacccctgaggttcacgatactccacagctaagattggccccaagagaacgggattgaagatattgtattgcctcacagcagtgagagagtggtagtcaggcctgatgacacagaaacaaggttttgttactacctcatccacccctaactccaggtatgagtgagggtctcacctagccaaagcaaggttccggaagagaatgtcaggtccgttgagctgcaccctccaggggtgtgcaccacgcccatcagcaaatgagagacaaggggccagcctcagtgccagcccgagggtgcacccgttgttcacccacctctttgtgccttctgacagataagagccaccatttatagagcacctactctgttccaggcaccgtactataagcatgtttgtgaattagctctttaagcctcacagcaaccccaccaagtgggtatcatgcccatttcccagagcgggaaactgcagtgaggtgagatgacttgttcaaacaagctgggaagggggcagtaccaggacctgaagcacaggtctttctgaatctaaggactatgttcttgccactacatcactgtcagttttgccctagggtcccaatctcttgatgagcaatttcgtagtcctgccctcctggggaagcctgtttcccctgttctgacactggaacagagagaaagaccctttttacatcatcctcacagtgcaccctgggctgtcccttaaattacttctcttcctctagcaacgttttagtcttcttgcttcctccccatacaatgggagatgtgtccacagaaatctctctatgcatatgtctgcagaattgcagagttttatgagggtttccacaaactacaggctagaccacaagtaggtgtgtatatctggaggcatgtgcatgtattttgaaacaccatattgtagtggaaagaacaagggctttggagtcaaaaagacttgtgatcagtcccctggctcaaattaaataacatggaaaatgcctcgtggtgaacattgagtagctgggcattatttgatttgtgtgtgcatgcacctgtctgtcaagtgtatttgattgctagtcctttcccaaagacccttgacatggacagtatgctctctctgtggtcttgcataagagccaacagtgtgtagaaagaaacaccatcctactctgcagatgccccagtgcatgctgggactatgctgctgtttgtggtaactgtgaattgccgtggtgatggctgggttgggagagacttgcatctgttctgagcctgagtagcacacacattctctccccagttgctccattttcagggaaaggcttggagggcagcccaggataacatcatgagctcctccccatagaccttggtgtcgccctggggcctgctaggagccctacctgcccccttcccccctcaaaccctacttgcgcgcacacacacacacacacacacacatacacacacttcactcttgcagctggaccctgttctgtaggagctaagacagcacgcactcccaggcccccagagtaagttttggagggtggcatcctggctggtatcatgtgaaggagaacgctgtactctactaggacctggctagaggtgggttggactggagagtaccttgttctaatttgcacaaaggtgccacgtaagatgggagtattctgagcacgtcctccacttaggggtattgaggaaggggatgggctaccaagactccctctgcatctttgccatgtctgggctctgttttgtccccaggcctgtcccacacccagagcaaaacatttgacagagacacatggaggcagcctccagggcatctcaacttagccaataaaacaagccattagccaggcacgatggcacacacctgtaatcccagcactttggggggctgagtcagaaggatagcttgagctcagaagttcgagaccagcttgggcaacatggcaaaaccccgtctctactaaaaatgcaaaaattagccaggcgtgatggggcatgcctgtagtcccagctactcaggaggctaaggtgggagaatcgctcaaaaccagggaagttgagcctgcagtgaggcgtgatcatgccactccatcccaggagacagagtaagaccctgtctccaaaaaaaaaaaaaaaaccattgaacttttaggttacttttctcattatcacagagtagcggaagccctagataccttcaccccatccgggatgctcaccctcacaggagatggtgagaaaggggtgaagcttagttatgggttggtggtcagaggtggggtaaggtgaagatcaggaatggatgagggttgagaggtgaagtaaattcccttggaaatgtaacttactcatatttttaagctaaaatataaaaattcaccttcagggtcatgggtgtgaatgtcagattggctcctcaacctaggccccctctgcagcctctggagctctggaggcctttcttttgtacacaggtaagtcctcttggcctgaagctgtggctgtaccaccccgggaatgtgtctgtcacctagcaatgtggaggaagccagacttaccaggggccccaaccctccagacccaccctgggctgagccttggagaagcagagcggcatacccatgatggccaccaggggccactgctggggcacagagggagctgcagggtgtagcctctgcagggcccctccagcctggtagcagagaccagatcctggtcacccccaaggaaaccaaaccctgccctaacctcctcccctgtatgccccaaatctatacctgtggggaagctgcctggagtcaagtgttcttccattcgcatctctgtgatctccagctagtccctacttcctggacctcagcctcccagctctccagagacacagcaggattaagtgactttcaaggactcttgtggtttggcgactctgggagactctgaaatagtcccaccacactctgctgatgtggaattgaggaaggggctaggatagaggtctttgagggaagagatatggagaaagagggtcaaacctgtgacctagatgtctatgactcccatctggagcatctggggcattagggaatgcagcatgactctcctgaggctactgtgtggtttaaacatttttccttaaaaaaaaaaaaaaaagacattttcctaacgtgacatgtatgtatccctttactttttttcatgggtttttggaaattttaaaaaattgtggtagcatccattcttgaaatgttcactaagcatcttctttgtttttttttttgaaacagggtctcactctgttgcccaggctagagtatagtggtgtgatcatagttcattacagcattgaactcttgggctcaagtgatcttcctgcctcagcctcccaagtagctagtattacaggcttgagccacctggccaatttttttatttttattttttatatagacaggatctccctgtgttgcccaggctggtctcaaactcctggcctgaagcgatcctctggcctcggtctcccacagtgctgggattataggcatgagccactgcttgcagcctaagcgcctcctatacaacagtcaccatgcttgatgctagtggtgcagagatgccctgtgatatatcaagacaagtatgagtttcttcctgggctcaactctgccttgtgctacatgctaggtgtgtgaccttgggcagtttacttgttctctctgagtgtcagttttctcatctgttaaatggggcagtagcacaaatctcccagaaatgttgcaaggattcaagtagataatgcatgcaaagggtctggcacacacagaagtctctgagtaactcttgatcaccttcctctttgggaatacacaccccttggagatgtgtgtgcctgtccctcatgtctgccaagcccataaaaagcatcaccctgggccagaaacccacaccttggcaccatgttcttagtccccacataggcattttagaattcaactttatttcttggcgagtctaaaaaattgaccctgtctgtgtttcatgccaagccatcaattaaagccatggagcagcttacaaggtgacacttgccaggataaataggcattggcggccacggaagtgatgccaggactggggatagagcttaggccactggcatggtggcctgccatttgtccctgatccttgccaccagcatggaggcctggattcatggtgctgaccatgagaggatgtgggggtggagaagctccccctgggaggggaaaggagggatggctgggcttgggtgtggagctggttctcagaaaaggtgcccaaaaggctctggagagggcattgcaggctccctgcccgccccacccagcctcccctccctgacaagacagtcaagcagctgcctgccagccggcctgagcttagtcttgggggaataaaaacctcttgaagagattcagaaatgttccctttggcagctaaaaaaaaccttacactcctgctgagtctgtgggctgaggagggactgagggggcgtttggcctctgcagcagcggcagaaggcttgcggatggaggggaaaagggagcagcctggagagccagagttcttgggttttctctgttgttttgccatcatctttctgtcactccctgactctctcctgcagattgtcttttagggaggtactgggggacttggttccattcatgactttaggttccaaaatgaaagataagccatggggcagggccagcttctcttcattatactgtccttagggcccagggtggtgcctgatgtgaagtaagtgcttgataaagattcattggatgaactgaaggaaggaagaacattctttgagttccttcatgctcaagcacctctcagtcatttggacgttattttcaccctgtttgctgttgtagattctcatccgtccaggctaatatctggacaccagggttgaatacaatggctcttggtgatttgggattctgaggattgggccacacccatgcatccttctcactcaggattgcaccacttgtgtggggactgcccagagctcacttcaagctccagaaaatgactgctcatcccttccacctcccaccagccacctcacctttaggagactatatctgaactaacttcctgggaccccatagagcaaccccagatattaccagtcagtgcctgggtttaggtgtactgaagccagcttgtaccagttccccagagccaattgttagcccctcttcctaactctgtggtcagtgacatcagattggtagattgaaagtggccatgataggaggctttataccagggaaattggcaaacaccacacatcggtgtccccttcctccgaaagccagttgttaaacatttaccagcacaaccctggatagggggtttcaggcagatgttccagctcatctcaaccacgagaaatcttgcccaggacctctgctatgagaagcagggcctccccaaaacaaagccagaggtagaggcagttccttgggggctctgaaaggagtgcacagacacagaaagccatgcctgtaccccctgccaggatctggggttcagagggctcaatggcacatgtccagggcctttgagagggcccattctgttggttgtctttgggaaagggaggaggaaggtgactatcatggcccagggactagcctcctggggacactgtcaatctccacttcctgacccccaggatcccagcattaagttctcttcactcacccagctcttccttctctccctaccagacccagagtcccagagaaagaggacagtgcagaatgtcctggatctccggcagaacctggaagagaccatgtccagcctgcgagggtcccaggtgactcacaggtaagctcgagctgcagagagggtcatgccctctgccttcctggctctccaccccattctggagggcagggcccccgggtccctccacacctctgccaggtcagccaggtggcctgatgcgtggagccactgcagaaggaggaggaaatccatttatctcaacaagagaagcttggctttgtcttctgtctgcttgtgcctgaacatttcatttcatttcagcaaatcagcttgaaaatcactagcttaggagccaggaagtggaagccattacacagctcaatgtgtgatctttgatagtcagtctccttcattagacctctgtctcctcaatctgtcaagagaaggtttactaaatgctctcttcctgttcctaagtctccattaaactaggggtctagaatcaattcccttctcaacacctgggtcttttcactcttgtgtcagttaggtgccccctggcctcttctacgagccactgagggaggcttgagtgctcaacagggcccacacagtgtcacccagctccatgccctgttaggtgtgtccccctagcccactccctgcagagacctcatagcctccagctgcatggggcactcagccttcccacggcacctctctctggagcaaagtcctggccacaggctctgctgtgactcagaatttcccttgctggctccttggactgcccagatgagctcatgctgtcagctccaagtggggcagagggctgggctaagctctggggacagcgggaggcagaacagacagccagattgggaaatcatggggggtgtggggcaggaaggctgtgtgagggctaggaagcctccccagttagactggaagtagattcctctccaactcctggggctggaaaattaagagcaaagttgggacacaggggcagtggaaaaggactttctttagcccagggtgtggccatttgggattctgaggatgggaccacacccatggacatatttacataccaccaatgacaaagaactcattacctttctttttttatttttaacataggctttttaaaaatattttgttattatttttaaagaccgagtctcattctgtcgcccactgcctcagcctcccgagtagctgggattacagctgtgtgccatcacgcccagctaatttttgtatttttagtagagatggggtttcaccatgttggccaggccagtctcaaactcctggcctcaagtgatccacacgccttggcctcccaaagtgctgggattacaggcgtgagccaccgcgcccggccaactcactacctttcagtcaccccggtgcattgtgggattgcagcaactctgatgtggaactgcacttagtcttaagtagctttcagccgttggctgtagttcttcctgcttagatgacccttctccttctccttccttgtactactcctccccctatccccagcccatgcccgcatcttggacactcagccctttactcccagacatctcgagtattttaaatggtaagataaatcaaaactctctggggattacctctgctcaggccagcagaaccctgactactgaaagggaggtgaccaaggaagtcctggaaaaaggtggatggtgggggctccaggacccccttacatctgtcccttactgccatccctcatagccccaagcccccagcaggagcccaagtgaagcagggatctggcagagcttggcttatcagtttaggacccagcggatgaaatcttggacatctgccttcccccatccaaggaaattgttggaacatctctcagcaccaagtcacccaccagcctcatgccaaagacaccagaaagtgcttagttgctgagagggccacaccccaaatgactcactcacaggagtaggagagaagtagcagctccagcctcctggtgccactgactcagagcagccagcccccagtccctccgttaagccggacagcttgaccctaggcaggcgctattggttttctgcttctagtgggaaaggggaggcttcaatcaagccttttgcataatgctgactggtttagggggagcgtctagggcctctggcttctgcctccctttataggaaaggaaccaagagccccggagctggtttttctgtttactgtggacctagagccacttcctctcataggctttggtttatattattcctgttccacactggtagccaaaacaatgattccctgactttttatggctcttttttttttttttttgagacagagtctcactgtctcccaggctggagtgccttggcatgatctcagctcactgcaacctctgtctcccaggtcaagcgattcttctgcctcagcctctgaagtagctgggactacaggtgcgtgccaccacaccggctaatttttgtatttttagtagagatggggtttcaccatgttggccaggctggtctagaactcctgacctcaggtaatccacccacttcggccacccaaagtgctgggattacaggtgtgagccaccacgccctgccggctcttttactttttaaagggctttctatcaatgagcccttcccttagccctggaagtagacaggatatatacatactccctgggttagagaatgaggctgggggcagggaggcacctgccagagtcacgctggctgatgagggtaggttctgtactctgcatgctcagaacccatgccagctgtgtgccaggcacagcgctgggcactggctccccagaacacacacaagcttcatcctcggagcttatggtccagtgtgtgcttcctgcaaggctgttttcacccaggaactcccaggataactggattccattccttttcagaagcctttactcctgtgctgcttcctcaatttctactggttcatttcccccagcgaggagagtctgggtcagactgtggctggagaggaaatgaaactgtgtcctccccagagaaaggcaagcctgaagggtgggtgcagggctggaattcaagaactgaggatctgagctagaatccccctcaccaagcttaagtctagagatgtctagagatgtgtttgggggaactgaaaaaaaaagagagagctgtggaataggggaagaggcaattttagtacaaataactaaacaggggcaggccaggaatagaattgaggaacccagatgctgagtgcagccctcactcccacactagtatataaccatggtgtaggctaactacccaaaccagcttccctggagatccccgccaccctcttagtatggttagcatcatcctcttcctcccctgtctcatcccatggtcaaggtcagcttgcttttatcaagcacttactgcacagggcgctggactgagttttctgatgagaacttccttgctttttactcacacatccatcgtgggtttgctcctctttgattcattctagagcaccagctctaggccaggtgccatgcaaagtgctgaaataccgtggtgagtgagcaaggcagacaaagtcgcaccatcactacagtctctggcttcggggcacatcggtttctgtccaaggagatgtgatgtctaggtccacagtaattagaagccgaaacaagacactgtatgaggcagagctgcagaacacaaaggggttcctaaagggctgccagaagcagggtgcagtggctcacgccagtaaccccagcactgtgggaggccgaggtgggaggattgcttgagttcaggagttcaagaccagcctggacaacatggcaaaaccccatctctataaaaaatacaaaaattagccagatgtgctcatgtgtgcctgtcgtccctgctactttggggctgaggcaggagggtcacttgagctcgggaggtcaaggctgcagtgagccgtgtttgcaccactacactccagcctaggcaacagagtgagaccctgtctcaaaaataagtaaataagtaaaaagagttggcagggccaggaggggagccgctgggcatggacacggtcaggaagccctccagagggccagaagcagctgccactgattgccctgactggccagggcctcccccatcttgcccacaggactactgccaggaccccagcacactcagtttcaagagcgtttggatccctcaagttctgctggttagaaaataagaccgtattttctcaggtccaatagagacaactttggaaatttttcttcttttcaaggaacttgatagaaaccagaatggaaaaatcaatgtcccactcccattccagcccccaaagtggctaagcaatggatgtgttcacagagcagtgattgcttgggctcatgtaactcatgtccagccacagattgcctcagttgccccagctttcttggccaccaaaccccgtttcgcttacttagtcctgtctggcttaattaggataagttatggagaccctgcctgaggctgatttgggctggccccactgctaggctagatggaattatgggtctcagcctgaacccaagtccaagccaccccttcaaccagattccagttgtatttcctctctgcagcccgcctggccctatctccttccctagtcccccaggttcccctagtctcaggccatccagcactcacctgggcattgctcccttggcctggtctagcagggcctgaggcttgagactctggacatttggcttcacccccatgtctggttccctgtgtcctctcctttgtccagttaaggctgcttctattctctggggaggcttatttcccctgctgccctaggcctgtggcttggaccagtcttactggggacctgccatacatcccagattcccaaagcttttcctatactctctgcactctacttcagctttcctatatatgatgtttgggaatcagctagccctcagctaattactagaagagaggtgatggacacaccattaacaaaatgaccaaggccttctaagctcaagtgaccagtctctcccacttgcctccaggtctgttgaccccttccatataccaggcactgtgttctgtctgtacatatgtgatccttacaactctataaggtagatgttatgccattatccccattgtacagatggggaaactgaagctttagttatttactttccttgggctcctttactaaccaataccaaaaaagaattcaaacctaggtcatattacacaatctagggtcttaacagtatacaggatttcttccctagccacttaattaagatcatttcctttgtcaaacagataacgtatcacaaaggtaacacacaaccagaggcctcatggaggaggtggagcttgggcaggtggggaggaggtgacagggcctgtgggtggaggggaggcattgctggggtgcatgtgaggggacagggcacacggcggctgtgccaaggactaagtagtgccttctgctctccacccagctccctggagatgacctgctacgacagcgatgatgccaacccacgcagcgtgtccagcctctccaaccgctcgtcccctctgtcatggcgctatggccagtccagtccgcggctgcaggctggtgacgcgccctctgtgggtgggagctgccgctcggaggggacgcccgcctggtacatgcacggcgaacgggcccactactcccacaccatgcccatgcgcagccccagcaagctcagccatatctcccgcctggagctggtcgaatccctggactcggatgaggtggacctcaagtccggctacatgagcgacagtgacctcatgggcaagaccatgacggaggatgatgacatcactaccgggtaagcgcaggggcttcttggatggcgggggaggatggtggaaagaccactgggatgcgacgccttaaaagtggagtggaacccaaaacgggttttggtttgctgtgctgctatgaaagtacacaaaagtgtgctgtgtacactttgtgattgcctctgaaattcgatgtggtttattctagacttgggtgtggtgtaggcagggcctacatccaaggagctgattggtcaatgaaggcgcctccctctcattggtctctgtggctgtcattctgtcaccctcctccctggctctttgccctcaataaactggctcaaagagccttggaaaagcattttattcccagctcttatgcgaactctgtgtagaccctggacaactaaatctgctttcccatttgcaaaaaaaaaaaaaaccaaaaaggttattaacatcgtatctgtctacctaagaagagaaaatgagagcttgtgggtgaaatcgctagtcaaacagtgagtagcagcagtagctccacttcctttgccaggggttcgtaacccctcagttccctatccgacccctgtggtcctcagtgtctgctccttgggtttcttcctgtgcaaaccttctaccaatcatgcaacttcctaatccctacccagcgtgtcaaatccttctttcctgccttttgccctgcagggaccctcatcttcttatatttttctgccttaattgacagagttgtgcctatgccttccaaccttggaagagttggccaggaccccaagcccccagcacttcattcttgctgtcctctcctggtctgggaggatagaagagaggataggaagaatgaagtgctgggcgcttagggggatcctggccaactcttccaagcccagagacaggagagaggcagtggttctggaagcttctctggagcacctcttagcctactgccactttcactctcccttcttggtttgctggtgccctcctccgccaaggggccatacaagtagcagcagcatcccttcccttccttctcagggacttaatatcttactgccagggcctgcctctccccaataaaaatcccagacttcaagggagtggaaagtagcctctcctcggaaaagacgagagccaagctccaggccatccactgttccccacccccatctccacccctgcagagaacttggagggatctggttagggcttgtccagctgatgaggctgctctggagcaaaacaactgacgcatgaatggagttgtttactgcctgttaaatcccaggggccagcccaacctcgcgctcacgctcagatccaccagcctggagctgggaccagagaaaagccatgcagtgcacagatcctgagctccttctgtggtcagaggcctgtgctgggcaggaaggagagccaaggtgtgtgaggagctgctccacacagcctctgccctaggaagctgccagggactgcctgaggaagtgtcaggtcactgccctcctctgagaatcccaggagggtgcagagggtggcacaagccctgcggggctgagtctttagaaagtcccccatgtgttagaagaaccatagccctagaccctagggagcttccagacaggggaagtgataggacccctgcccagcacagctcccagattgatggaggtgacggggcccctgcccagcacagctcccaaactgatggaaacgagatccctctgagagcccttcaccccaccaacccacctgatggccatggcagaaaataccccaagtgttgcaaggtacaggagccctgcttggagacgtcgcagtctgaggaaggtggcaggacttccggctcttaactagctgtatgagcttgagcaaactggttcacctccccaggctttctttcatttgtctatctgtcaaatgcagataacagtagaacttatctcagggttctgatgaggattcaatgggttaatatatgtaaagtacttagaataattcctggctcattgtaaatgctcactaaatgatagctattatttttgttgctatattatttttgttgttattagagtcccagactgatggagagacatgattcttaccgtcaggggtgtgtagtctgaccagagtcccacttactcagcatcagcagcaaagacagatctagtagcagctggtcaatcccaggggcatagataataggctgtgggggcatggaatgcagggggaaagggtaggaaagaccccctttatcccccctctaacacccttgctttatcctccttcctctggacaggatgtgtgttcccgaatccattttttaaaaattagagttcaccgagactagcatgaataagaacttgccttccctgcacagcccccagctgtaagccttgggaagcctggagtttgcatggggaacacagaatcaattgttggcatggcaatatccataaagtggaccttcctgtaaactgtgatgctagtttacaagatcatttcacatgcattttttatggtcaaccttcagttagcagtaacccttaacacgagtttgttaacttccctgctgggactgtaaacatggccatctgagaagtcagagttgaagggaatcaacttataatccccagtaatttaatgtaaacagtcactcctcgattatgggttttcatggttaagtgttgttgttgttttaattagtaacagggcaacctggattccagcgactctttaagtgaacatgcaaacctgagctgtcgttgctcagcctcctgttggtcttctcatccccactgtggtttccatctagatgttataatttagaaaatgtcctatttcttaaaaaactgtttttctagtcattaaaggggtaggactgttccctgtagggatagcttcagcgcttccctccacactgcgacacccctgcccacccatcagcctcggcccactgcaatttactttcccacctcccaagagctcccagcactgggccagcagaaaagctgatctttccccactgggtgacataatcggctccaagctatccgagtgagccataaaagatgacagtaattctggcgctttctccacactctgtttatctgcggggggatcatccctttgacggctcttcccaagcccctgttcagtctcaagtcagctctccctactccctccagtgaccaggcccctttcaggtcattagtcagcaaaccaaagaaggcaaattcttcaaactgaagtcagcaaactagaaggaagaaagtgactctgatgctgctaccagaataatcatacatgttttttaaaaaggatttatttttaaaaattgtggttatatatatataacataaaatttaccattttatgttaaccattttaaagtgtacagtttagtggcattcagtacattcacactgctgtgtaaccatcatcacgtccatctccagaattctgtcttctccccaaagagaaactgtacccattaaacagtagctaccctttcctcctcccttcagctcctgggagccaccattctacttttcgtctctatgaatttgactactctaggtaacccatataagtggaatcatacagtctttgttgttgttgttgtttaatgactggcttatttacttagcataatgtcatcagggagcatttatgttgtagcgttagaatttcattcttttttcaggttgaactctattctgttgtaggtatacgccacattttgtttacccattcatctgttcatgggttgttaccaccttttggctattgtgaagaatgttgctctgaaaattagtgtccaaatattattcaagtccctgctttcggttctttttgggtatatacctggaaatggaattgctgtatcatatggtaattctatgtgttttttgtttgtttgtttgtttgtttgttttgaggaaccaccataccgttttccacaatggctgcaccatttgatatttctaccagcaatgaatgagggttctaatttctccgaattctccccaacatttactattttctgttttgtttgtatttatagtagccatcctggccaggcgcggtggctcacacctgtaatcccagcactttgggaggctgggttgggtagatcacttgaggtcaggagttggagaccagtccggccaactggtgtggggtgaaaccccatctctaccaaaactacaaaaactagctggcgtggtggtgcgtgcctgtaataccagctattcgggaggctgacacaggagaattgctttaacccaggaggcggaggttgcagagagtcgagattgcaccactgcactccagcctgggcgacagagcgagactccaactcaaaaaaagaaaaaacccatcctgatggaggcgaagtggttatctcattgtggttttgatttctgtagtgattagtaatatggagcagctttatgtacttattagctatttgtacatcttctttggagagatatctattcaagtcctttgcccatttttaaattgtgttgtttaatttctttttgagtgttaagagttctttatatatgctagatatgaaccttttatcacatgtatgatttggagatattttctttcattctgtgtattgggtttccttttcattctgtagatgtatcctttgatgcacaaaagctttttatttagatgaaatccattttatctgtttttttcttttgttggctatgctttgagtgtcatatctaagaaatcactgcaaaatctaacgccatgcagcttttcccctacgttttcttctgagagttttatagctgatggggttttttggaaatacaaattctaagcctcagacttaccaatgcagaatctctgctacccagaaagccacatttttctaaagcttctcagtaattttagactagtccatgttcctatctagtacaataatcttatctacagtatccctgacagacagtctttcatccttggcttgcataggcacagtgatgggaagcttattccatatcatacagaattaagttataagaaagtttctaaatattcaactgaaatctgtttcgctgtaacttctacctattgattcaaattctgtcatctgggaaaaatagaataagggtgtaactcttcatccaaatatttcaacatgttcttaatatagctcaaatattctctagaccaaaaagaaaaagaaaaagtccctagcttatttcagtacttttttcaatgacccagtttttcgaacctttcattgtcctggtcaccctcctctggaagctctcaggacgtcaatgaccctcttaaaatttggcacctagactgatcacccgcttgacactagaagtagtctcgccagggtaatatccaaatcatgacactgcagacaactttgagttggctgctgactgtcctagatgacagctcgggccatttttaccacttggaaatacaaaaggaatttgtttttctaaaaataggaaagtctggaatttaatctaaataagaagataagtttcacagccatctgtccttccatccctggcatccattggagtgggaggggaatagaggatgggtacccatacagaggtggatgcaggcactgagtagaggaggcacacgtgcctgatgggaggaggtcagagggccctccatcttctccctactttaatgtgggtttccctctcaatgtgtccatttttgtgtatgtgaatgggtgagctgtgtctgagctgggtggcagtaatggatggggacttgcaggccagtgcagtaacactactgccaagtcccacaactccagagggtgcccttcacattacatagaggtgtgaggtccacagccctgacaggactgctgtcctgaaacctatgccaagggccacagggccttagacagagtcagcaggctccatcttgagcgagtgctgtaggcgtgtgtcgggaacagaaggattccttggcgacttctgccacaccctggctctctcatcaggtggcttcctgccctccgtgtgtggctggatgttccagtcttcttatttttctcttcaccgccccttcctccactccccagcctgtcctcttgaactgtgcttgggggctcagaacagatgggattcgtttcctctttggctctgaagtgtcctgacgttgaaaaatgtcaaataaaataaactgtaggcccctgccttctcccaggctggctctgtgctcccagaatcagcgagctcaagccttaaagagacacttccagccttgctgacagggccccagcctctgcagctaccctcctgagaaggagctgcattcactgccctcccacttggctcatgtctgactctcagacctcaagatacccaacccagccaccctcatcgataagaattctcttgcaatgagcactgggtttatgtggtttgtacaaagagaagagaccccttttgaatttgaatggacaaggagtagagttgtcccacttcttatgtcttcttctgcctttgccttctctgtttcctggtaggtctttaggaatcccgcctagcgggacagctgggccaggcctagtttttgctcatggaacccaaggatagaagcagagagcagtagggggccatcctcgggaggacccaacattcaagttcaggaaggaaactcagtttctctcctgaaaggacttcaaatctaaaagggaggtaggcagcctgggcaacaaagtgataccctgggcatggcagcacgtgcctatggatagtctcaactacctgggaggctgagacaagaggatcacttgagcccaggagttggggcgggggggctacagtgagctatgattgtgccactgcactccagcccgggtgacagagcaagactccgtctcttaaaaaaaaaaacatgaataagtgggctaggcgcagtggcttatgtctgtaatcccagcactttgggagtccagggagagaggatcgcttgagaccaggagttcaagactaggcctgggcaacatagcaagacactgtttctacaaaaaaaattaaaacttaactgggcatggtggcatgtgcctgtggtcccagctactcaggaggctgaagagggagaatcccttgagcccaggagttgaggttgcagtgagctatgatcacacccctgcacaccagcctgggcgacaaagaccctgtctctagaaagttaaataaattttaaaaattaaaataaaatagaaaggtagggtacttattgggtccacagtaaaggaagcagtatgtagttgaagtagatgatagctgttgcttcattgaagataatatctaacaattagaatgctgactccagattcatacacatagccttggctgatgcttctttgtggtgtagggaagaagcactgggctaattctgagatctggagttcaatcctaagcacggctctaacttgctgtggcactgagaaagccacctagcctctctgagtcttagtttgttcatttgtaaaaaaggtaatcatttttgccttaagaggatcaaatggaaaagaatagtaagagtgctttgaaaagtataaagagctgtcagtttgaaatctattattctggttgggtgtggtggcttatgcctgtaatcccagcactttgggaggccgaggtgggtagatgtcctgaggtcaggagttcaagaccagcctgaccaacaacaacatgatgaaaccccatctctactaaaaatacaaaattagccagtgtggtggtgcacacctgtaatcccagctgctcaggaggctgaggcaggagaattgcttgaacccaggaggtggaagttgtagtgagccaagatcgcaccactccactccagcctgggcaacaagagcaaaactccatctcaaaaaaaaaaaaaaaaaatagaaatctattattctgatctccatgtaatgttctcttcatttagctgatggcttctgccttaattaggggtggctagagtatcaaaataagatttcttaaacttggaagatgaggacattaaatttgggctttgacttaggtttcaaggaatgcttcacaacacggtcttgatattcttttaatcctgtagtgtgcagttaaataaacagacttttgagaacaggcttatcaacacaggcataccacagatgggcagagccatagcatggtttagagtgaaggctcacagctaggctgcctgtgtttgtgtcctgtctcttttccttcctagctctgtgagtttggatgagtttttcacctccctctgcttgtttcctcagccgaaaactgtggagagaagtggtgcctactctgtaagattaatgtgaggattaaattagttaatactcttacgttagatatcataaatgctgtcttatgttagatatcatacatgctcaacaaatgctggctctccttcatcagccatttgatgatagacattagcaagctactggacctaagttgtcacagacacattctagatgataatacattctttgacaaagaatgtattaaccttcatgcttgaaaatgatctttctgatcctcacaggaagaatgacataataagttgtttgccaagaaagatggatttgttttgacccatttttacctgttcacacaatgttctcgtgcagcaaatggtgcccatctgtggtttggggtgagtatagcatgtgcttattgtgcagatagctaagctcactgcacacagagtcacacaagtgaccatgacctctttcccatcatgacttggctaattgggctgtcagtccttcactcaaacatgtttcttgcctatgaagaatgtcttgggccgggcacccccagaagctgaccttgagacaaggatttgggtgcaagtggtttatttggcaggtgcccagaaagtgctgacaggagtgggaaagtgagttaggggagagaaggaagccactacaggctatgttcatgtgcaggttactgctgtgggcaactggggcttacggatttctaggagatgacgtggaatacacctcagtgttgccccaccagaagggcaaggaagcatgggtatttatatgtcagctcccattcattattggctgagggcagctcctagagggcattgggtctgcgtttcaagcctgctgcacataggctgagaggaattcctgagttcgagtcacaggcgcccacagtcatgctcagacagcacatacaggaacagtgactgcagggggcataggtgggacacaaataccaccagttataaagaggaaagatgggaaggaaagacaagaggaaggtgtggagttagattcctgggtcagatgtgaacccctggctctcaaaacactccttctttttttctttttctttttttttgagacaggatctcactctgttgcacaggctagagttcagtggtgtaatcagggctcgtggcagcctctacctcctaggctcacatgatcctcccacctcagcctcctgagtagctgggactagaggcacacatcaccacacttggctagtatttaaatttttctgtagaagtccaggcgcagtggctcatgcctgtaatcccagcactttgggaggccgaggcaggtggatcacctgaggtcaggagttcaagaccagcctggccaacatggtgaaaccccgcctctactaaaaatacaaaaaaattagcctggtgtcgtggcaggctcctgtaatcctggctccttgggaggctgaggtaggagaatcacttgtacccagaatgtggagcttgcagtgagctgagatcatgccattacactccagcctgggcaagaagagtgaaactccatcgcaaaacaaaaaaaaaaaaaaaagaaaagaaaagaaaaaaaagacatctgtagagacagagtctcactatgttgcccaggctggtctcaaactcctgggctcaagcaatccccgatcccccctgaacctcccaaagtgctaagattacaggtgtgagccactacacccagcctccttaattcttaaaatagtgggcagcacccctcagtctgtgcagcattaatctggataacagtgtctgttcaaacccagcagggttggtgaaaggttggagtaagccaggtattccagaggggctgctggaggtattctagttgctatgccaactaatgctagctaaggagtgctccttcctctagtgtgtcctagtaacctacaattgagctgctggagttttcacctagtgtgatgacatgcaatttggttgacaatcaagatgggtaaggatcaaggaagctgttgagatgagcttggcttttcccccaccagctctgcccacctgtctacctgtccactgtctcccctctttaattgtcaaccttttccttatgttctgtgataagccagctgagcttgtgtggtgcctggaaattccatgtagtctgatattacagaaagaacacaagtttggaagtatgacaggcctggtgttcagatcccagctctgagtctttggaaaagctgtttatctattttaagcaagaatacgaatacggcaatagtattgttcttagcatgtagtgaaatatagtgtatgtaatacacttggtggccaggcacagtggctcacacctgtaatcccaacactttgggaggccaaggtggatcacttgaggtcgggagttcgagaccagcctggccaacatggtgaaaccccatttctactaaaaatacaaaaattagctgggcgtggtggcaggctcctgtagtcccagctacttgggaggctgaggcacgagaattgcttgaacctgggaggtggaggttgcagtgagcagagatcggactccatcttaaaaaataacacttggtggccaggtgcggtggctcacacctgtaatcccagcacttcgggaggccgaggcgggcagatcatgaggtcaggagatcgagaccatcctggctaacacggtgaaaccccgtctctactaaaaatacaaaaaattagccgggtgtggtggcgggagcctgtagtcccaggtactcgggaggctgaggcaggagaatggcgtgaacccgggaggtggagcttgcagtgagccaagatcgtgccactgcgctccagcctgggcgacagagcaaaactgtcttaaaaaaaaaataaaagaataaaaataacacttggcatgcagcaggtgtcagtaaatgttacctccatcccttctcttggttactcctagaaaaccaaagctataaaggccatcatctatggccaactattccgcctgggtggtgatgtccagttgcccacccatctttgcaaaatcccctccctccagggagcctttcctgattcatcacactggactctgggttgtcctggaacttgtgtgcataattcatactgcaagtaatttgcacttttatgattctctcgcaattgcatagcatgcatggtttgcacacactaatatggcattatcttatttaatgttaacagcactgtgaattagacattcttcccccctccaatttacaagtgaagaaattggaactcagattaactggcttgggaggatcatataactcaaagtggccccaccagaacagaacccaggcctctgcctctgacattctgggcacgttccagtgcacctactgcctcaccatgtgctccttgaagcctttccctctgtgtgcagcccttgtgtccctgaagcctgtgagcatgacaggggcagggatcacaggccttccactggagtaggagtttcccaaggacagagactctgtcttctctctctctgtttcccctcgacacctagcaatgtaggttctcaggccatgctgtcgactgaccaatgaatcattgttagagaccccctcctggaatgcccttacatgacctctccatcttccaggatagagtcttgctttggggagccacaaagtggccacagtcaggaattctggtccaagggcagaaggagcaacccaagcctctgtgaatacaagtccttgtttgactccagctcaaaggctgagctgtcccaggatgttcatgaggggccagctctggcctctgggctatcagatgtctctggccaggcagtaaaaggccattcactgcagctgaagaaaggccagcaggccaggcagagggacttacctacggaagtgttcagggttgggggtccaaagatgctgaaggactgaatggtggtcatctatatatcagtgtgacgatggaacaagcacaggaaaaggcataaaagtatagatttgcaaagcaggccagaggaaagagtcaggcccatagagaccgaaagcacatagctacattggaggcagatcgacactcactgaatatgcagggcaggatcacggagagacaaggtaggagaggctgacacgggggcatgtgcggtagaaaaacagagtcagcacgttcgtgatgtgcacaccaagcagtggaaatgagagacagacagatactgtgtgagacccatccaaacgtgtgtgagaggtggctggatacaaagaggctgtgtgtgcacaagatcgactgtttgaggacacaggcccgccgatgtgcagggggtgtgcggcaaccagacaggcacagagagtgtctgagaggtggagggacccctccagagaaacaagagtgaccttgtgctcagcctgagggttggggagtgacccagagcagggcgagtatattctcaccagcctaccccccttctcctttggccagctcctactaaaaggggtctgtgtcgtaccttgtctctttcttgtggggcatctccagcttgggagacaggaacaaagctctgacctagtccctgccctctttgactgctcaccctcttccagcccctctacccagcctcaatctctcattcttcctctactttgaagtctggcttctgtcttggcccctgtgggtttgatgacaaagggcagttcaggaatgacactatctacacatacatggccatatggacaatttcaggtggtgggacttgcagcagctggggttcccaggactgctgacattctgctgagtgttattagaagatcagggacagagcttatcatctggctgtcactgcccctttccaagccacagcgagcctccacagaggggccctgggggatagccagctgccctgtgctcatgctggagtgaactttcctctgatcttccctgttttctggatttagccagggaaaatacaagggagctccttgctccctgtgtgaggttccaactgagagatcccacccttcccagctctgatcagatacccctgaagtttggaaggcaacagctatacaatctctctctctctttttttttttcttcccctgagacaagcatcactctgtcacccaggctggggtgcagtggcacaatcatggttcactgcagccttgacttcttgggcccaagcaatcctcccgcctcagcctcccaagtagctgggactacaggcaagtgccacgatgctatttttaatccatgctaagtttaaaatgtaatacaggctaattcttaaattttaaaatacacactaatttttgtattttttttaattttggtagaggcagggttttaccatgctgcccaggcgggtctcaaactcctgggctcaagctatccacccaccttggcctcccaaagtgctgggattacaggcatgagtcaccatgtctggcttatacactctcttatatctccacaagtccttgtggttagtttcctgctcttgggaagtagagtagcaaagtagatggaacattctagagcccaactggtctggtataattttcagtttgctactcactacctatgtgcattacttagcctctttgtgcttcggtgtcattatctgaaaggaatgcccaccttgtgatatttgctcatacattccacaaacacttgtagaccacttaatatataccagacactgcagatgtggcaggaggaaaaataggcattgctcttaaactcatgtatgaaaagaaatggccaggtgtggtgggtcacgcctgtaatcccagcactttgggaggccaaggcgggtggatcacttgaggtcaggagttcaaaaccagcctggccaacatggcggaaccctgtgtctactaaaaatacaaaaattagctgggcatggtggcgcgtgcctgtaatcccagctcctcaggaggctgagacataagaattgcttgaacccaggaggcggaggttgcagtgagctgagatcataccactgtactccagcctgggcaacagagcgagactctgtctcaaaaaccaaaacaaaaaagaaatggcagggccaggcatggtggcttatgcctgtaatcccagcatttttggaggccaaggcgggcggatcatgaggtcaagagatcgagaccatcctggccaacatggtgaaaccccgtctctactaaaaatacaaaaaattagctgggcatggtgatgcgtgcctgtagtcccagctacttgggaggctgaggcaggagaatggcatgaacctgggaggcagagcttgcagtgagccgagattgagccactgcactccagcctgggtgacagagcgagactccttctcaaaaaagaaaaaagaaagtaatggcagtgctcgctttggcagcacatatactaaaattggaacaatacagagaagattagcatgtgcaaggatgacacccaaatctgtgaagccttctatatttaaaatatatatattaaattaaaaaaagagagaaaaagaaatggcaaacaagccaacagataaacatgcaataggttaggtggtgctgtgtgtcataaggaaaaataaagcagggtaaggggcagagagtgatggggtagcgggtatttgagagtggatagtcagggaaggcttctttgataaactgtgcagataactggggagagagctgtccaggcagacagaagagtatatgcaaaggcccagaggcaggaatcggcataagttcaaggaactgcagggaggtcagtgtggctgaagcagagttagcaagggggcaagtggccagaaatgaggtcacaggtagccagaggccatgtgtgccatgctgaggactttggcttttcttccaagagagaggaagctactggaggacttcagggagagggacgatgtgatccaacatgttttgcaaagggtctgtctggctactatgaggagagcagaccacagggacaccaggggaaccaggaagcatggaagggagactgctgcagttagctaagtgagaatggatggtggctcacaccagggatagaagtggaggtggggagaaggttttgaggattaaagaagataacattggccaggtgtgatggctcacacctctcatcctagccctttggaaggcttaggcgggcggattgcttgagcccaggagttcgagaccagcctgggcaacacagcaagactccttctgtacaaaaaattttaaaattagctggcgatgatggcttgcacctgtggtcccagcaactcaggaggctgaggtgggaggatcgcttgagtgattggagattgaggctggagtgagccgtgtccatgccactgcactccagcctgggtgacagagcaagaccctgtctcaaaaaagaaaaaaagaagaagaagaggaagaagaagaagaagaggaggaggaggaggaggaagaggaggaggaggaggaagaaggagaaggagaagaagaagaagaagaagaagaagaagaagatcatttacagtactttctcaatacattgtatgaggtttcatttgtgtttcccagagatttgggatccaaattagcaacggagaaccactggagtgcagtggcatgggtgcttaagctgatctgaaatgattgctcctggcctctcgaggtggagggtttgtacacacacaaacacacacacactcacacacaccctggcatctgcccagtgaccccaggtgagggtccatcaggcccttactggagagacagcccctctcccctaccccttcctatggtcctctgtctcatgttctcagaagcacacaaagccactgatgtgttgggatactggaagcaagataatcagctaggattactgagacggtagctcactatacaagatctggagggtctaccctctctcctgcccctcccaactgtggggtggtgagaaaggcaggtctcctcgaaggttatataaatatttgttgaacagtaacacagctgggagcaggaccccttcctccagctgtctgatttgctgccccagagaaatctcagctgggattagggctgagctctggaacactccactgtgcatctgctgacccccagtgcccccagttcaaactctcccatctaccttccaaacctgtcaatctgagccccacaccagggagggagttggcaagaagtggtgccattgactggtaaaaagaagcctgccccaggaatcaagacacctggattgtgtggaaggatcttgagctagtcacttgccctgtctgggcctaattttctcctctgtgaaaatgagcggtttgaactagatgctctctaaagtcctttttggctcaaacgttctggattttctgaccacatgaactgggtctgatccagggtacctggcatttcctgcaggaagggcctggaggttgaggaggaaagacagcagccatgctggtctaggaaaggagagaagcgccccacattcatgcatgaggaactctggaagacacaggcattgctaatggtaaagaaatccattgcctggacctggacccaatgtcactgtggcttctaaacctgtggccaaacaaggccactctattattaatctttcttgctgttaatgttctaaagcaagtataatagtacctgcctcaccttagatcactaggttatttgaaaatagaataaactcatggatgtgaaaatgctttgaaaacttctacacagagactggaaattattttcttagacatctgtcaaggtcacgacagatgattccctcaggattcagtagggtcattgggggatctgggagcaggtttttgaaagctgggattaaggatgtggccaggtaattccccattgatcctgccacagtatggaaagggttaattcactgaagtccctctcccaattcctttctctttcctttccctgcccctccattctggtttaattctttctctttttaatcactctgctgtaaaatgcccattgtcctgcttctgccactatgctatcaactaggcctggctaggatgcagaggagtcacaggcccagctatcacccacaggcccagagggacattctctgactggccaaaacttgttcaaggacaggcttttccatctgaggaatgaaatagccttatgattgatgggaacgagaagacatgagggcaggtcagtggacagagttgtggatacctaccttgggaccctaatcctctcaagggtctcatttctggggctcaccaggaaatcgggtatgtgatcaggccccagacaggtgaccctggaacccagaaacccacaagcaagcaacactggaatttagagcacaccaaactgcttctcaagtctttccctttttttcttaccccattctaaccaaccacatcaacctctgagattattgtccaggagacaaggagagcctcccataaactatctttcgatgtctctgttggaaatgaaacttcagccaaaagaaccttgggcctcagccaaggtgactccagagatcctttgaggtggggaaggtgtgggaaggaagagagaattaccccctcccaggaatctggctgagggacctcatgcatattagcctgcattctgccctctgctttggacatttcctggactttctatgcctcagtttcccccttgtaaagagctgctgtgagagtgctggcacgggagacaaatgagatcatggctcctaagggctttttgaagagaagccccacaggagcacagaggaagcctatgtgagatagacaggcctttttcctctctccctctttggctgggttttctttctggacaagtgcctgactcccagctccctttcagcaggtgtcatcctcctctaccatgtgtccctccgctgccccccactccctgcaccccaggctacagtcatgctcagagtcaccccttcattgcccatcccccaccctccacctccactgtagtcaagacaaccgtgccaccatatcccttccactctgccacaccctcatgacaggcaaggtcagggccccttcaagcgcagaagctccccattgacaggggaggctgtgttttcatattttcacaaaaaactcccagacaacatttctcttcagtgctgctgccaattacccaaagtgccctgacctgaaaatagcaggtgctaatttgcatgttacttatttaagtagcaacgcttctgggatcctgctccttcccctataaaagctcaccataacctccacgaagcagtaaggtagacactactgtgggacttaccgtcctcatcaagaaggaaagaggaacttatagcaggaaacttgccttctgttgggttctggcagctcaggaatcaatcccaagaaggaggtgatttagagaccctataccccagaatgttcagtggggactcagctgagagcctctcccctgagctgagctactggctgagacttgttctctttatggtttgctcctccagtccctgtgtgaggtgagacacacagggaggagggtggaaggaagggtgggcaggcctccaggtatgaggatgagggatggagccacatggtctctggggggctgcgagggaatgttcaggaacagctcagctccatgcacaagacccctgtccctccaagtaaacccctgtgcctacccctttcaggcctcagatctccctccttccaggccctccctgctgagaaaaccacaaaggaggaaaccttatggaaagcttacagctagatctggagaaaaacatcccctgctgatgacattcctttggctgagacaaagtcattttactcaggattccatgctggctgaggctaaagagaatcccttatggcacgtcactgtaagctgttccccagatgacccaggccagctccagcacagctgcgtggacagagcctccctagagaactcattgtgctcaccccgtttcgggtggtggtgaggatgggaggctcaggacattaccagaacaggagagccaggatagggcttggccagggacatcatcctggaatgaaatggaagaatatgtgagagagaaccgtctgccttgctctgattccccctcagagctggtctgcttgggagctggtgcatcttttctaagtcttactacccaaacctcttagaacagagtaaagggaataaaaatctgtctgccccccatgctagggggaagtctgagggattggcgctaggatcactgcagctctttactcccctttgatctcaaagcatatttggaaaacttggccacaatgtgcaacctcagaaacaaagacccttcctccaacttaaactgttccattctccagaaacagaggtccctctgctgaggttttctgtcctctaagaactgtggttcatcactctagagctgcagccccaggtcagtggcattgggcagccagagtagtaggggcagaggggctgtacagttacccaaagtgcattgacctgtgggccgaaaatagtaggggcagcctgcattgctggggggcttgggaaaggattgttcctaggactcaaagcaccacccagacctctttaaaggcagtgagagcgaggaggaggagttcaggagtgcaaacctctcccttaacatctgtaaaaactgaggcctggaaagataggcttaagagaacacatgtgacctggatctgtatgtgtggctcagtcacatcaaactgcccaaacactagagactactgctctgtggtcccaagtcatcttagttcagcactttagggggcttaaaaaaatgctactgttgtttttgtcgcttaaagaaactgcaggtataatttgtccatctctaaaatgtaggcttcccagtttgcccagttcacattggcattgggacccaaccatagacacttagccccttccaggagccaagagtgagaactggaggaagcaagggtgagggcagcaggctaattccccccacagggctcctttctctggaaccaggagagtgaagttaccaggaggaccctcaggggggaggaacccaatgggaggaccctgctactggatcccactgtttttttcctaaccggtcagttgaaaatgcatcctggataaagacacagatccttgggtggcgtgagctgttgtttctctcccacaatcttcccccagcaagcacacctcacctaatctgtggtctcctgaatgctggagagatgttaggccccaccccctgaggttgttaggacatcggaaggtcgcgccatcctacttggctcccggctgtgagcagaagggtcgtgagccaacctgtggtaatatgcacccctatcggaccttcgtttcccaccacatccctccacggaccttgttttaggcaatgcactgacccatgctccgatttttagaaatttctaaaagcctggaaaggagccaggaggaggccgggaggaagccctctatggagaaggttctgcccaggcctccccaactccttacccacccgtgccccagagagaagtggctcgctgctcacaccccctcctgccagtgcagcgcgagtaagagcgcccaagggaccacagctggcatcccaggggttaatttcggagcagcccaggtggaggtcgagcccccagccccgtcggcacctccaggcttccgaggccaccggaacggaggaggcttcggtggctctttgtctacctgctctgggtgttaaagagcccgctcgcagcctgcatcgccggggctcgggacagaagtcagcggcggggaaatggggctctgtcactttaagtacagctggagccgtaagtacaagccctggtggtggggagaaaagggagcggagggcaggcgagggttaggtttccgaccctccgcgtggcccacagctcataccttttcgggtgtccccgggtgtcaggcgagagcggtcctggggggcgctgggtgcccacccggtgaatggccgcctgagccggggaagatgcttcatctgcccctgcccagatccggaagaacggtgaatttcccccgcaggtaagcgcccccacccccctggcctcaccgccagaccgcagagctggggtcgggtttgtggcacccccagccccgccgcagccccccagttccgccgcagctgcagtctcaggggcagtgggtgtggggtccgcaagaaggagggtcttggccgcgctcgcttttccgccagagaggagtgcctgcgccgccggagcctccgagctcctggacgtttggcttacgggcatctggggctgggagtgggtgtgtggagggctctagggagtggaaagggaaggaaaggagcttaggcgcccaggagacctggacggagctgagacaatagcgcaacttgattgaacttcgatggttgcggctgtggcgcgtgggggcccggcctgtgagggtcgggggtcctggggaccaggcgggtggaaggaggaggggcttgcagccccaggtcggccctgccaaggtcaccctagttccggaagctccgggggtcgtcctggggtgaaaggaggtggtgggaggcggaaggatgaaacgggggagggaggggacgttgaatttgtgaccgtactgctggctggatacttccgagagagagtgaagcctggtgctctaccctgggaaggggtgaaaaatcggagagccgggtaatttggggagacgcacagtgagggactggtcgtgtaaggtgagggcaaggcacagaggctccttcataaaggggaagtgagtgtaaccacagctggccctgggactctctgagctgacttggaaactgcacttccaagggagaattaggaaattccaccggcctgagaaagggggctggggtttctgggattttttagcggggtgggcaggggaggcttcccatctcactattctcaccccatatacactctccttcccctcagcctcccgcagacctgggaagttggaggttgggccctatgcctggtgctgtggccactcccacctcaaatctcaggcagcccagacctgcaccctgtaacatgctcctgcgtcctcatattgctcgaagggagccccaagtaccctccaggggctcaattacaactgtgcacacaaaggtctagggtaaaagcaaagaattgggcaaggcctgaaacgagaggcatcttctgcctccgttcctgccctgcaagaccatgggcaccaggagccccttggaagccagaggcccgctgactccaaacttttttcccctaccacagtatgacagaatgcagccctgaagcccccctggaatgtgacttgggtccttggggtcactttgccaaaatggctggtaggtatggtggtgtcataaaaggaaccagtttatgagcagagaataaacccatgtagggacctcttacttcaggtgagatcctgggctgagtcctggacagctcactgggccctggagaaggtgaagggaaggaactgttcataacctcctctcctccctccacctctgccaccccaactagagcctacttcagatccacatagggtgtgcccaaggaaaattataattgccacccaaacaatatttgcactgcctctactcttaaattctttgcttccccaatgcctggagggtgtgcaagtcctctaagtgaccccaatgccctttctctgagcctatcactctttccttcctactcaacagcctttctaggctacctcattctttcttttgaattgatattctccccgcctccttcctttacccaactccatctcatgggaacctgcccttataaagagagcttagtgccctatcctggggccatagctattgaatactcacctagctcattaccagaaacagacttctgggcaggtgtgccagggcgggtacctgtctgccatagcccaggttgaggagcaggtcatgttacacctacccagcctactagggtggagctgggttaggcctgtggtttcctttccatccaagcccaagactttcaggtcaattgctattggtaggcaaggagacaggggatgttgtaaagtggaggtcattcctcgaattgccacacttcacatataaaatttaactagcctggctccaattcacagagggggagcttagcccaagcctttgctctggggagggctcaaaactttccctgtaaatgatgttaggctgaggccagcagggatcaaagagatgcttaccctccagaatcaggtttcccttaaactccaaaggaggcagcactgggaagatgtgagggtatttgggtgaatgacttaattggccctcaggtatctccatgaccagctcttgatgagtgagctgtgatcagtccatggcctcttcattgtttcagagcagatgtatttcttctctggatgcctgggattcttccatctatcatggaagcctgtgcccacaagcactgttcttgcgtatctcaaacattatggtctctcctggagactccttctcttcctgtcccagcaaacactgttcttcagtgtcttccaagcatgaagtccaggcatctatcccattcagcactcctagactccctcctggaaagaacccttagctagagcctggggatcagtgggaacaagactcgctcactacggttgcctcactcaacccacagagactccctggggcagagggcttcggcttggcacaaactcagcctctgtgagaggacagaatacctagggacagccaagccaatgagctgcttctcgttagaggattttatgggactaggcacacacaccgcaggcaaaccacacttgctggattaacctcttcctgcaaagcccctgccctgagcttgggaggaatgagggagggacttaatcagcagaaggcatcttaataggggggacagtccgtgtctaacatctcagctaatcaccttttctcattttaacatgaggctgtaaaacacaagccatactaagtgctttgtaaccattttttcatttaatcttcacaacaaccgtatgaggtatatattattatcatcccatttcacagatgaagaaactgaggcacaaggaggttaagtaagcatactaaagatcacagtagtgggatttgtcctcatacctaggtctgtctgactctaaagccaacccctaactactatgctataaggagactattcttaccaataccagttgaggccccaggagtactaaatgctgaagatgcagaagttgagagtaattggaggactcagcaaaggtttagagttggcctgcgactttagttggaatgaggtgaaaattataattgccacccaaccagtggggagtgggaagattactaaacttggagtcagctgacctgatttagaactcactccactactaattagctttgtgaccttacagagattgcatagcctctagcctcagttttcctctctataaaatgggtatagctcctgactgatctaccttactgggatgtaatgacaatgagaaaatgtgaagagcagaatgctttaaacatgtgggctttgataagtggaattatgaccacgtgaagtcattcccagaagcaagagtctctcccaaattctttagattttttttttagcatctttttcttccgtcttactaggactctaatgaggatgcctatgagtataatacatggaacagttcccagcttagaatatatctctgatttttacttaaattcgtcattgcccatattcaggtttctattcagtccaaattatatgctaatgaggatggcatatttatacattcctggttcggatagcaatttacataaaaatagaccactttttaaaacttaaaagatgattttttttgtttttttgagatggagtttcgagcccaggctggagtgcaatggcatgatctcagctcaccgcaatgtgtgcctcccagattcaagcgattctcctgcctcagcctcccgagtagctgggattgcaggcatgcaccaccatgcccagctaattttgtatttttagtagagatggggtatctctatgttggtcaggctggtctgaacttctgacctcaggtgatccacccgcctcgtcctcccaaagtgctgggattacaggcatgagccaccacacccggtcaaaacatgatttttttaaaaagcaattttgttcatttaacctttcctccctgacaactttgtgccagccactatgctgggtgctggagaaacagacaaaaccctaaggagctgacggctatgtatgtatgtatgtatttatttatttatttatttatttatttattcattcattcattcaacaaactctaatgagcacttcccagatgccaggcaaagttctgggtactggcgatagaatagtgagcagtaaggcagaccgtagtccctgcatttaggagctatgttttcttacaatgaaaacagatcaatcaatgttagccaatactttaaatatattatttcaaaccatgagaaatatgagaggggataatgcaggaggatgcagtctggttgaggaggcagaaggcagcaagtaactgtgataccaggtcatatgtgcagtaactgaaagccagcaagcaggggccatactttgagtggtcctggagagcttcctagaggaggcagcattttctttagggctttgaagagaaactaagagttttccagagggacaagagcttatttgaggaaagagggggaagtttttcccaattgagaggttctgtgtcatcttccaacttctctgcctagacccatcatcactgtgccttcatcagtcacacagacttcatatctaagacagaatcctctgagacaaacaactgaatgaatttttcactgctatctggaggaatcctatctggaggtctttgatagtgccactggcttgtttgctctggacctgggtgtcagtgtcagctcacgtttagttcatggaataatagactgtctttcagctgtccttgcccttgccattgaagcagaatcgaataattctacacttgtggagcatgtgtaggatgtgagaattcatcctcagcctaactttcttgggatgcttcaggaatttcctagaaatgctcaattcttggacgtttacatcttaggaaacctttatcccataaaggctctgactcatgattgggtaagaaatattgaaaaagaaagaatatcaaatatccctcccacacacatgcatatgtacacacatacaaaacagtctggccactggtccttaagtattgagcataatcaaggaatgcttgatgtaacccatggacttacaaaggatatatagcaagtatgaatttcctcacgaaccagttttcctacttagtgtattgttgcaggtgccattcgaataatggatgagttattcaaaagaggggagaagaggaaagttgtgtacccacctctgatttcctgggtactgagctgggtgctttacaggtgttttctttgttatcttatttactctgccagttagcctgaaagactgatggtgacatgaccatttttctgatgtgtgcatatgttcagggagggaaagtgcctgtcctaagtcagtcagtaagtagtggagcagaaattcaaacccagctctggctggctatacagccactcctccctagactaaatgtaaatctaaagagctgggtactttctacaagcttgaaaatcaagttcccatttggaatggtcatttcctataaagaagagctgctaatgaggttccccagcctccagggaagttaattttattgtatttatttatttatttattttgagagggtctggctttgtcactcatgttacagttcagtggcgccatctccgctcattgccacctctgcctcccagcctcaagcaatcctcccacctcagcctccaagcagctgggactgcaggtgcatgccaccatgctcagctaattttttttttgtagaggccgggttttgccgtgttgtccaggctgttttctaactcctgggctcaagcaatccacccacctcagcctcccaaactgctgggactatgggtgtgagccaccatgcctagtcttgcttttagacatatctatatatattttccccatatttactcatcatatggtgatagttttgtccaattataagtttctaggggccaggggattttatccaagtgcagcatatgtggaacttagtaatgatcttttgatgatgacaaaaaatagctgataggataccactgtaagagctaatatagctgtacagctttggacataccatatttatgctgtgtcatgtcacacacagagcccttcagattaggttaaatcatgtcacctgaaacataacaggtacataaaatggaagcaaatccaccagcaagtatttattcattgcctactatgtgccaagaaattctgttaatcactaaaaacataacaaaagacaacctattcccattccacactatgattaacttgtaatagaattggatatttaacagttattggggaataacagtagctggaaataggaagcaagcaagtcagaaatgtaagggaagatttatgcccaggtcaaggagcagcacgttaggagcgcagtgagtgtgggaaactcatggaagttcaaatgtagactgcatcaaaatttggagagaatgaccaggtgcagtgtctcgtgcctgtaatcccagcactttgggaggctgaggcaggtggatcgcttgagcctaggagtttaagaccagcctgggaaacatggggaaacctccatctctacaaaaaaatacaaaaaattagccgagcctggtggcacacgcctgtagttccagctactcgggaggctgagatgggagggtcgcttgagcccaggaggtcgaggctgcagtgagctccagtcatgccaatgcactccagcctgtgtgaccctgtctcaaaaaaaaaaaaaaatgaagaaatttggagacactattcaggtagaagggagactttcaggtatgaaggaggaaggagaagaaccctgggcctgagataaatcttgaagagaattgatggggcagtggatcaataggtaatgtataaagaaatcggaacatatggcccatcccactctgtcatcttcaccgtcctcctgggcccccattctcgtggctgtgcgggcagttgccctagtgcatgcacacacggtcctgcctgtgtgcatgtgtgcatgtgtgaaactgttatttttccggcttggaacattttcccatggattattttaaatagttctataagactatactagactatcaagttttgattttggtgatctgccaactgtacgattttaaaaataggtttttaacagctttaaaacagaagtagtatttctgccagcgggtggaattgtggctcaaaggccctgaaggagaacacatacttgggatttattcctgggtgccatgggtttctggaattttgcccctagacacagtggcgaagacagcagagggtgttccagggtacacatcctagaccctgctcctatttattccctctgatacgtggttgaaaagcagtgcttgagtggttaatcagatccctggaaatggatgcctcactcttgtctggaaaaagttccctaatgaaatctcttgtttacattatgctacacattcatgttctggaagtttttgccacttcttcccatttcctatattatatatgtatttggtgcccataattggtactgtttttcccccatttaagcttctctcttcctaaattctagataaacatccttgtagtttccaggccctgggttgccaactcagattcccatgcttgctgtcactgagtgcttatcttgggatccttcttccagaacccagagctccttacgtcaaccccaccggaatgggtccccaatatatgggattcatgccgaacaactttgcagacaccttctaggctagtgttgagctgaccctggggaagattgtagttgcctttccctggaaaggcggctctctgagtgagaaaacttcataaagactactcttctcagtgctcataatgtgttttggaattattacctttgcagtatatgagcagtatgttaatttattaattttccttgtcccattattaaaagggtcctcctctctcactcttatgaattaagtgtgaaggaggaggtatatgtaataacaccagctttttcacgtggtttatagcaattgctttcatcttttatgggtgcatctcatgtttgccatgatatttcaagttgtttcttttctggggttctcatatggaaatccctggcaaagctgtgctcctccagcattagcatgtgtgcagtgtttagaaagggagatggaatctgggctgctgcactgcagttacctcagcagggaacctaccagcctccaccaagctctacccctggcctcagaacctcagggggcaaaagtggccagtcacgtcctctgtctgagaaactagccatgagtctcttgcaggagggaggaaatcattgcttactcatgcacaacctgatttaggagcattcctgctatctgagaaactaattctgggaatttgcacagagctattcattgtaaaagcagctttgatccccagagagtccacaagaccttggaaaaaaatttactgtgccagggagacagtggagcctataggagccccctaaagaagttgggacccttgggtttggtgtctggttttgacgtagtagtctgctcaggtaaggctcttagctaccccatgtcccttttataaagttgaactaagactctctctggcccagcgtggtggttcacacctgtaatcctagcactttgggaggccgaggcaggcagatcacttgaggtcaggagttcgagaccagcctggccaacatgacgaaacccaatctctactaaaaatacaaaaattatccaggcatggtggcaggtgactacaatcccagctactcgggaggctgaggcaggagaattgcttgaaaccgggaggcggaggttgcagtgagctgaaatcatgccactgcactccagcctgggcaacagagtgagactccgtttcaaaaaaagaaaaagactctctctaactgagaacaattctacctgcgaaataatgtcttaaagttaaataacgctggccatgtgatttcagcccaatgattcagcaataacaattattagcctcacttcctcatccccacttagcaaaaaaattcagaggtgaagcaaagagaaatatactgaaaagcagcaaaagtcagaaggggagctgtgatgatgtcttcagccttgtgaatttcacttttgtctttccaaaatggttctgggcatcagatagagcacaacccttgcaccaacttgctcactattccctctgactgtgtgccttctgcacacggagcacaggttgccaacaggctgctctcaaatgtgcctgcatccttctgctccaccaatcaagttgaatgctttcctagaattgcatttgctcccaaacctgtttatgccagttgaacttggataatataattattacataaattgatgaaatatgagcataaaaagaaagttgtttccataaagactatattggaagtttcaaaagggaaattgctagcctgggcaacatggcaagacccagtctctccagaaaagaaaaagcaaaattagccaggcatggtgacacatacctgtggtcctggctactcaggaggctgaggttggaggatcacttgagcctaggacgtcgaggctgctgcattgagccatgttcacgccactgcactccagctgagcaacagagcaattctctctccaaaatgaaaagaaaaaagaaaagaaagaaaaggcatgttgctgagttatatgtaggacttgaaaggttagaggagattataaaactctagaggattttgctttcagattgctttatgttgttaaaattttgctccaccttaaagaaactgacattagacttgataatgcactgtaggtatgggtgtgaagactcaagttggaaaagcagaagtgtatcaggaaaaattctattggtcctagtactttgaatgacactgaggttcactggcaactttctgtgtaattttttataacaaagacctaccgctgcaaggattttacatgtaatgagtgcctaaggaaggtatgaaaaacccttccctggaagtctcccaaagcagaaaaacacccatttgcgtggatgacttggtgcatcagtgataggggagaaatgactgaggtaaactgttcatggtatgagagttgaccaagtcagggtggggaggggaggaagaggggcaggtggacttggtgactctgcctccctttcaaacagagcagccctgtgtttacctgtttcatacattgaggacttctggttaaaatgttagtaaaaacgattgctcttcttaaaaaagggcttgcaagccaccagattaggtcttttccatgtctttctttctccaaatctatatgagatctaaataagctctccccaagtcagacagaggacatatttttagtgctcaagtcatagcttgtatttactcattttcaactctttggagtaataattgatgaaatttatatttactcacacctaccacttggttgatgcccagaggggctgtcacctcccaatctcagaaaggcaggcaggaatttttggcctgcctgcctttctgagatcggaggaggcctggagggtggggtgaagttgtgaggaccccttttctaaattgagaagtggtctggatctaccctgtatcagaacaggatggaagaaagagcaggatgtttttatttctgtctattgcctgaaggcatctcctctagaaacaaaaccagtttgattttgattaactttctcttcttttaatttcagtcttccttctcttgacttctttaaggattatgccaaaagtcctagactgatcataaagcctcagaacaggaatttcactcatagttgcccaagaaaagcatgttaataccaaaagtaatttcctagccagtcatttcctgtgttctcaaaattgttatttttctctaagatatgtatctttagataacaaaaactgttctgcctctcaacctggaggaggtgatgtggcaagaggcatcttgacgaaagcatgtgtaaaagaacatgtcagagaagccaggaaaaggattgatgtcctgctaagtatatgtttgatatccagcccaggttggagcacatttttagcactgaagagataaagcacctaaaaatctaatgctgactttgtcactgatttgttccacggctgagggcaaatcttccagccttagtttcccccctttgaagaagaatgaagttcactggcagttgagaggcacataatgggtatgagacagtttagagagaatggaattttgtctgaatggaaagtgcatcagtaaggatttgctacagaaatatggcaatccaatctcatggggtgttgaaagcaataaccggttatgaaaattgtcaggtattaatatttgcaaagcactatagatacttcaatacctgattctgtaaaaactgagtagaacatctgcctttcaaaaatgtttggtaaagctggcatttacaggttaaggtttgagaagtttaaatcctttcagttccctgttattctttcctccattcattcttcatctgtaagtgggcaggatgtcatgcctggggcatgtcgtgagtggctttttaccttgcctgaacacctgtgtatggtttgtttctctggaataagatctttacttcatccagttattgtttaagaattaagattcctttttcttttcgttctttttttgttcaaagctttgtaataggtgagagatgtgcttactttcacatgcatggaaaactcacccataaaaacgaaggtctttcacaatgcattagctgggttttctctccagtgctgacctttgacctccatgcacaatgtggtattcagctgtcctgttctctgaagtgaaaaccttcagagccctcaacaaagatatttcaccaagagtaagcagtccatgaactaaatgacttaagataagaaggcggttaattctgaaataaagatgaaggcaagaggtctataaaaattacaaagccctccaaggccggatcactgatcccccccatggtgagggtgacaactcaaccttccttaagacccgaattaaagagacaagtgcactttctattccatggaatttctaaatggatttctttggacaaacctgcccagtgttccttggttgtattaataaaaagagtagagaatcttagtgggggaggaagctattcagaatgtatgaattaagagggcttcttgggagcacttcttttgaaatccttaacaagcactcttattctaaggatctcaagcccatttatgggctgcttggcaagaaagaaaacttcacaaataacacatggtcccagtcatcaccttagacaaagtgctaagaaggtaacggattacagctttgcctttttttttttttaattgctctgtagaaatgtaaagaaagacttaggcttaggaacaagctttgggtgtttaattgtcaggtttgttgaggagaaggagacagagaggcgaggtagggaaaagtcataatttggtttacacgaaaaaaatcatttctaaggactgtgttcagaatatttgtctgccaattgtgcaaagacatccagatttccatggtgtgaggaaactgttctttactgcatctacctcacagtggtaacttgcaaatttttcccccatgaagctttatttttggtgaccactgtaatttacatgttgggacctattattaactgctagttttgcactgttattggaaatcttcacattaggaaagaatgtaggggtagttttggggggaacgaggggctcaaattaaaggttaccttgtatagtatctcagctctgtctgggatccgagaaggaattagaaactcacaccccctaagcaaagaaagctttggaaggaagcttcccaaaggaaacttctctaaggaagagcattcacatatcttagaagtggcttttcagagaaaaaactatcacgtaaatgcttttaaaatggtctattttggagccactgtggcatacatactgcagtttatcctaggagacaggattgatgagcccctgtaagaactgcattgcatatttcataaatgtaaaaagcagaggcaattgtgctatattaaatttcagcccataattgggtaactagagaagcccccatttaattaaattccgctatccactgtatgataggaaaatttggtgaccttatgtttgactactgtctgcgattgaagagtggttaaagttggtataagaatgtattgtgtatctttcaaatgtccttattagagaaacggattgggggtaatattttaccttaatagtgcttctccagtgactccttcagaatgacagtgctcaactcaaacaccgtgtgttttcattggctaggataaatgttttccacagaaatgacaaggcttcaggctctcaagaagctctcatcatgagaggtcaaacgattttacacacaaacaattccacagcacattctgcatccttcttgcaatttttaagctgtgctaggcaaactccacataggagcacattccagaaacacactgggggttacataaagggctagcttctgtttggtgggtaaatgtgcatatgattattgttgttacacaaaagaagggaccaataaagtcctgatgtgactttcccaactacagaaacccaagaaaattctttgccagaagtagatacattgtcattctgatggcagatgactacccaaagaaggggaaagtgaaggaaagctggaatctgggaacttgcaatgggataaagttgctttgaagaaagcacttagcaagtgttttttttccatattgccttctttcctgccacagaccctaagattctctaatcacctctgttccggggaaaatattttaatataaccccttgattcattcaacaagtatttatggagaatctactctgtgccagacccttccacccaacctctcataccctatacaggaagatactctgccatcatgtttgccaatgggacaggactcccaagggaataggtagaagaggaacaccagtaagtcaagagccacatataatgaaagaccaaagtgtaaaaggtgggcagaggaggaagaaggaatctggataagcaggaacagaaagagaatgctgtcaccgaggctaacagagggaagaatttcaaggagtgactgacagtgttaaatgcaacgcagaagtcagaaaggatgaaaaagtcctagttgaattagcaatgtagagatctttggtaacccttgccaaagagatttcagtgaagcagtggaaatgaaagccaagttccaatgagtgggggagtaaatgtgaggtaaggtggagaggcgatgagtgtagtagttgaaaggagagacagctggtagcctacaaatgcaggcgaaaagttctctccatgtggctcatgagtgatgaggcagcaggatcaaactagacataactatctcctgctctatctgcttttacctttttaatcctatgatctatgctagaaaattttttattttatgttatttgtaccacaggatttgattttattttgtcctgttatattaactaaaccagtttttaaaaatagggaaataatgcgtttcattcaatatgtacaatggaccctcccaataaattagcaataaatttacataatttgtctcaaacaatggaattatgctacaatgttaaagaatatgtcatatcaggtataatgtttaaaaatgccagtcaggaacagaggaatgactttagataatttgagatacaactttagagaaattagtgcctttagacatcagtaataagaattcagagtaaagacaacatgttacttaataccttgccttaaatatgccccagttgacattttgtacacatttcaacatttttcagcaacactagaaagaatcaacaaatactctcttatctctaaaataacaattaaatattttgcataaaaacatttaaaaacttaagatattatcttatttcccctgcctgggcaacaaattgaggccccccctctacaaaaaatttaaaaattagccaggcatggtggcacaggcctgtggtcccagttacttgcctgaggcaagaggaggtcaaggctgcagtgagccatgattacaccactgcacttcagcctgggcaacagagtgagactcttgtctcaaaaaaaagaagaaagagaagaagaggaggaggaggaggaagaagagaaagaggaggaagaggaagaagatatacttattttagcttaacttagtttttattgttatttgaaagggcagtaatgattggctatcaacattgctgcaggataggaactaaactggtttccatgaccagatataggctaggaaaacttgcattcttagttcaattttagttagaggctgcaagacaagaatcatagtagtgtggtttgtgagatttggcaattaatgcacttacacattagttgctttatgtctggaaagacctggaaggtgaaagtcattaaaataaacctcctccttatgcctggcgtggagaagaggctcctagaagaaacacagctttaaaaaaagttgtgggctgggcacggtggctcacacctgtaatcccagcactttgggaggctaaggtgggtggatcccaaggtcaggagatcgagaccatcctggccaacatggtgaaaccccatctctactaaaaatacaaaaaaattagctgggcgtggtggtgcatgcctgtaatcccagctactcaggaggctgaggcaggagaattgcttgaaccagggagtcagaggttgcagtgagctgaggttgcgccattgcactccagcctggtgactgagtgaaactctgtctcaaaaaaaaaaaaaaaaaaaaagtggtgtagggtgggcagaatagatccagcatgaaaaagttgccacttaacagtttaattactactaaggagcagtgttccaagtaacagactgaaaattggggaaaaaaataaacaaatatgggcataatgcagagcctatataaaaatatttaaatcttcagttctcatgtgtttttctagattttctgtagtctgtagcgctataatcatattttcagacatttaaaaagcttagttccctgaatgcttcatacttccttgctaattctggagcaaaaccattttaccaactcttcatattgttttatgtctccctacaaaatatcaacacaaggcacaagaagtgtctcagggccctctacattttataactaaacatttggtctctctggccaaatagactgatggtgtcctgggttgttgccaagtagggaagactctgcagtctccttcataatgccttaaaatccctacttccttgctgcctagctttttagtcaatattttgccttcatgtgactcaatatgtagaaattctctgcattttcaccctgaagaaaaattccttctccagaccaataggttttcttctccagcacatcccacattttttatagttccttctccaggtgtctggaaaagggcaaagaactaatgagcaattctctttctttctttccttctttctttctttctttctttctttctttctttctttctttctttctttctttctttctttctttctttctttctctgtctttctccccactactttggctttctttgtgattgatcagaaaatgattcactcttagccccaaaagtttccttctgtggtcacaataatagtggcaggtctggcataggagtatgttaaagtaggctgtccacaagagccctactgttatacggacctatgcggcacttatggttctagccatcccacagtgtcataatgttcagacaaagaagcaatccccattaactctctgttcaacaatccccattaactctgcagcttgactttcatgtggtacatgccattgaacatctgaaaaagcagtctctcctcaagatctctgaaggcaagaagtttttagaggcttctttcagtttctttcttttttctttttcttttttctttcgactgtcttgctctgttgcccaggttagagtggagtgcagtggcacaatccataaatcatagctcactgtgacctcttaacttctgggctcaagctgtcttcctttctcacttcctgaacagctgggactataggtgcttgccaccacgcccggctaattttttagtagcgatgaggtctcactaaggctggtcttgaactcctggcctcgagcgattcttctgcttttgctggaattacaggcatgagctgctgcattctgccttctttcagtttctatatttgatattctgtcttgatatagattgcacactattatagttcataccatactctacatctccagtgctgtcatcaaatgacattcccccaaatcagctgaccaggggcatctgccattaacctgggaaactattctgagttcattttcatccagcgaggcacaagagggttgaccccaaagcctaagctgtggggcatcagagcactgacgtctttgactcggaagactaacccaagtctgaaaagaaagacagggctgtccaaagcaaaagcatcactgttgctacctggccagcctagttgcggtggaatgagacatcatgaggatgatgcagctggttcccaggtggttgtggaaagctgttggctgcacccacgcataggacccctcttggcccatccaacgcccccaagagccacagggcctcctgcccccatccatatgtctcagtatggtggccccacttgtggggactcatccggcattttttttcttgtcctcaccatgagggattgatgttttggattcttgcccacgagttgcatagacttcctttacaaagtaaggtctttggggccagatagggtccttgataagttttcctaaagaggaaagatgctagaatgggcagtccaaaaagagtgcctgtcccaccacatgtgaagtcagttaaattatcagtagctgctcttcagctgacaccctgacatcgatttcttttcttcccattctactgcaggcatatgatgttgacattttatttggtggtgatcatatttaaggaagtacactgatttgcctttggaaactgtaggaaccaacctgagcaaatatgtaagctttctgtcaagctacatagcctatcctacattattctttttgctaaagcccttcagatacttggagcatgtcactctttcaagcaaattgtgttttggtttgcaggctttttgaggtctaggaactaacctcatttctttttcacaattctaaatcccaaatgtcagaaactactgaggcgcaaggtagaagtgacggagcagacacaaattaaatttgacctggagactacctttttgtgcaaagagtccctagagatgcataagtgatcttcaccctccagtggaacaccgtttggaaagctgccaaataatgcactgcagaagtaatcccatatggtccccaagtgatctgagtaaatgcctaatttagttttgctattctgtgaccacccctaacttcatttatctctctcgtaatggaagtatttgtagtatatgtagtggttaaaaacagtctttagagtcagacagatcttgatattacaatggctttgttttcttcttactagctgtgggcccttgggcatgtaactttatctgttttaagtttcagttcttgttgtaagtaaaatggaagccatatctaacttggaattaatatgaagctttaaatgaggttatacatgtatgttaagtgcccagcaaagtgcttggcatacatatttaggtgctgaacatatggtaactattgttgtaataacaatatctagtgatgttcccccctcccaaaaaaagattagattatttgcattgattagcctacatctggcagctccactagaagtataatgtaaaatgcatgcccttttgtgtcattataaaaggcagcacattaaagatgccttttaatagcaagtatttaagaaacactgggtttccacagtgcattagttagtgaagaagtggagaaactgctttggtttgatgcaagcttagaggcagataacaagcaaacaagtgagctagatattgcatcaacttcacagactgaaggagggccatcacccaggcttcagcatatctaatgtcgaaaagtatgatgcagaggtcgtgagtgttcattaatatcgtttggttgccttctcaggttcctaaattatttaaggtggttttccagagagccatgaatcttttcagtaaaactgcagattttcctttgatttcatgcaggacactgctgcatgcttgtccagcaatgcagaggttatgctggttatgcttgactggatgggtataagtaatagctaatgttgagttggatcccagcctgcctgatgattaagtgaacagcatctttccacagagcagtctcagacttctacatggattgctttgctacaatggaaatcttgacagttgaattcacacagattaaaaactgttcagtaatgaagtgtgtccttaaattctcctaccttctcgtgaccacttcttttgaaataatgatatcagggtgctagttgagggattgaataaactcccccagtaacaaattggtaggtttcccttgcaatacattgaagctccttcaagtcctgaggttattgttctttgtggacaagtaaaaagagaaaacttatcatctggtactcctgcccctgtggctgcttccacctatatcattgctatttttagttttgaacttaaacgaggatggggcatcaaaaagagttacaaaagttactggaattaggaaatctagccaagccactgagatcaaaacttcaaaataatcctactagggattgctgaagctatatcaaaagtttatataacctggtggctgggcatggtggttcacgcctgtaatcccagcactttgggaggcccaggcgggtggatcgcttaaggccaaggggttcgagactagccttggcaacacggtgaaaccccgtctctaccaaaaatacaaaaattaaccagtctcataacccgttctcaaaataaataaatagattaaacttttttaaaaaagaatattatgttttaaaagtttatataacctggaaaacagcctcatcttttaccttattgatgactctccataaccagcctgaagtatttcttttcctctgcatttagtgtagggacaagagttctttttgtgtggtgaccctgcttagatttgtattagagtaacattcttcatccagagttgttcactgactttctccctggggacctcaatagggtgtgaattcctgagagaaatgtttgcattctgtggtgagttggtttctcagtattatttttgaaaaggaaaataaatcaagtagcttaacttgcaacaaatacttcaataacagagtgttatggtgaatctgtggatttggatgggagtctctttatgtgcattacaaagggtcattgtgtcacataacttgcccgtatcctgaatagatcctcccacatgctcaagcctctggacctagagaggcacttctctctaactaacatggtaccatgtagttcagtatagtagtgtgcaagcagacagacttgaggaattagcatccaatattcttctctttaggttttaatatttggaatttgtgtttgtttctgttttgctggcagctttcctttctgatgttcccttttgtttgtttttagtagattgaatgtggacagcattagggtagttacagcagaaaagcttgcttttgccctctatcttgactcaggatttaaagattttgttgactgaataaggagaccgtgaacagaaaaaagatgacctcctcagcttttgtagaaacactaaagaagacgttggaaagtggacttcttatttaataaagaaaaaaagaaggtgataatggaaggccagggattctggagtgagaaaactgaatatgatacaaagaagtcaaaaagcggggaataatgtgttcagagggaacgcctggcaattcatttggtttgtggtgggaagcttcattccgcgaagagagagtagctcagtggctggaggtgtttatagccagatcagcgtttcacaccagcagtctggcctgggtcttttagagctgccagaaactgctcagagttgcacagatttctcagcctagtagtatgaatttggggcctgattcctatccctttttcctctttcagtactcactttgcgctcacagggtgatctgagatctgaagatgaatggcaacgtcttcgtttaataaagtagacttttatttgttgctttatgcatcaggaacatatacaggccatatacgttctatatcacttcttccaacctgtgtagaagaatttgtgcttctgaccaaaaatggtttttgcttctgtcaaccctacataagtcattccatcccactttaaggcatcgcctacttccagaatggaggattggcaatgacgtacaagcagtacgaatgcttctttttttctttttcttctctattcttttccaacctcttcctttttttctgagtcaaaactaaatcagaggccatgctcagtgattcatgcctgtaatcctagcactttggtaagccaaggcgggaggataacttgaggacaggagttcaagaccagcctaggcgacatagtgagaacttgtctctacaaaaaaattaaaaaaaaaaaattatctgggcatggtggcacccgcatgtagtcccacctactcaggaagctgaggtgcgaggatcccttgagctctggagcttgaggctgcaatgagctgtgtttgcaccactgcattccagttaggtgacagagtgagaccctgtctcaaagaaaacaaacaaacaaaaaacccaaaaaactgaatcagtagtagaaaaatcttgttttgacttgaaaattgagcaggttagatcagaagtaataaaagtggaaatccaagaggtcattcttagcccagagttgcttttttgcccaggacttgtcagttacggaattgttatttcttttcatttttaggggttctttttttggtctagccccagggctggtgacctttggcctgcttggccaaatccagtccactgcctgtttttgtatggcctgcaagctgagagtggatttcacatttttaaatgattggaaggaacaaaagaagaacaatattttgtgacacatgaaaattatgtgaaattcaaatttcagtggacataaataaagttctattggaacatagccggattcatttgtttacatactatctatggctgcttttgtgctacaatggcagaattgagtagttgtgacagagactttatggcctgcaaagcctcataaatatttactatctggccaacccctactctggacccttaagccaaacttttcctacttttcggagtattgtcaattatctcttacttccttattggtttagagaaggtgcagaaatgcagacactattctacatttcttttcaattagctagggattttggaattgtgcagtggactcctaaggaaacactgcaggaagaatatgggtgagacagtggtgaggaagtaggaattatctcatgaaatttaaaatcaaatatcattttcatccctttccaaaaatccttaaaatgggacatctatgtgggttttagaaagagaaaaaaaaaatgttggttctgaacagaatcctactgactattcttagagcctccttcaggccctctccaataaaaatatggaaactcaaaataaggtcactcacatcaattgacaccttaattttgtgactttttagttttcctcaagatgttttcttgaccaagttaagaatcaaaatcattttccttgatgttcaaactttctaaagattttgattagtgggtgttcaattacctgtttatacttggggaaattgaggctaagacaagtacactaactcaactgtagtaatagcgactagtagagatagaagtacatactcagtactccagagcttgctctagaggactgccttttatcttttgaaggtgaatttgatggtatccctgagaattttttgcttttcttgagattctcagttatctttcactctttgaaggatttcaatttcctgacttggaaacatctgaaaaagagaggaaggtgccttgttttttcattcccactcctgtgaaagaagtacaggaggggaaagacttggggcagacaaaaagggaaatctctgaaactagagaaaactcaaacaaattgtggccagccgagtcagcattcctcacccacagttggtcctaattaaggagactcccgttaaacagctcaactttctgctctttcttcttgctctggccctgccagctgacatggcaaagctttaaccgacggcttggaaacagtctctcatgtctttccttctatattctcacttctctgtctctcctctactaccctgcaattaccctttcccacattaagatcccaataaaatatattgatacctctaatccaattgcatccattttgttccacaaagtgctatccaagctgtttgcagggctgaatacttgtgtatcatgtcattacaggagcacatatagagcctgatttcatcacagaaagatggaatttctccgggattatttcgctgccaagtccaagcagcaatgataattccttccactttgcctgactccttgattttctcaatccatagcttctactgtgcctagcagatggattcgggtatttaattttcctataataacctatgatatcatgatttaaaaaaatctgatggcagtaaatctgaattgaaaactagcctgaatcatagaggtggtcaatatccaatgtagttcaatgggggatattgacatgtagataaaataagcttattttcgtaacttaatggttgtggtagtctgctcaagctgacataacaaaataccacagggcaggtggcttaaacaatagaagtttattttctcacagttccgaagcccagcagtgcaaaatcaaggtgccatctgggttggtttctgatgaggcctctcttcctggctgtagacagccaccttctcactgtgtcctcacatggccttaactgtgcacacacagaaagagagctctctggtgtctcctttttcttataaggacacgagtcctatcagatgagagctccactcttataagatcatttaatcttaattacctccctgaacgccccatctccaaatacagtcactgggagttacagctgtaacacatacacttggggggaacataatttattccataacaatggtctaaatttaagaaactctcttaaccttagggcaaaaattcaatgccagaatcaagaaagcaatgcctaaagcagggtgttaggaggcaagatgataatttaaagaaaattttctgagtcatagacacatttgagaatctgaaagtatgatcagataccagaagattgcacatgcatagaattttatgtataactgcaagggcattcggttctccagaccagttacttttcttttgccactggcaagatggcgtctgtgaagaacaagcacagaaatgcatggctttattctgactgagtggggttctgcctaggtctggacctatggccctattgccaccattaaaaacacttgaacctttatcagaaaggagagtgagctaaagtgggtatgctgaaggtggctagaacttcagcaaggaagccttgaggtgaactagatttagaaccaagcagacaagttttcacacttttccattatattaagaatcatcagaaataacagaagtcctttctctatgggcacattagggtggccttttatattcttggaggtgccatgtccctgtgtttatttgctttaactcctttctaagtgccatacagaactctgtcagtcactataactgagtgacttaaaagaaaaaggcaatggtggaaatctattatttcagcatcgaacagaatgatcaaggtacagtagagcattggagtataattttcttggatgggtttgatcttcaggaaatattcttttttttttttttttttttttcttttttttgagacagactcttgctctttcacccaggctggaatgtagtggtgccatctcagcttactgcaacctctgcctcccaatctcaagcaattcttgtgcctcagcctcctgagtagctgggacgacaggcgcgtgccaccacacctagctaattttttgtattttagtagagacggggtttcaccatgttgcccagggtggtcttgaactcctaagctcaggcgatccgcccactttagcctcccaaagtgctaggattacaggcataagccaccacacccggcccaggaaatatttacaaaattcgtggtagtaatcttcataatcttcccagttgggtttgagtaagaattcattacctaggtgttgcaacagatactctaaaatggtagcctccaaaattgtgatgactattttttctgattttttaataacgccatgtaaccagtctgtaggatttaaatctgaatttgggcttccctagctatggtccattcattaaattagcttcagcatttgagaattgaacaaattaatcagatagttctgtgattgaaactagagtttaggaaatgtcttttaaaagttattgaaaccatttgttttcttataggactggaattgtaagagcttactgccaatatatcaaggggccaaataaattttcctgattgcacatatcctccaatttcatataagactctgattaccttgttctttaaagtcctttcttcttggtgatttttacccttgattaagacttggcaaagccttaactcaaaaaaatttacattggcttcttctctgccccaccctctcttcctctaaatctctcactctgcgattcatcctttcctcccattgcctggctttgttggccaggtcaagctagtttgctgtgatctctgccaaaccacagacatgtaatgaagcagacactgtactccccctcgctcttggagttctctagggccacatggggatgaggagtaggagaggttactgactttaagaactttggcagtacttgaacagaatgttggtttctctagatggtcttgattcattttcaaaactgagcatcacaaaactgcccaatttcactctgactcttctattatcttttttttaaaaatcacttatcctctttaacctcttgaatggtctccgaggactatggctcataatttcaatgtttgcacctaaaaatgttaccacatttgttgccatcaaagggatcagctgaagtttaactgcaaaccgtagctttctcaggtcatggaccaaatgtaactactgtagcagctaaagaactccagctctttaaagcggacatttcattgaccaaaagtttcctgtttaggacagcgctttccaacagaaatctaatgcaagccacatactttttttgtttttttggttttttgtgtttgagatggagtcttgctatgtcgccaggctgcagtgcagtggcgcgatctcagctcactgcaacctccgtctcctggttcaagcaattctcctgcctcagcctcccgagtagctgggattacaggcacgcaccaccacacccagctaatttttgtatttttagtagagacagggtttcacgatgttggccaggatggtctcatctcctgaccttgtgatccacctgcctcgccctcccaaagtgctgggattacaggtgtgagccaccgcgcctggcccacatatgtatttttaaatgttatagtagaaacatttaaaaaagtgaaacaaaggccaggcatggtggctcacgcctgtaatcccagcactttgggaggctgaatgagcagatcacaaggtcaggagtttgagaccagcctggccaatgtggtgaaaccctgtctctactaaaaatccaaaaattagctgggcatggtggtgggcacctgtaatcccagctacttgggaggctgaggcaggagaattgtttgaacccaggaggtggaggttgcagtgagccgagattgcgccattgcactccagcctgggtgacagggcgagactccgcctcaaaaaaaataaaaataaaaataaaaagtaaaacaggtaaaattaattgtaatatgtcttatttaacccaatgtatttaaaatattattttaatatgtaattaatatagaaattatcaagataattaagatatattttccttttctactaagtctttgaaagcttactccacatctcaattgggactagccacatttcgagtactcattagctacatatggctagtggctaccatattaacacaggtgtaggtcaccaacgtcttaacaaaggagtccacttgctgcagggaccagagatggaacatcacttgctaattttctcattagggatcacatctccatgactgtctgagtgacctttggggaagtatggattatgaactgagtggctcacctccaggaatgggtctgaagaaagcataaaagaccattgaagaatgggatatctttggaactttggattgaggaaagtccaaaacatattcccttgttcagatgtaccaaactagtcttagactgggacaggttgtcatttctttcatttgacttggatttttgtaacttggtctctccctattaagagtttaagtcagctgggcatggtggcttatgcctgtaatcctaacactttgggaggctgagggaggcggatcacctgaggtcaggagttcgagaccagcctggacaacatggtgaaaccccatctctactaaaaatacaaaaattagtcaggtgtggtggtaattacatgcctgtaatcccagctacttgggaggctgaggcaggagaatcacttgaacctgggaggcagaggttgtggtgagccaagattgcgccattgcactgcagcctgggcaacaagagtgaaactccgtctcagagaaaaaaaaaaaaaaaagagtaagtacaggcatggtggctcatgcctgtaatcctagcattttgggagtccaaggcaggcagatcgcttgagctcagtagtttggaaccagcctgggcaacatggtgaaaccctgtgtctacaaaaaattaaaaaattagccaggcgcagtggtgcgcacatgtagtcccagctacttggggagctgaagcaggaggatcacttcaacccaggaggtcaaggctgcagtaagctgagatcacaccactgtactccagcctgggtgacaaggtgagatcttgtctcaattaaaaaaaaaaaaaaaaaaagagtttagaatccacaaccacagttttgtagcaaacaagtgctaaagtgtagaccaaacacaaaaataaatatatttgatgttgaatcatatgaaagtgcccaggtttgaccaattttttacctataagattggcaatttcacgtggtttaacataatacattttatcatagatagcaagagtattcttaaagtagcaagcaaggaaagctatatcttagctttaatctggtgtagttccaagaaagctatggaaaatttcaagactagagcaaatattaggaatgcattctggtctatagtagtgtattctttgagatcagctcagtccatttctagccaataaggttagcctcttcaagaggacagattagttttgagtctgtatgtatttaattctaacttggactgattccacttccagctttatgtgctctttgccctgtctccttaaaattatcaagaataatttgagtatcaggggcaaatgtcatgagatatcgctggctgcagaaccatctaatgacagccttatctaaaacacttgcactatgaaaaatgttctttttattttgatccatagacattctagcccttggcaaacctagaactgggctcatcacatttgctagcctcctacttatcttggttttcagattactctcagtccctgggtcaaattcacactttgtcactgttgtctatttcactgcctaacctaggtcaccatccatcaactctagcaagtgagacaatatcaagagttgtgattattgatgctcttttaccgctctgccccatttgatgtttgtatatttgatagaatacagtgcatacctagttggtatagtgatggggactgaaaagccctccaactctgagtctggctttttttcatgattgatttggggatttgtttccatgaagtagggtacattttgtggccaaatagcttcctgctgtcttggaacctgtttccagtttagatgataaagttagttattctctttcctatatgaggaagcaagaagtcctaggtatcccctaggcttccaattccataaactctactggaagtaaaaataattataagagaagaaaaagaaaaaaaagaaaactctcagctgttaaaaccagcctattgtaccgcagatatttctccactctcagaagagaaagtagagttccatgtatacagctcttatgcattaagtagtaaatagagaaatagttactgattcgcaaggcatatatattctggacagaagaacagattcagtgttcaagtctgacttttaagaaccatgctgtgctacagaagcaataaggattttttcctatgtagtcacaagctggtccactcttccagttagttagcccacacccttggccctctggctgcctgcaggctcccttggctattcaagttccatggaatagctgggcctaaaatgtggggagcagacggtgtgagagaagtctgggaggggtagccaatcctagccaagaactacgttagtgttggtgcttttcccagaggggaggagtgtttcctgccccatgcattgccacgtgtctgcacagacacaaacagagcagtgttcagttgagctggcctctccacagtccctcttttcatcctacagaggagatggatgcatcagagtgttccttagactatggtatcagtgctaggaagtgggcaagaaaacaagaggaggaatcagttgccattcttagcagccctagatgaagggctttatttattctaagagcactcaaggggctaatttattgaagggaatcgtatagtgtcctacactatcactctcatcttaacaacaaggctaagctggataagcaacaaacataactttttaaaaatacagatatctaaggatgcaaagtactctaattgaactaaattccagaaagagaagagccattcctaggagagatggaatacatggctgttttcctcctagggtatggctaagaggagcaaacccaccatagatgaggataaggagaaaatagctgaatttcctacaaacttttgaaggccacatgtaggctggccataaggagccctaattatagagcaaataagtacccacctacccctaaatcgttctcatgagggcttcactgagtacacagtggcagcaagctgatggctaagggcaggacagaaatctgagaaagatccctgcccccacccaatgtacacaggaccttcactgattatacagcagcagtacagtacagtacagtggaacctgagaacagggcaggagggtagagaaagaccccctccaaagcacaaaaatccttcattgaatgcacagaagtggctcaccaagagtgcagagaactccacagcagcccaaagctggcagctgggctggatggcatagagagatctctggggactcactatgatcagatcttaagtgctactgaaaggacagtcctgatcctgccctcaaaacatctggtgacccgggaggcagagcttgcagtgagccgagatcccgccactgcactccagcctgggcgacagagcgagactccgtctcaaaaaaaaaaaaaaaaacatctggtgatttgggaggctgaagcaggcaggtcacctgaggtcaggagttcaagaccagcctggccaacatggcgaaactccatctctacttaaaatacaaaaattggccgggcatggtggcaggcacctgtaatcctagctgaggcaggagaattgcttgaacccgggaggcggaggttgcagtgagccgagaccacaccattgcactccagcctggggaacaagagcaagacttcgtctagaaaaaaaaaaaaaaaaaaaaaactggtgaactgacctataacagagcccaaacctggctctatgacaggctagactgactcagctctcaatcctagcagcctaacagcggaagggacatgtccttttctggatatacctattgccacacttttacacacaacatctggcataaaataaaaagttacaagactcaggaagaagcagaaaaaataagactgagggaaaaaatagtcaatagaagcagatccacagatgagccatatgttgaaactaacagacaaggattgtaaaatcctttttataaatatgtttaaggatccagtagaaaaggtgaattacatttttgtatagatagggaatttcagcagagtactgaaagttctaaaaagagaatgttaataaattcccccaaccccaaagcaaggattacatttataaacaaattactagttattcttggagaatatataaatagcagctccaaaatcttaacctttttcctgaagttatgcattcttgttttcatataagcaatgagtgagtgcccactgtatacaagatattgtatgaggggtacgaagaagcataagatttaatcctaaccttcagggaaatatagtctagtgaaaagatgtgtggacataactatttcaaggcagaccactctaacagaagtatagatatgtctgtagaaacataaaagagaatgggatttttctggcaaggaggatcatggaaagcctcatggaagacttggcatttgatctggaaatggaaaatgcctatgtgaaatatgaacagatagggcttatgtccactgatgtcagatccctgggataatgccaggactccagagacttcagcagcacacagatcactgcatagtggtgtgaggaccggctcctcatgcaggtctgtatttctaaaaggaaattaggcaagacagctggtcacctaataggaatcctggggaacataggaagtaggagtgggatgggagtggagaaaagtggataaagcattatgtttatcagtattgtaacatggtaaagtcatatttctggattttattggagatgaaatcattccttcctctgtattgctttatgtatgttgtctatacctctgtcatggatttatttcatttatacacctttctccatccttgggttatacgctcattctggatagccacttattttgaatgcccatagcaactgataccatgcattataaatactaggagcttgggccgggcacagtggctcatgcctataatcccagcactttgggaggccaaggcgggtggatcacgaggtcaggagatcgagaccatcctggctaacacggtgaaaccccgtctctactaaaaatacaaaaaattggccgggcgtggtggcgggtgcttgtagtcctagctacttgggaggctgaggcaggagaatggcatgaacctgggaggcggagcttgcagtgagccgagatcatgccactgtactccagcctgggcgacagagcaagattccatctcaaaaaaaaaaaaaaaaatactaggagcttgatgactgtttgctcaattgaagttgaatttaaccctaggcagagtttatagggattaaactcaggtagtctggctccaacatctgtgctcttaatcactatactacattaatgatggctcatgaataatcttgataaatgggctgtagaatgttttttaaaaaatacacagagacagggtctcactatgttgcccaggctggtctcaaactcctggccttaagcaatcctccctcctcagcctcccaaagtgctacgattactggtgtaaaccatcatgcccagccaggctgcagaatttttattttatcatgtcagtaacagagagctaatgaaggttttgctaagtgccacacttttgggtgattaggcttctgattatattcagtgcatgttagagggagggaggagtagaactgataagaagtctttcacagtggctcaagtgagaggacattaggctctgaaccagagcaaaggcaggggaaagttaaaggaagagacagatttgaaaggaaagtggtaatacaatcaatgatgtgttacagtcttgatgaggagggggaggaaaaaggagttgaagacatacctaagtttttgatagagcaatgaggggaaaaggtgatgctttttagtggaaatagggaatgagacgtgtaaattttggagggtagactagatgatatgaggagaatagtaagtgggaaaataagtatcccatggagaaagttctttaatttacctctataatctgttatagctcccttgaaatatccgttgacaaggttcttcatcttcattgtcctgttatatctgactcaatctctcatatgctcattcagactcatttcctctctgttctgggggtagatgaaaatgacaaagtgccattgttcttataagaactcgccccaaataaaaacttttgacaccatttctgtcgtacatcagtagcctgttggtggttgtttggatttgtagattagattatacagggttattgaggtctctgcattctttgttgttttcacctcctcgtgaatttaggcctagcttgttgttgcccagctctcttttctgtacttgagatctatgtgagaaacaaatataaagagaaatgggagggagacagcaaaatccagcttagagtgagcaaagaaattctttctgccaaacaacagatgcagtagccctgcataactctgagccctgtcctctttactttattctttttgatgccatatttaagctgccttcctttctccctgctatcttgagtgaccaggcagttgctttgcagtactctgactgatgaactgtaaaatttgcaaactcttctaaagacattctattcttacacctcaaccagtcatatgtttcaggatggacagtgtccatccagccttttttctcccacagctcttgagtcttcaaaaaaaatcatctagcccaggtgcaatggctcatgcctgtaattccagctctttgggaggctgaggcaagaggatcacttgaacccaggagttcatgaccagcccgggcaacatagcaagaccccatctcaaaaaaaatattatctagatggtttcttctgcctctgtgtaatttgactttggaactccaaagctaatgtctcgtcacctctctctactcaaaggctacccatcaggatatcttatccaaaagagtcacttaggatatatttcacatatttcacaactaccacaaaagttaaatgaaaataaagcgtttttcttttcataagtcataaaaccacaaagacaaagaataggagaagaaagagataatagtgatgagatcatgggaagctggaaatcagactggcaagtatgaactggtggatcagacttaaagtcgaatcctgagccagcagtggaggaagtggggcagcaactcaatttgcaccccagaatcctcaaaaagcttcataattggtggcatcaggtaggtttaataggggaagaggtaagtctaaaaacaagaggactggttgaaaatttatagaaaaaacacttagactctcagattctcccctccattcccctccatctgctcccaaagggggagccctttccctccattaacagaagactggagacattttctggagagagtaaaacaggtagtctctggactggtggactcctgacacaagtgagggcatagattttaaactaaaacaagggagaggggaataaataaaactttgcatattgaatgttgaaagctccaggctcttctctaactcagctcgtagaatgctggtcttacatgctgcaggctggagtttggaagactcacctctaggaaatctgaccaacccatgagaaaaaacttaaatgaatcagtccaatctcatctccctatactgaagccatagttgacaagtcctactgcatgtgcacaaaggttctcaataacttataatgagtgtcccagtcttccatataagcaaacagccaagcttcatcacacatctcagaaggtctataacacgaagtcccgccagtacaaacagaacaaagcaacttggaaccagaaactatgcaaggacattggaaacctgcccctccaaatgaatgagtgaatgaatgtctccgagagttgaaaaagagattgtatccttgaaagaaagaacagtatgctgtttaaaattttttaaagaagccttggaaatttaaaatatggtagaagcctgggcgcagtggctcgcaactgtaatcccagcactttgggaggctgaggagggaagattgcttgaagccaggagtttgagaccagcctgaacaacatagtgagaccctggctctacaaaaattttaaagttagctgggcatggtagcacacgcctataatcccagctactcgggaaactgaagcagaaagatcacttgagcccaggagtttgaggctgcagtgaactatggtgcatcaccacactctagcctgggtaagaatacaagatcccgtctctaaaatatacatatacatatatacaatacccatacatacatttatgtgtatatatatgtatgtctatatatttatatgtgtgtgtacctatatatgtatgtgtgatagaagaaatgaaaaacttaatagaaaggatggaagataaaattgaggccattgctcaaaaagtagagtttagcagccaggctggctcaagccagtaatcccagcactttgggagccccaggtgggaggatcacttgagaccagcctgggcaacataaggagaccctgactctacaaaaaaaaaaaaaaaaaaaaaaaagttcgggcatggtggttcacgcctataatcccagcactttgggaggcttaggcaggcagatgacgaggtcaagagatcgagaccattctggctaacacggtgaaaccccatctctactaaatatacaaaaaattagccaggcatggcagcacgcgcctgtagtctcagctactcaggaggttgaggcaggagaatcgcttgaacccaggggacggaggttgcagtgagcccagattgcaccactgcactctagcctgggtgacagagcaagactccatctcaaaaaaaaaaaaaaaagagttgtttttttttaaaggtactagaaaataagagagaaatgtagaaaatcagccaaaaaatctgttaactgaattacaaatactctagaagagagaactgaaaaatgaagagaaaatcatcaaaaaatttttgataaaatttctcaaaactgaaggtaatgagtgtgtagattcaaagcatccggtaaagtacccaatacgatggataaaaaataactcccacaccaaggcacatcattagcgatgtttcagtgcacaagaagatgctaaaagttccagaggggagacaaaaaaaaacaggtcacatacaaggacaaagaatcagaagggcaacaatagaaacagacatagaacaatgcctttagattctgaaagaagatattttcagcttagaattctgtggctacccaaaatctcacatgtaaagatggaataaagacattttatgacatgtaaggtcttacgaagtttacttccaaagcaccccttttcagaaacctactggaagaggtacttcactgaaacaaggagtaaaacaacaaagaggaagactgagattccagtttaagtcaggtatagagaatcgccaggataatgaagtgtggtcgcataatgtcaactattcagcagatccagagagcaaacagctagaagatatatgcatagggatatttttgaaggatgcacagaaaactgttaataatagttaccttagaagtaaaaatgggagggcaaaaaaggagcacttttcctttttcctttatataatatctggatccttattagagcatgtactatttcttttgttttgtttgtagtgacagaggtcttgctttgttgcccaggctggtcttgaacacctggcttcaaggaggagttttgcacccagccttttttttttttaacaaaaggtcttgctctgtcactctttaacttttatttttttttcaagccattcaaatgtaatagtgggtttttgttgttgttgttgttgttgtttaaagaaagagggctgggtgcggtggctcacacctataatcccagcactttgggaggccaaggtgggtggatcacttgaggccaggagttggagacctgcctggccaacatggtgaaacaccgtgtctactaaaaatacaaaaattgcatacctgtaatcccagctacttgggaggctgaggcacaagaatcaattgaacctgggaggcgaaggctgcaatgagctgagattatgccactgccttccagcctgggtgacacagtgagaggaaagaaagaaagagagagagagaggaagaaaaagaaagaaagaaactatgctctcttcagtggagcatctccagtggagatgcttaactctcatgtaatgacaacagaattttccttttcttcagaacttgcaaaagaattttgctaggaagtatttatatcctctagccaaccttccttggtaattctaggcttatacttcctcactgcaggaaaagagcttgggaaggaatgtcttttgagcaaggaggacccaaacgctctcctagaagataaatccctctcctccatttcagtattaaactttccataaatgtggggcaaaggaaggtttcttttggatttctgagctgcagcaatcctctttttgcgagggtccttccataagagctttctttgcctcacgaccttgattaccaataattaatctcagatgaaatattcagtgctacaggcttcctctgtctttgacttagagaacatgctgagaatagtttgtttgcttgcttgccaaagatcttatcttgacctggaagagctgataggatcataaaaccagcattgatctttcctcagtattctttctctacaaagtgagggggtatgacatcttagcccaggacaaatgtgaggtttaatatacatcaggaggagaagaggggaagaggttgattgtcattcaataacggctatatttcatagtcataaaatttaaagaactctgtagtgtgttctaatccccatgctttctttgctctttctcaatgtatttggataaatcactacagagcaacaaagccaaaatgtccaaaccacccactttcctattcccagcacatgaattagagggagccagctgagatctgggccaaccacttagatgacttgcatgtctgatttttgttccatgatatgaaactcagaataaatcaaaaagaaaaattttttcagatagcagctaattcacacaaaaaaatcttcagccttttagtccttgcatatatgcaatgctgataaacaaacctactctgcacacagataacaaggatttagaagttaattcctaccggcacaaacaaatactcatgtatagcagtcttactgaacttccgtgttcagttttaggctgtaaaacttgagtgaaatctgaagaactttttaaggtccaaaaggaattgagaaagacttggaaaacaggacctttgaagaaagcttacaggagacagaattcgagcttagaaaacaatgcatgtgatcgaaaagaaatgtgaatagcaaagatagaataagaggaaattaatataaatggtagaggaggctagttttgaggctaagggtaaactttctgactgaaacttgttaaacccaaaaatgaacagccaggccaggcacggtggctcacgcctataatcccagcactttgggaggctgaggcgggcagatcacttgaggtcaggggttcaagaccagcctggccaacatggtgaaaccctgtctctacttaaaaaaaaaaaaaaaatagtagctgggtgtcgtggcgggtgcctgtaatcccagcttcttgagaggctgaagcaggagaattgcttgaacctgggaggcggaggttgcagggagctgtaattgtgccactgcattccagcctggggcaacagagcaggactccgtctcaaaaaaaaaaaaaaaaaaaaaaagaacagccaaatgaatgtttgtagagctcaagctacaaagatatggaggttgtagtaagttcacttagtgcatgaagtagcgtttttggatacagatgtttacagataaagatgtttaacagcagtatctccctaataccacagacctgatattccaagcaattggcagagaaatgaatccattcagcacaaatttggcccctctacatggccacagcaccttagatttggttcacttaacagaagaacagtatgttctgtttagaagcaggacccgatcccaggatagggtgaactgcataaacggaggctcaatgagaaatgataaaagtctaagaggttctagaaaagagaaatctttttctgggcctcattaccagttatagacatttttagaaaaggagggggagaatagatgcagaacgcgtctaaaaatgaacaaagatatgttaattttaagaatggaggttgtttacagggagagtaaattggtttgtataattagattgatccaaaaattaccttgcctttataaaatacctttctgttaagaagatacaacgttttctcttgccagataaaggcagagtctcttccttttgtaaaagaacatcaccaaattacaaggaagtttaagtcacactttgagttgctgacaaacctaggacaaacccccaggttttctccttttggctagcctatatactggtgcagagccattcttgcatcaatgtgaaacatttattttttgcctgggcttctgttttaacgattgaccttcatctctcctgtcctgtagctgggatgaaagcagctccatcagtagtggactcagcgatgcctcagacaatctcagttcagaagaattcaatgccagctcctcactcaactccctcccaagtactcccactgcttctcgcaggaactcaacaatagtggtacgtgagtttgcaaacacccaagctgccatctcaagatgaaccacagggcaaatggcattatctgtgtatggggttgcacgtacacacccactccatgggattggttctcataggcctttggccaggtcattttagagttgcccccaccccctcccaaaaaaagctaaggctactcacccaagacattagatgttgtcatattgtgtatacttagtgcctacaccaatctagagtgatacatgtaagagctattccaactggagaaaaagaaaccccgagatatatgtcatctgctgttggaaaccctaggggtataggtagaaaccctcagtttgacttaatactctgagatgagcagcgccaggtactaactaaaatcaatcctgtcagctatccagtctcccatctgcatagaagtatctcactctgcctttttctcttttctttagctacgcacagactcagagaagcgctcactggcagaaagtgggctgagctggtttagtgaatcagaggagaaagcccctaaaaaactggagtacgacagtggtagcctgaagatggaacctgggacttctaagtggcggagggagcggcctgagagctgtgatgattcatccaagggtggagaactgaaaaagcccatcagcctgggccaccctggttccctgaagaagggcaagaccccacctgtggctgtaacttcccccatcactcacacagcccagagtgccctcaaagtcgcaggtgagcctggaataaaggaaggtacaagggcaaagacctagttctttggttgctcctcttcttagtggtcattaacccataggatgatagcaaacatttgcatagtgctttaacagacattatcttatctggtctaaggacagtcccgtgagttaggaaagatgggtgttattatttccattttacaaatgtggaggaaatagaaactcaaagagattaagtggctgggccaaaatcccagttaatatgaggtacaggaggaagtatattatgtttagagactagtttggcctccttccaaacacttccaatgcttgctttcttctttctcccaagttagtcactcaaggcacttattttcataggatacagcttgacatctcaggaagatcctaagaaaacaataaataaaatggctacagcaagagaattatagtgcccccaaagttggccccttgggtaacttttagccttaatcaacattttcctgtagtctctaattactaagagatattgtcatactctattccatttgcttccccaccttttttttcccttccacaactagttgttagatggatattcttgatcatctttgtgtttgcctctgcctttttaatcaaaatggaccattctactctgggagcaaaacaaaaaaaattcctagcctccccacccctcccagccagagtctttcagacaagaaactttatcagcttatcttgtacctgtttacccaaatttaggcctctaaaagtctacaatacatggacaatgttcccttctcccatggagggaaagaaaagggtgggtttttaagatactggtcagtttcagctcttttctcatttcccgtcctcttgcaggcaaacctgagggcaaagctacagacaagggtaagcttgcagtgaagaatactgggctccaacgctcctcctctgatgctggtcgggaccgcctgagtgatgctaagaagcccccctcgggcattgctcgcccctccacttcgggatcctttggctacaagaagcctcctcctgccacaggcacagccactgtcatgcaaactggtggttcagccactctcagcaagatccagaagtcctcaggcatccctgtcaagccagtaaatgggcgcaagactagcttagatgtttccaacagtgcagagccaggattcctggctcctggagcccgttctaacatccagtaccgcagcctgccccggccagccaagtcaagttctatgagcgtgaccggcgggcggggtggacctcgccctgtgagcagcagcattgaccccagtctcctcagcaccaagcagggaggccttacgccttccagactgaaggagcctaccaaggtagccagtgggcggaccactccagcccctgtcaatcagacagatcgggaaaaggagaaggccaaagccaaggcagtggccttggactcagacaacatctccttgaagagtattggctccccagaaagtactcccaagaaccaagcaagccaccccacagccaccaagctggcagagctgccaccaacccctctcaggtacccaatgtgggcagccgcctccttgtctgtttgctttgtcattctttcgcatatctctgccctccttggactagatgaggcatggcctatccaccgttgtctctaggcctttgcatggctctttcccacctctcccccatatgccaaggttctgaaagaatctagtttctgacagttctgaaagactgaatccctctttcaaaacttacctcatttgtactattctctgatcaatgcttaccctgtcttcagcacttgtatgggtgtttttactgtttatttacacatatatacctatttgcataaattcacttgtatctcccatgtgcatatgctggccccttatctaagctgaatgtgccccaagttgggtatcagatttccttgcattgtatttcacaacagcattaggataagcctctgtgcttagcaaataggcagaaaacaagactggataggatttctttaaggtcctatctgcctctcactctgtaattctattattctaaatatttcgtttgatcttctctcagggccacagcgaagagctttgtcaaaccaccctcactagccaatcttgacaaggtcaactccaacagtctggatctaccatcatccagtgataccacccatgcttcaaaggtcccagatctgcatgctacaagctcagcatctgggggccctctcccttcctgcttcacccccagtccggcacccatcctcaatattaactcagccagcttctcccagggcctggagctaatgagtggtttcagtgtgccaaaagagacccgcatgtaccccaaactctcaggcctgcacaggagcatggagtccctccagatgccaatgagcctccccagtgccttccccagcagtactcccgtccccaccccacctgctccccctgctgctcccacagaagaagagacggaagagctgacttggagtggaagccccagagctgggcaactggacaggtaggtagaaaagacagcagaacctcggcctgtctccgtgtcttgggctcattttgccattggcaatactatcctatattttattgccattttgtgacttttgacattttttcacatatattaagtaatttaatttgcttcacaacaactccatgagataggtaagatgtgtttttgtttttaaattattattcttatattaaaaatgaagaaacttgtgcacaaagaagttaaatgactcatccaagatctcataattaggttaacctatcatccagagcttttgcttcctagtccaaaatcattttgttttgttttgtttgagatggagttttgctcttgttgcccaggctggagtgcagtggtgcagtcttggctcactgcaatctctgcctcccaggttcaagcagttctcctgcttcagcctgctaagtagctgggattacaggcacttgccaccatgcacggctaatttttgtatttttagtagagaccaggtttcaccatgttggccaggctggtcttgaactcctgacctcaagtgatctgcctacatcagcttcccaaagtgctgggattacaggcatgagccaccacacctggctgcccagaatcttttcttttatatcacatcctagttttcccctcccttccccctatatgccaaggttatcaaactacctatatggtagtttttacctaccataatacgatctattttttttttttttttgagatggggtctcactatgttgcccagactggactcaaaactccttggcttaagcaatcctcctgcctcagcctcccgggagctgcaactacaggctcatgccactgtccctagtgccataatatgatcttttaaataactaactatgccttaatttcttttttgtttgtttgttttttgttgttgttgttgttgttttgagacggagtcttgctctgtcgcccaggctggagtgcagtggcgcgatcttggctcacttgcaagttccacctcctgggttcatgccattctcctgcctcagcctcccgagtagctggggactacaggcgcccaccactgcgtctggctaattttttgtatttttagtagagacgaggtttcaccgtgttagccaggatggtctcgatctcccgacctcgtgatccacccgccttggcctgccaaagtgctgggattacaggcgtgagctacggcgcccggcctaaccatgacttaatttctaatcagagaaataacatttaatatttcagataaatttcccaagttgtaagccaagaagcaggctatagtatctcttggtttctagagctaaagcaggtcatagtttgatgtcctgcgtctagggtctgcatacctcacaccaatggtcctaaactctagttcctaagatggacccacatgcttctctctctctctctttttttttttttttttatctccacagtaatcagcgggatcggaacactcttcccaagaaagggctcaggtaaccctttaatgtgttttttcttccctataaatgggactgctggtatgtatgaaaaatcatatctcaacctgtccaaggctccagtcatgaatttagtcacccttttagctgaatcatttgtatgtggtcccatacaagtaccacctagtaccttgcccaagcttaatattatgtgagtcaacttttacagcaagtgttctttttttggtgacaggggagaaacaagtttgcacatgggaatcatgcacttacctgtactagcctatgccatcccaatcctggctgagcttcatctctgtaattttcttccctaaaagtatgagggagaacagtctgcttctttggtcactcagctgggctaggggcaggacctacctggtcatccactgttctgacagcactgagttgttcagttgggtggcaactattgcaacttttttttttttttttttttttgagacggagtctcgctctgtcacccaggctggagtgcagtggcacaatctcagctcactgcaacctccacctcccagattcaagcgattctcctgcctcagcctcccgagtagctggggttataggtgtgcaccaccaagcctggctaaattttgtatttttagtagagatggggtttcaccatgttggccaggctggtctcaaactcctgacctcaagtgatccacccacctcagcctcccaaagtgctgggattacaggcatgagccactgtgcctgaccgactcttgcaacttgaaagcccacatgtggaatcataagtctctgtcctgaacttctgaggagaagttctaatgcctcctccatcacttctgcccccagctcaggaacccttacgggaatacctgctagtccttccacaccctctggatggtctgggagaggaggctgagtcgccacctcttactccctccttgggcagccctgaccactccctcttttccatgtcctgctttcagaatctcctggctccagcctagttcagacaccctccgcaccaactaaacctctgaccgcacttgctagtcccagactgagttcttctgctgcttcctacaggtaccagcttcagtcccaggaggagaccaaggagaggcgacattcccataccattggtgggctgcctgaatccgatgaccagtcagagctgccttctccccctgcacttcccatgtctctgagtgcaaagggccaacttaccaacataggttagtgttttcagtcactcactgtggcatggggtgaagcaggggtcaccctgcagggtgaggcaaggcaggtgggctttgggtttcatctcatgtttgactcatgctgtattgggttgtttcatggtgcctcagtttatccacccaaagtaagattgaaggtagagtactttgagatcctaaactgaaaagttgcccctaggcacaagttgtagggtccttttagcatcagagagcctgaatggtggcatggaaaagctgtaacccaaagcccagagatcagaccagtgcaagagcaggcacattgaactgccggaaaggagccaccacacccagtactactagggccagctaatgagagggcaatactgaaatgtcaggccgacggggaggaaggagggaaaggttgttgattgccaaggacgagatctgcctccaaactcagccaagtccagattcctcaactgctctggctgagcccaggccatcctaacgctgaaggcagggctgactcagatgtgtcctggccacccccttcctaaagcctagggagaaaggagagctaggaaataaggaagtgacttagagacagggaggagaggaagcatcaggtggagggtctggcctagcacagaagcacaccagctccggttctgtgaagcagtacgccatgattggcctactaggaatccattcaggaatagtgcctgggataggcctgttatctgcttgctgcatctctttaaatccatctcttctttcagctgagtaaaagaaatcagttaataaaagacaaggacctgtaacacacccatgcagtgactgtggggaatttgaggaaagactaggaattgggatcacttggcctagggaaaagaaccattgttcagacaggatcatctgccctctgaagggctactaaatggaggatggggccagcttgttctctatctccattgaagaccaaataagaagaattgcatttatgctgcagaatgaggggctgggctaagcaataattacctcaggaatttgaaaaggtcaacagagaggtgtgccatcttcttctgcacaggtctttatggacagattagacatccacctgcctgtatggaggcagaagaatagacaagggagctccttgtgggtatgaaaccctgaaaggctgtaatcccagcaatgggcaaaggggtaaggcatctgcaggttaacgggattcagctgaacccagcttcaaagcacattccacaagccttacctgacactttcacctgctctgtccatctgaccttcaagccggggcaatgctaggcaaagagggccatgtttcttgatgctttagcgccaacccagtcactcagagtgacactactttgtggggagattctcacgcccttccacaatgccagggcaacgggatcccgtagcccagcccccttctctagctggtgctttttcatcattcagatctgggtcttggtttgaattttcagtcctcctgagctggcagttgtgttttagagaaccacagcatctcattttcatcagcacatccgagtgatgtgaaggtctcagaaaagctgccaggcccccagcctaaccttcaaaagcaacaactctgaggcaggcagggttgagggaaggtctttattccagacagcagggtccttctccattagggcttgatctccccaggagggaccccgctcctaaccaccagctgcttgcacactcccaccaccgcacctgccccttcctctcctgccctctccccatttgcctctcatgctcccggtgctccatcccccaagggcccggagagctgatgaccctgcctcttttcctgccctcctgctccctctcctgtcccccttccctctgtccttccagtgagtcccactgcggccaccacgccaagaatcacccgctccaacagcatccccacccacgaggcggccttcgagctgtacagcggctcccaaatggggagcaccctgtccctggccgagagacccaagggaatgattcggtcaggatccttccgagaccccacggacgatggtgagacttcatgctagcgcggttcacgctcattccagctctgctgggtcccctcacccaccacctccactcccaccactcctaccaccacacacatatatgattcacagaacatcaagttgggccatttcagttttttctccccatccctttgaagggtctggggacccagaaaccttgggtggcacatctagcactggggcattgggatggagcatccatcactggggctgggggagggaaattgagcatggaagggttaaatggcatccctcaggatgctctgaaaaccacagcttctctcctcctcattctagccatagtctttcctccccacagtctctcaaatatatgaaaagaaaacaggacataatagtagctcttaataaatccttacaaataattaggcatctcatttctctttcaaaaatgttccaaagatgagcatcagggagggccatctgattgttggtggtgatctgggtgttagtactgatcagagctagaagaccaggcttatggcaggttagctctcccattattattttcaagatggtcattccaggaggcatctgctacagacatgctttagttctcaccataggttctactgaataatcagaatgcatattcctcacttaaatattgttttcatctgaatgatccccaagatcctaagcacatcccccagtgctgagaggaggaggcgcgggcagaatttcagtatttgttctgagcaactctgatgagaaactcccctctcctgcggctaaggtgctttcctgactgggaagataagatgatgactatccatgaaagtctcctttcccttctctgaaaccccgtgcccctcagagcgggctaagcaagggactgccatacccaggctgccagagaatgtaggctgaaagaggaggctagcttgactcaagaccttgctttgggctgttttgataccagctgggttccctactctgttctttctgtttgctccagatgccctccagaatcacaatccaaactcctgccttagggagtcttccaaaaaccccttgtccctggaacccactgttaactctttgtgttctccttctctttcagttcacggctcagtgctgtccctggcctccagtgcctcctccacctactcctcagtaagagcattaacttctcttcccctctcatcccctcccctctaccatcccatgctccctagaacctccttggagttgggtaactgggcgggggatgggggcactgctggctcttcactgtacccattggggtgggaatgggggaggcacctagagcttgtagcattcacttgggtgcctcaggtcctcagtggtctttctggccccaccaccagctcctgagcaactctggtgatttttgttcccctcctttgaaaaatggagaatccccatgttagcaagccctttctgtgccatggtagatgggaagcttttatgaaggtgagatgaatagatttctaggacccggactccagaaccctagaagtgaccaagtgtttattgtggggcaccagccacagcatttggctattaggcatttcttgatttgtagatttgttttgctcctaattctttactccaagttgctggcaataaccgttagttctcaaaccaaccaaagtctcatttcctagcctttttggcaatgacaaagtttgctggagatgagctccaaagaaatcttttattgaaaccctagtatagatctgagccgagtcctgtgaggagccagggccaggaaacaagagtttcagcctctctgcacctctgagtcatgcttcttcacatttcctaccctgccactgggacctgacttcttcacctccatagtaactacttcctttctctctctttctctccttctgtgctcccttcttcaggctgaggagaggatgcaatctgaggtagggtggaaagcctttgtctctgcttgttaacatcactgcacctcattttccttccaaatcttatacagcttctgcagccagtagtttgtatttctcttccttttacagcaaatccggaagcttcgtagggaactggaatcatcccaggaaaaagtggccaccttgacgtctcagctttctgccaatgtgagtgccatgaagtacggaaagatcaaggcagttattttgactatcgttagacaagttcagccaagggaggaaaactacctggtaaggtatcccctggactgagacgtcaagggcatgcgtcttcttcacagctctatgatagaagacgaggggattgttcttccccttctctgagcctcaacttttatgaagaaccattttgcttctactctaattaataggtatggatgagttcatgtctgatgggctgagctccctagagaaagagaagaagattgattaccagtggttctgcatggaggcagaaacaaccttgccattggccatggacaaaagcagttatggattataattatagggctcttagagcctttccactgccctggggggtgttcatgtctttgttcatgccacgtaactgtgcaggcacatgattggtcattagaattctgtctagtgaccacgacactactgagaaacctaactcccattctggtctgactccttcattcccaactgccttttctgagcagtctccttgggcagatggtagaaacaatctgaaattcaggttgagagctagaattctttgtttctactctcagtacctccatttagaacgagtctatttctttagaccttagtttttctaccctgtgacatggggagaaatgaagccacctcctctaaccaggctgtggtactttctcccctgtgactgagttgcaaacagagaacataagagccattttcccccaaagctgtaaacaacagctgagccggatctgcaggagctttccaagtgtttgcacaaaagtaaccatgtctgcaatttccgcagtagtttctggttttctctctgcccttcctctctggggaacccagctgtcaggcctggggtctatccgtcggaattaggtagaagaatctccaccaagattctgaatgtttccaacacatttcagcagcagttccctcaccacactagttattctctcgattctcttttcccaaaccctcaattcataagttgtaccagtttgtttgaagctcatgttaagcactttttcccactcttgggggacccataagaattgtaacataaacaagaaccatcttttctctcccttgtgccacacccaccaaagcaaatggcctgggtcacgtcctgcacaccccaggaaattcatgtctgggagatgctgggggggagaggcgccagggaggcagagaacattattatgtctgattcatttacactgcaatctgtcagccaccatgctgtcaaggctgggctgaagccaagaaattgaatttagagggtgatttttcttagaacaggaagttccatttggctaagagagaacaaactaaacacccagacacggtgggttctgcatcttaaaggcagatttttgccgagggtcagaaccctgccctcaagcaggagatgggatgctgggactctaggaaggttccacagctctcttcaggattccgtgactccaaaccaaacttttgtcatgttccatggaacttcctagccactaaagctgagggcacaccctagatgtaggggcccagaccactttacccctctcaaatgctagcctttctgcagcaccactgcttagccctgaggtcttacaggtaccctagtctggggttgggattaagggaagggtcaatgtagggagaggaagtgtaggggagagcggggagaaagcccagccagagcaaaagggttcccctggatggggaaaggcagcacagaagagcatacaggggttcttggggcctctcatgagtagtcttccagggactacaaggagtctacaagcagacatgcaggatgtagagaagcaaaccagagaagacctgaggtcaagaagacagatgttgcctgcacagtgggtgaaaggaaactgctcaggttgtgacatattataatctcctcagagcccaggccttgacagatttatagtaaaagtgcaagaggaggctctaactggactaaagggattgcctccagccctggtcctatgaagtaggctccagacatgcggagcagtggatgaaaactagagttgacccaacagggagggagaattgtaagccagtaggagccatgagagtgccgtcgatttcctagagctctgcatgaaggagctgcgcagagtatgcccacttcttgctagggtcaccaacttgctcagatagtctcacgatggctatttctccatccccaagtgctcccctttctagcccccggcctcattccctttaccttgcctatacatcttgcagccagttggccagctagaggtcaaactatgccaaaccaagtggccttagctcctccactgagcacctttccgaactagcctgcctcttatccagagagccctttggtatccttcactcctcatgaaacagacctgacacctagtggccaaacggtggaatgcctctgcagtttccttccagccttgcaaacctggagaatccgggaacaaggagcagctgcaaagcaagaaagggtgaagcagtggagtagcagaggaggaagaaacgcaccaaatagtttctgccaggagattatttggtcccttgggggccggcccactccacaatgcaggagttaaaccaaaataataggaacgaccccagaggctatggcccgcctaccaagttggccacaccaaatatcacatagagcagagggatagtcctacctctggtagttgataggttttagatctcaagtctccaggagcctctggaaacctgccctaccctcaacctggcttcattattcaagaagctggttcccaccagaaaatttctttgatttcccctttgtctgctcaggaaaatcaatatttttttaaccaccaagaggtttgctggcattggtcagctccgagatacaggaaatcagttaaaactatttcccattgtcagttattgcctttcccccagccttatgcaacttagcaatctctttctgtgtttgtttcaggctaatctggtggctgcttttgagcagagcctggtgaatatgacatcccgcctgcgacacctggcagagacggccgaggagaaggtgagaggcctgggaaagggtgggaggggtgggtgcggcgagggggttctcctggacagagaggccgaagctgaccatctgttcttgctcatgaatgccagtttctccccacctcactgtcaccctggattctcaatctgccccccaatacagtgtgagcatattccttatcccaattccttgcccttctctatcaagttttgcagaattccaatgcctcgcccattgcctgacacatcataagggctcagggctcctgctaatcccaactaatgacgctgttttctttttttgagatggagtttcgttcttgtcacccaggctggagtgcactggcgcgatcttggctaactgcaaactctgcctcccaggttcaagcgattctcctgcttcagcctcccaagtagctgggattacaggtgcccgccaccacgcccagctaatttttgtatttttaatggagaccaggtggccaggctggtcttgaactcctgacctcaggtgatccgcccacctcggcctcccaaagtgctgggattataggtgtgagccaccgtgcccagccaacgctattttcatttctctcttaggacactgagctgctggatttgcgagaaaccatagactttctgaagaaaaagaactctgaggcccaggcagtcattcagggagcccttaatgcctcagaaaccacacccaaaggtaggacatccagccacagattgagagggaacagggagcaggaaagtaagagtattacagatttttatctgggcccatagtattccaagtcctatatcaagtctctagaaggtgagggcctttagataccctttagtgtgatgtctggactggtcagtgaggagtaccaggggcatgaccccagcttcctagggcatgaaggcaagtagaggagacctgtaagccccaggggtcctctccttaacctttacctcacggccaaagagccatcaaagaccatcgttaaaatagccctttacatttttatgcaaatgtgttgtgtgtccacacacacacaaacaatcttatttgatcctcactttagttctccaactactcttccaatgaaacaaccaaagctcacataggttatatggtgctgaaatggcaagttagcctggacgtttagtaaccagtcaagctttgctacagaagtcaagatggatgggagtctgatgccacaaaatctgtgatctctaactccagtcaggtcttcaagataccttggcagtcctcttacttgtccacagtcagttttcttttttattccactaccagtgattcccagctttcattgcttttttcaagctcctcattccaccactgatttgccttactctgaacatagctttggcgccccccttagttaagaaaatgaacattttcaagagagaactccattgacttttccccactccatgcgtttatattcatccaatacttatttatttgtctccattttgttggaaggattcatcccttctggccaagagtgaccgcttatctaatgttttgggatgccctctttagcaaccatacaacccccctttacccaacacatgcccttttctacctctctaatctcttatgctctattcattccttccctgcttataaacctgccaaaggctcttgtatgttaaaggggaaagatgtatcaatctatgttctaactataatcttatttctttgcttcctccagtcgatcctacatttccacctccctttcacacctaaccccactataattatgcttctgtcaccatcattctaccaaaaacactttcactgcagtcaccagtgactcccatttttccaaaatccaacttacaatttttagtacttattttcctttttttttttttttttgagtcggagtctcactctgttgcccaggctggagtgcagtggcgtgatctcagcttaccacagcctccgcctcccaggttcaagcaattctcctgcctcagcctcctaagtagctgggactacaggcgcatgccaccatgcctggctaatttttgtatttttagtagagatggggtttcaccatgttagcaaagtgtttttaagactcatccatgttgtgtcatgtatccacacttcattcctttttgtggctgaataatattccattgtgtggatataccacagtttgtttagctgttcatcagttgataggtaggcattgagttgttttcactttttgcctattatgaataatgctgccataaacattcatgtacaagtttgtgtgtggacatatgttttttgttctctggggtatatacctagaagtggaattgctgggtcatatggtaactctatgtttgactttttgaggaattggcaagctgttttccagagcagctacaccattttacattcctgtcagcagcatatgagggtgccgatatctccacattctttgtttttgtttttttgagatggagtctcactctgttggccaggctggagtgcaatggtgcaatcttggctcactgcaacctccgcctcccaggttcaagtaattctcctgcctcagcctcctgagaagctgggattacaggtgcccgccaccacacccagctaattatttgtttgcatttttagtagagacagggtttcaccatgttggccaggctagtctcgaactcctgacctgcagtgatccgcccacctcggcgtcccaaagtgctgggattacaggcgtgagccacacacccagcccttatagctccacattcttgctaacacttactgacctcttttttgtaatagctagcttagtgggtgtgaggtggtatctcgttgtggttttgattttcatattcttaatggctaataccaagcatcttttcatgtgcttatttgctatttgtatgtctttatggagaaatgtgtattcaaatccttggcccacttttaaaatcaggttatttgtcttttgttgttgagctttaagagttttttaataattctgaatattagacccttatcagacacatgatttgaaaaatagtttctctcattgtatgggttgctgttttgctttcttgaaaatattctttgaagaacaaaagttttccattttcatgaggcatcatttatctagttttttcctttggctacttgtgctttaggtgctgtatctaagaaattattgcctaatccagggtcatgaagacttactcctggaattccttctaaatttttttttagttttaggtctttgttccatttttagtaaatttttgtacatggtatgaggtaggcagtctaacttcattcttttacatgagaatatccagttgttccagcatcatttgctgaaaagactattttttcccccactgaattgtcttggcactctaggaaatcaattgactatacatatatgagtttcattctagactttcagttctattccattcttctatatgagtttctttctagactttcagttctattccattcttctatatgtctatccttggccagtaccacattgttttgattactgtagctttgtagtaagtttggaaattgggaagtgtgagtcctccaactttgttctttttcaaggttgttttggctactctgtgtcctttgcatttccatgtgaatttcaggattcgtttgttaatctcagattgaattttgctagggattgcattgaatctgtatatcaatttagagagtattgcctcttaacaatgttaagtcttccaatccatgaacaggcatgcctttatctaaatattctttcatttctttcagtgatattttgcagtttttcagcatatgaaccttgtacttattttgttaaacttagtttttatactgttctaaactgaattgttttcttaatttctcttttgagttatagattactagtgtataaaaatacaattgattttttgcacattgatcttatatcctgcagacttgctgggctcacttatcagctcaattggttttacaatctcttcttaatctgtatttctatccatatcagtctcctgagttccagacctttacttccaaccacgtttggatgtttccacttagttgacctcatagagatatctctaacttaatatgtccaaaattaaagtcatccccttcaccccacttacaacaaacacacaagccaaccttttcccttctgcagtttgcgtatctcaggtattatcatttgcctggttgcccaagcctctaatacgagaatcatctttgattcctcactgtttcaccctgtatagtcagttagttctaactcctacgtagatctcaattctatccctcttctgtattgtcactaccctggctcaggtttttatcattcttctcctagaatatttcaataatttccttactggtcttgctgtgctcgttcttccagtgctttccttgcccccagagtaatccaattatatcagttaagatcagaaattactccaggccaggcacagcggcccacgctataatcccagcacttcagaaggccaagacgggaggttcactttaggccaggagttcaagacaagcctgggcaacatagtgagacctcattcttaaaaaattagcctgtagtcctagttactccagaggctgagtctggaggactgcttgagcccaggaggtagaagctgcagtgagccacagtggttgcactgactccagcctgggtgagagagagacctggtttcaaaaaaaaaaaaaaaaaaaagaaatcattccaatttgaatatggactagatattacatgaaaagaattactgttcattttctctctctttttttttttttttttttttttttgagatgaattctcactctcttgcccagactggagtgcagtggtacaatcttggctcactgtaacttctgcctcctgggttcaagtgattctcctgcctcagcctgccaagtagctgggactacaggtgtgtgccaccatgcctggctaatttttgtatttttagtagagatggggtctcaccatgttggccaggctgtctcgaactgctggcctcaggtgatccacccacctcagcctcccaaagtgttgggattatagacatgagccaccgtgtccagccactgttcattttcttaggtgtgataatagtactgtgggagaatgttcttattcttagaaagtacatccatcttcaaaaaaaagaaaaaaagaaaaaagaaaagaaagaatactctgaagtcttcagtgtcaacagatgtgttctctgtaacttattttcaaattgttcaagaaactgtgtgtgtgtgtgtgtgtggagagagagagagaaagcaaataaaacaaaatattaacaattgttgaattaggtggagggcatatgggtttttctgtgtgtaatgtgctcttcaaacatatatttgctgaatgaatgaattgtgctttttgctatgagttttcatgttatcctcagttcatgttgatccaggcttaacttggcaaggaggatttctaggaacattcaaagaatcaatgcttaggcaataatgcctatctttattttattttatttcattttatttataaatagataataaatatacatggtacaaaattcaaaatgcacaagaggtttcttaactttttgaagattgcttgattctgcaacgtatcatttgctcttaaaagtactacatagggtcaggtgcggtggctcacgcctataatcccagcactttgggaggccatggcgggtgaatcacctgaggtcagaagttcaagaccagcctggtcaacatggtgaaaccctgtctctactaaaaatacaaaaataagctgttcatggtggcagatgcctgtaatcccagctactcaggaggctgagacaggagaattgcttgaacctgggaggcagaggttgcagtgaggcgagatcgcgccattacactccagcctgggcaacaagagtgaaacttcatctcaaaaaaaaaaaaaaaagtactatatagtgtattttttaaatgtaactgatatatctcaactaattgaaaccttcaaataactgatagacggatgcatatactttgctaccctttattttttattttttatttttatttatttatttatttattttttgagagagggtatcactctgttgcccaggctggagcacagtggtgctatcgcagctcactgcagcctcgatccctgggactcatatgattttcccacctaagcctccggagtatctgtgattagaggtgcgcaccaccatgcccagctaactttttgtatttttagtagagatggggtttggctatgttgcccaggctagtctcaaactcctggactcaagcaatccacccacctgggcctcccagagtgctggaattacaggcatgggccaccacacccagcccctttattttatttttaattaactagtttcaattaaactaattcttatcataaaagcaatgcatgttctgagggggaatgtaaactaggggtgggcaaatcatggcccatcagccaagtctggctcaccactctgtttgtaaataaagttttattggaaacacagccacactcattaatttacataatgtctgtggctgctttcatgctataacagcagaactgaggagttgtgaccaagaccctatggccacaaagcataaaatatttactatctggccctttacagtaaatgttttcctaccactgagataaactatataagagggtatatggtgaaatataaaatccctttccctgagtcaccccttcaaatcccaatccgcagaggtaagaactgctaatagttttaatcttgccagaaataaatatctgtgtatatacaaacaaacatatatggatacgtatattcatttttacacaaataaagattttttttaacttcaacttggtgtatcttttttttttttttttttttttttagacagggtctcgctctcattctgttgccctggatggaatgtagttatgcaatctcagcccactacaacctccacctcctgggttcaagcgatcctcctgcttcagccagccaagtagctgggaccacaggcgtgtgccaccacactcagctaattttgtaattatttgtagagatggggtttcactatgttgcccaggttggtcttgaactgctggctcaagccatcctcccgccttggcctcccaaagtgctgggattacaggcatgagccaccacacccagcctcttgagaatttcccacgccttttaaaataactgaagtactctgtagtatcattaactgggtatgataatcgttgtacaaagggttttccaaataccttatgagctttgtagttatagcatcagatcctacgatcttgttttccctgtagtatcaagggaaaattagagtttaaaagatccatttctggtcatagtgagagtgagaaaaataaccaaaccttacccacatctccttcatctaacaggttttgtttctaggaggacaattgcaaatagccactttactactccccttcctctagtttagtttccctccatttcatctttctcattgttaacatagtaagctctatttttaaaatatttttttaaatagagatgagggcctcactgtgttgcccaggctggtctcaaactcctgggcttaagtgatcgtcctgccttggcatccctgggtgctggggttacagttgtgagccactgagccaagcctaaaaaatctttgacattgcaccatagttaggcaagatgtttgcattggaggaggttaagtgaaatgtgcagaggacctccctgtgcatttctttgcaacttcctatgaatctataattattttaaaataaaaaggattttaaaaatcagataatattttgcctttgcttcagaatttccgttctccattatctatggcacaaaggcaaatttcatttaaaagacattgagggggccaagcacggtagctcacccctgtaatcccagcactttgggaggccgaggcaagtggatcacctgaggtcagaagtttgagaccagcctggccaacatggcgaaaccccgtctctactaaaaatacaaaaaattagccgggcgtagtggcgggcgcctgtagtcccagctacttgggaggctgaggcaggagaatggcgtgaacccgggaggcggagcttgcagtgagccgagattccgccactgcactccagcctgggcgacagagcgagactccgtctcaaaaaaaaaaaaaaaaaaattagccgggcgtggtggcaggggcctgtaatctcagctactcgagaagctgaggcaggaaaatcgtttgaacccaggagacggaggttgcagtgagccaagatcgcaccaccgcactctagcctgcgcaagaagagtgaaacaccttctcaaaaaaaaaaaaaaaaaaaaaaagacattgaggggctgagcatgttggctcatgcctataatcccagcactttgggaagccgtggcaagaggatcacttgaacccaggagttcaagaccaccctgggcaacacagcaagaccctgtctcattaaaaaaaaaaaaaaaaaaagaaagaaagaaaagaaaaaggaggccgggcgcagtggctcgtgcctgtaatcccagcactttgggaggctgaggtgggtggatcatgaggtcagaagttcaagaccagcctggtcaacatggtgaaaccccgtctctactaaaaatacgaaaaaattagtgggcctggtggcgggtgcctgtaatcccagctacttgggaggctgaggcagagaactgcttgaacccaggaagcagaggttgcaatgagccgagatcacaccactgcactccagcctgggtgacagagcaagactccatctcaaaaaaaaaaagaaagaaaaaggaaaaaagacattgagggctgtgcctgatctggcctgagcctaatctccaccctcacttttttctgtacccccacatgtgccctctgctgcttccattccagactacccacagttcctcaaagcaaagccagttccctggacagtgcctttgcatgtaccttttcttcaaccctaaatacgttttccaaagttcccatctgaaaaatttctattctttcagtactcagacatctcctttgttaaccccttcctcccctgttgtagaaaagtaagattattttttgtgccatcacaaaccttctcagaaagcaaagattttctacccaccagatgagaaaactgaagctctttcaggtggaatgcagggtacatggctagtgatgtatttggctagtatatggctagttcttggccttggaccaccagatagctaagtattgctagaaaaatcatgaaaaatggtaggttgatatctccataaaactgtagagggctggctttagttaagtccttagactgattcaagctgagtccatgactccatgctaacttctggttcttgagaaaaggaatcatttcttatttaattcttaccttttgcactttttctatgttgaaacatgattgggactcaataaatgtttgctgaatgaatgatccaaaaaaatgaataatgtgattgaggagttggttggttctcctttctcttatcttctgccactagacttgcctgaagtctcacatcctctctaaatctgttctatgtttttcccacttgtacttggccctagaacttcggatcaagagacaaaactcctcagatagcatctcaagcctcaacagcatcactagccattccagcatcggcagcagcaaggatgctgatgcgaaaaagaagaaaaaaaagagttgggtaggtaaaggtttggggggtgggaagtaggtagaaccgtggtggaccgccttcacctcagcatagggatcgaatccttccaggattaaccaaggtgtagtcccgtctaacactgagccctagtgtgatgtccgctcagagcatggtctcccagattctcccttccctcaatcatttcctacttgtccccaaggccacccctctgacctttatatgcatctgctttctttgggctctccatactggttaggccaagatgtatttggcaacagaaggatgctgaggatatactcagaaggaaacatcttatcagttctgtccccaccaccccccattcccttctatactatggagagattttatgaacaaagctgttcattctagactcctggaggtcatttctttaatttttggggatgttttgtggagctttccagattacttcaaaggactctttattattacctttggtaggtccagaagtcatttttgtacgtgtggtttttttctcttgcataatcctaaactgacttcgtatgacctttctgaaattcttcaggcaggtctagacactctcagcccctcttgctgactgtggtaagaaagcatccccaggtggacacgtcctgctcctctgtcccctgttcagtaagacacacccccagacctttgtataatgcagacaggtaccagctgtgtgaaatgagtgattaagtgttgattctttttttttttccttcaaaatgctgactccaaatccctatttttttccaggtctatgaggtaagagacccagttcctatccccttattttctctttccctttgccataccttccctatttccagagcaactcccttcccctaaaaaaaaaaaaaaaaaaaaaaatgaatgaccactcataacactaactgtaacaaccacccagagttcctaactcactccactgcatggtccatccacagctgccctatgtgaggacagaggagtggtctggttgggggccaaatgggaaagtcaaacaaaattcaaatatattccctactatcttcccctgttacaaaattggcctgttataaaaagcagtcaaattgagctcctcctatccagaaaatgaaccttcttctttttggttccataatacctagagacccaacatggaagagagtcactggatgaaagttatattgaccacagtttccagaggccagttcagcctgggcctaacctgaagatttagctctagagtaggatgaaccagagataggtgagggatagagaccaggagggcacactcaagtcaccccaaagcctaaaactgtctaagcatccatggagttcccaaagacatttcagggatgagggtttggtcttaagatgaacagaaaatgcatccagaatttctgttatgaaccagatacctgaggtccactctaaccctaccccaacattgtgctaggtgtgttgtgaaggatatgaaaaatggaatctataatctcgtcattaagaaggctgcagtattactggggagaccaaaaaaattatacatataaaattaatagcaatccaacagtgccacaatgcttattcgggcagtaagtgctaaaggagttcacagatgacgagacagtgattactataggcagggaagacttctcaaaggaggtaaaagttaaactgagatgcaattgtgatgggtagagaggaatgtgttgggatgctttctacacagacactgtctgtgcagaagagaagcagagggagatggagaaggccagcttagctagagcactgactgagtagggtatagtacacataggaagagcctgatacttgtttaaatttgattttttagattaacatttcccaaagtgtgttccactgattgccagcccattgagatgctccttaaaatgtgataccattgactgggcacagtggctcaggcctgtaatcccagaactttgggaggctgaggtgggtggatcacttgagctcaggagttcaagatcagcctgggcaacatagtgaaatcctgcctctactaaaaatgcaacaatttgctgggtgtggtgatgcgtgcctgtggtcccagctacttgggggctgaggtgggaggatagcttgagcctgggaggtggaggttgagtgagccaagattgcatcactgcactgtggcctgggtgatagagtgagaccctgtctccaaaaaaagaaaaaagtgataccatcgtcaaataaatttgagaagtactgcattttctctctctctctctttttttttttttgaggtagagtctcactgtgtcacccaggctggaatgcagtgacgcgatcttggctcactgtaacctcggcctcgcgggttcaagcaattctcctgcctcagcctcctgagtagctgggattacaggcatgcaccaccatgtccaactaatttttgtatttttagtagagacgcggtttcaccatctcggccaggctagtctcaaactcctgacctcagctgattcgcccacctccgcctccaaaagtgcaggaattacaggcatgagccactgcgcccagcctaagtactgcattttctacatctgcacagaaaaagttgtgagatatcccccagcaaataatcttgtttcattttgcttaatccattgttccctaaactcatttaaccatggaaccactagccacataacaccaaacatctcggaacagttctggctttgggaatactgaactacacatattctcacttaggatcttattgatcttaggggcatatgcttcaggcagcttgtcataggatctctttacacacacacacacagcatcccatgaggcagtgctatggagaaaacttcactggattgaaaattaggaagcctgagttctagtcctaagtcttacgtcaattatgcaatttcaagcaagtcaactctctggccttttcaggcttggttcttcatctctacagagaaatgagctttatggtacttttgagccctgactgctcagtgataagaagtcacctggagccagccagctgcacacatactcactcattcatgtctccaccacagccaagttggtcctcctttacatcttgcctggtggaaaccccaagatgcaccacccaccagctccatccatcacctgacggccttcctatgttccaggagagacgcttagaaagcgtaccctcaaatttttccttcttttttctcaccgtcccaaagatctggtttgcctttgtcccctataacctttgacccctcctttactctctgcctcttgctgccatttcatatctgtgtccctgtgtgtgtgtgtgtatgtgtgtgtgtggtgtgtggtgtgtgcatgctgtatggatgcatgtggatgggtatgggacaggaccctggtttgcatctctagctcacatccctaacacccaagctcatcaacaccaagatcaaacaagctatggtcagattataatgccccaagtactctaaagaaatgctgggaaatagcccttcttctaggacattggaaatcatagaaaatgctgtctggctgttttaaccattctgtgatgtcctgggcacaagaaatactaaaagaagcttgagcccactgccttctcgtgttctccacagaatcatattgtcagtttctggttgacagatgactagatgaacagattctgggctgatgagccctagtcagaggcatcatgaggtggcctctgaggcccacagtgagccaggttctagactgagcggttattgttctgctgcagaaggtgggattggatcactgagctgtataccatgtgacctctgggaccttctctctgtccccatcaggggcacaattccccctatgagcaagagaacacccaggaagttcccatagcctacaacatcagcaagctagaagattctgttctttctcttggtcctaatttcctttctttctttctttcttttgagatggagtctcactctgttgccaggctggagtgcagtggctcgatctcagctcactgcaacctctgcctccacggtcctaatttctaggcaactcttctgtccgtattctatgaatcaagtgaagtgttatagagggtggcttaattaaagtaaatcccccgcctccagctctctctgtctcagaagtctcaatccagtcctcccccatcccagtagtggagtcctaatgtccctctacctggatctgcttttttctagcttcgaagttccttcaacaaagcgttcagtataaaaaaggggcccaagtcagcttcctcatactcggatatagaggagattgctacacccgactcttcagccccctcatcccccaaactacagcatggttctacagagactgcttcaccctccatcaagtcctccacctcgtcctccgtgggcactgatgtcaccgagtaagtgctctttggctccctgccacccagcctgttaccagtgtaagctgtgggctagagttgacaggaggccattagaccttagacaagcagtacttattactgacctctccctgggcatatgagaccaacagatggacctttcttctcatgctgattgaatatcaatgggcaggagaagccaagaccaccaaccatgcctctcaatattctctagtaactctagtgcttcttcatgtagcctggcttgactcttgctatcttacaggggccctgctcacccagccccccacactaggctgttccatgcaaatgaggaggaggagccagagaagaaggaggtatcggagctgcgctctgagctatgggagaaggaaatgaagcttacagacatccgcttggaggccctcaactctgcccaccaactggatcagcttcgggagaccatgcacaacatgcaggtcagtgtctgggcggacagctgcaggaaagggaagaccaaggcttgctgtctgtccagtctgccaccctaccctgtctgttcttgccacagttggaggtggacctgctgaaagcagagaatgaccgactgaaggtagccccaggcccctcatcaggctccactccagggcaggtccctggatcatctgcattatcttccccacgccgctccctaggcctggcactcacccattccttcggccccagtcttgcagacacaggtacctgtgtgggagaagaatctataagggtgaagggaagaaaagggcttatttcactgttacaccattccacttgctttggtcagggcggtaacaatgccgaagccaagcagatgccagtgtcctaagacactgagttgtaatggtccttcaaccttaactacttttgagtttgggacctccattccttctctgtggcaaacagagttattttggaaaggataatgatgggaaagtttaggaaaggctgcgggtactcctaaaaccagttggttcttttcaatccccacagacctgtcacccatggatggcatcagtacttgtggtccaaaggaggaagtgaccctccgggtggtggtgaggatgcccccgcagcacatcatcaaaggggtaaggaacttcagggagagccacagtgggaatgaacaaatactgttacatttatccaagaaaatctggaccctgggtacctccaaaaccaaagaactcaactcctaaggcctttaggaccccggttcatggagtcatctgcagtgaagctcaagagcttttccttccttggccttacaggacttgaagcagcaggaattcttcctgggctgtagcaaggtcagtggaaaagttgactggaagatgctggatgaagctgttttccaagtgttcaaggtaaagggatacctgtactcaaaaaggttgttcatcctctcgtggaatatatatacttttttagagacagggtctcactcttgccacccaggctggagggcagtggcgtgatcacagctcactgcagccttgaactcttgggcttaagtaattctcctgtcgcagcctcctgagtagctgggattacaagcatgtgccaccatgcatggcttctcacaggatattaaaccgtccaggcactgggatcctggggacctttgaggctttatggagaaatgctacctaggaaaagcatatgctctgcactttctccatctatttctgtttcctctgatagacattctttgttgtggcttttacacctgtgtttgtatattttcttcttcttctgcctgtcttttctgtcaggactatatttctaaaatggacccagcctctaccctgggactaagcactgagtccatccatggctacagcatcagccacgtgaaacgagtgttggatgcagagccccccgagatgcctccttgccgtcgaggtgtcaataacatatcagtctccctcaaaggtcagtctttgtctcttggggtgaggtggtgtggcatgaaggcagggacaggatcatcaaataatccatcatgcattcattcaccaagaactcactgagaaggtataatatgaagatgcttaagtaatgtgagatataaaaagatgagtaagacccagtcctaactttggctcccagggacacttttgctaagccttggcttcttgcttcactcctcacccccagctcacagcatgtccctaaaaagaagatctaagttttcaaaactaggggttaagggactcttatggaaccatggggcaagtggctctgagtttcttcagggggctcctagataaagaaagaaaagccctttaggatcccttgctatcctcaagaccctggtcaatactcatgctttctggggtgggggttcaggtctgaaggagaaatgcgtcgacagcctggtgttcgagacgctgatccccaagccgatgatgcagcactacataagcctcctgctgaagcaccggcgcctcgtcctctcgggccccagcggcacgggcaagacctacctgaccaatcgcttggccgagtacctggtggagcgctctggccgtgaggtcacagagggcatcgtcagcaccttcaacatgcaccagcagtcttgcaaggtggctgccccccgacacccctgccagcctttgttcatgcctcagccttccctaagacccttcctcggccccttcctgcctcattgttcccttttcctcacctctgccttcatctttcttctcttctgtgttcatttccttccctctctatctatccccttttccagtcttctcctttccctccccacgatttctttccagcctcttgcctttaacttgtttctccacactttcccttgcctttatggagaaaggctttcctctccacacttttccttgctttgtgcaccttcctcctcagttggtcattgatgaaactgcattctcctcatttctaccccactgtctgccaaccctgtcaatcccatcccttctcttttgttctcttccttctacttttcttttcagtattactctctgaccttgggctatctgggaagaagcactcagaattaaatggtacatattacaccctcccctgccaaaacctgatgatgtctcttgagtaccctaatacaatggagttggttcagatctttgctcttcccagctcggggaggcatgcccattagtagtagtccatggtaccagtgaaaatccatctaggaaatagcatatgttccccaactttggggaatttaggggctgctgcttaagagggttgctttagagcctttgcaaccactgcttatcactctgtggtaatctgctgtaatcaaatttgcaaggaactaaaggccccaggggaatctagatctagtaagacttcttcaaaatcctgatttccaaggccgatccagctgcttattcccaagtgctgacccacagccttcttttattccaggatctgcaactgtatctttccaacctagccaaccagatagaccgggaaacaggaattggggatgtgcccctggtgattctattggatgacctgagtgaagcaggctccatcagtgagttggtcaatggggccctcacctgcaagtatcataaatggtaagtaagctgggatcaagacaaaattcatcgaagtgggaggagggagaacccagtccaggacaacctatgagttgtgtgcatgtggcagaaagcaagtgtgaaggcaagtctaagtgaatctttttcccctttctccctacagtccctatattataggtaccaccaatcagcctgtaaaaatgacacccaaccatggcttgcacttgagcttcaggtaagacctctagctctggatgaaccttctgaccctacccaagagtcttcaatcctggactctggccaggaggcagtagataggagaaggaaagagaagtatccagagctttttgggctggaaatagaaagtagatgtatttgtcatgtcagttacaaggtggaggaggacacttgaggagagaaaaggcctgctaagctaagagagagccaggtaggttgctctaagcagaattaggattctctgcccgcacacgctgatctgggtcagtgatgtcagaaggttatccgaagagggctaccaatttgagaatcagctctaccaccccagggctgctgctctgagttccgatgtccccactattacttgaaaagaaaccaagtaggcattagtgagaagcaggcagaaggagggacagactggcaggggctgaaccctgacaatgtccccattgccactctgaccccactttccccatccttggtggcaggatgttgaccttctccaacaacgtggagccagccaatggcttcctggttcgttacctgaggaggaagctggtagagtcagacagcgacatcaatgccaacaaggaagagctgcttcgggtgctcgactgggtacccaagctgtggtatcatctccacaccttccttgagaagcacagcacctcagacttcctcatcggtactggggtccagcttcccccgggggtcaggaggtggcttcccttttccactgtaccacctggagggatgctcccttctcttcctggagtcttcggcatgtaaaggagctgcaagccttgtggcttcagacttagaaccacttaacgagccttcccaacacagttagcaccacttcaatcaccagaaagctaacccctctccttgtttttttcccacaattaacagaaaaaaggaggcacatatgtaggaaggaattaaacagctttcctcactcccttatctcacttctaccttgtgaagcaggacttatgagattgccatctaggcagtcagcacccactagtcttgacaactctaaatttcctttaatcctttgactgtcagacccctctgcctggtactaaggagtaaaagaggcacacaaccgggaagatctaggttcccagccatcttcatggccccatcctcttccctaggcccttgcttctttctgtcgtgtcccattggcattgaggacttccggacctggttcattgacctgtggaacaactctatcattccctatctacaggaaggagccaaggatgggataaaggtgagccctacccccttcactcaaaccctaagatcaggctgtcctacctaacaaagtaggaatgtttctttaatgttaggcatgggactactaggattagttaggttctctttctaacaggtggagcaaggcactgggtagactaagctgctttcctgcctccagctgccattcagcaaatggtacaatgaccactgcctctggggccatctctccagtcctaggccttctggctctaagcccaatttaaaccactctctaggggtcagagcaaacagaaaaataattgagctaagaagtaagtaaaaccctaattaaaacaaacaaacaaacaaacaaaaccttagctacttactactaataagtatgttatattaaccaagttacttgacctttttaaataccctcatatgtaaaaaaaaaaaggagacatcaccttctgctctacctaaatcactggagtcttttgaagacaaaatgaaatatgtgaaaagatttttaaaagttagaataaggagaccgggcgtggtgggtcatgcctgtaatcccagcactgtgggaggccgaggcgggcagatcaccaggtcaggagatcaggaccatcctggctaacatggtgaaatcccctttctactaaaaatacaaaaaattagccagacgtggtggtgggcgcctgcagtcccagctacttggaaggctgaggcaggagaatggcgtgaactcgggaggcaagagcttgcagtgagctgagatcacgccactgtactccagtctgggcaacagagcgagactctgtcacaaaaacaaaaacaaacaaacaaacaaaaaaacttaaaataaggctgggcctggtagctctcgcctgtaatcccagcattttagaaggctgaggcgagaggactacttgagcccaggagcttgggcaacatgggagaccctgtctatacaaaaaataaaaaaaatcagccaggcatggtggtgcacacctgtagtcccagctactctggagggtgaggccagaagatcacttgaggccaggatatacaggctacagtgagccatgttctcaccactacactccagcctgggcaacagagtgagaacctgtctcaaaaaaaaaaacaattaaaattaaaagttagaataaaaacttagtgcaaaaggaacatgtcattttcttaaaaccacctcagttttcttacctgtaaattagggtatgatgatcactaaagtccattccagcactaataaactgtgatgtaatggctagacccatgggtcatatattatctgtaaaagtaacttgttattgagatagatatctcctggtgatatagtaaatttctaaagatgctgtcagactgatgccagaaatcattatttcatttataaattatattattttaaggaaatgttgcattattattagtagcttttcaatttaaaagcattttcacacagatagtatttgttttcaagaaagtaaaaaacaaaaaaaaagccgggtgcggtggctcacgcctgtaatcccagcactttgggaggccaaggcaggcggatcacaaggtcaggagatcgagaccgtcgtggctaacacagtgaaaccccgtctctactaaaaatacaaaaaattagctagatgtggtggtgggcacctgtagtcccagctactcgggaggctgaggcagaagaatggcgtgaacctgggaggtggagcttgcagtgagccgagatcaccgccactgcactccagcctgggtgacagagggagactctgtctcaaaaaaaaaaaaaaaaagttaaaaaaaaaaaattaagcattatgactaaagcggaaacatttcctacttgaaaaatgaaattgtagggtcatgaggtttgtgcatgttaagttttaatgaaacctaggcatccatcagtagatgaatggataaagaaaatgtggtatatatacacacaatggaaaattattcagttgtaaaaaaggaggaaattcaaagccaggcatgatgatgcatgcctgtagtcccagcagctactctggaagctgaggcgagaggatctcttgagaccaggagttaaagtctagcctaggcaacatagcgagaccttgtcacttaaaaaaaggtggggtggttgggggatggggaagaaattctgtcatttgcaacaacatggataaacctggaggacattatgttaagtgaaataagccaggcacagaaagacaaatactgcatgatctcacttatacatagaatctaatgaagtcaaactcagagcagcagaaagtagaatggtggttaccagaggctgggcaggggggtaggtgagtaggagtggttgaggagatgttagtcaaaggatacaaaatttcagttaggaggaataagttcaagagatatattgtaccatatggtgactatagttaataacaatgtatcatatacttgaaactcactaagagaatagtttttatttatttatttgtatttttgagacggagtttcactcttgttgcccaggctggagtgcaatggcgggatcttggctcactgcaacctccacctctcaggttcaagcgattctcctgcctcagcctcccaagtagctgggattacaggcatgtgtcaccacgcccggctaattttgtatttttagtagagacagggtttctccttgttggtcaggctggtctcgaactcccagcctcaggcgatcttcccacctcggcctcccaaagtgctgggattataggtgtgagccatcgcacgcagctgagaatagattttaagtgttctcaccacacacacagaaatatgtgaggtaaagtcaggtgcagtggctcacacctgttaatcccagcactttgggaggccaaggcaggtagatcatctgaggtcaggagttcaagaccaatctgaccaacatgatgaaaccccatctctactaaatacaaaaaattagccgagcgtggtggcacatgcctgtaatcccagctagttgggaggctgaagtaggagaataacttgaacccagaaggcagagattgcagtgagccaagattgcaccattgcactccagcctgggcaacaagagcgaaactccctctgggaaaaaatatatatgtaaggtaatacatacgttaattagcttgatttagccatcccacggcaaatacatatttcataacatcatgttatacatcataaatgcatataatttttgttgattaaaaaatgaataaaataaattgaaaaaataaaaattaaatattttttaaagttttaatacaatctgctaaattatcctccaaaattattttacaatttataccaacttatttccttgtttggaaactcaggaaaactccacagaaatcagagcctcgaggatttacatttgaggaagtgcactttttttttttttttttttttgaggcagagtcttgctctgtcatccaggctgaagtgcagtggctcactgcaacctccgcaggttcaagtgattctcctgcctcagcctcccaagtaggtaggattatataggcacgcaccgccatgcatggctaattttttttttcttttttctttttagtagaaacagggtttcaccacgttggccaggctggtcttgaacttctgacctcaagtgatcttcctgtcttggcctccctaaatgctgggattacaggcatgagccactgcgcctggccaggaagtgcatatttttaaggagcctattttttgtaggaactaccaaaagactgcatgaacaagcctctaatctgttaattccccacagtaatcatatttcaccttctttccaggtccatggacagaaagctgcttgggaggacccagtggaatgggtccgggacacacttccctggccatcagcccaacaagaccaatcaaagctgtaccacctgcccccacccaccgtgggccctcacagcattgcctcacctcccgaggataggacagtcaaagacagcaccccaagttctctggactcagatcctctggtgagtagaagccattctagagtaaaaataagactattatagaactgaattattgaccagcagggtggctcacacctgtaatcccagcactttgagaggctgaggtgggaggattgtttgagttcaaaaccagcctgggcaacataatgagaccctgtctgtatttcaaaaaagaaaaaaataagttaaaaaaaaaccctgaattcttcacacttttcatacatacactgatgggggcctggagagtaaagagtgagcactagcaaagccaggaccaggctaaggccagtgaggagctctaaatatcagaatctggggttataaagatcatatgcctgagacctggcttaagctaaataatagtgcatcccagcaagatgtattctagcaaagacccaagtctcaggtagatctcatgatgtaggaatatcaaccaaagaagtagagcagtagggcacactagcactctctctacttctgcttctcctctgacgctatcctgaagactacttcagctaaatgagttcatggaactcctgtagaaagcaggctaagccaagtacaaactgggggaatatctgcaatgcctgtagccagaaaaagactggtatctaaaatatctaaaatttccaaacagaagaatggataaaagatataaacagctgggcacagtggctcacacctgtaattccagcagtttgggaggctgagacaggaggaggatggcttgaggccaggagtgcaagaccaacctgggcaacatactgagaccccatctctagaaaaacaaaaaaattagctgggtgtgatggcacatgcctacagtcacaactactcaggaggctgaggtgggagattgcttgagcctgggaagttgaggctacagtgagccgtgattacaccactgcactccagcccaggtgacaaagcaagaccccatctcttaggagaaagatatgaaggccaggcgtggtggctcacacctgtaatccaagcactttgagaggccaaggcgggcggatcatgaggtcaagagattgagaccatcctggccaacatggtgaaaccccgtctctactaaaaatacaaaaaattagccaggcgtggtggcaggcacctgtagtcccagctacttgggaggctgaggaaggagaatcacttggacccgggaggtggagcttgcagtgagccgagatcacgccactgcacactccagcctggcgacagagcgagactccctctcaaaaaaaaaaaaaaaagatatgagtagacatttggctagagcaaatgcaaatggccaataaaaacataaaaggatcctctgcctctccaataattgaggaaatgcaaattaaaacaagagataccacttcacattggcaaaagtagtatgtatggaagcatagacttttatactccgctggtgggagtggttgttgataaaaccattttggaagataatttggcagattatattaaaacttaacatgcgcaaatcctgtgaccttacaattctatctttcccataggaaattcttccaataatcataatacatttttattaaaattttgactttgttaaaaacagatgctatctgtataaaaatgcttttaaattggaagcttattaataatcacgtagacagaagagaattgtggagagcagattcaacagaaaatgcaccaggcttacttagctgaaatggaagtaccaatcttgacgtgtccagagaaaaaagtaagtaaagagaaggaagtgagtacatagaggtatttagacttgacatgaagcaacacggttggtaagctggagagaaataggttcataataatacagtgtctagctgctggtttatactctattggaaggggaaattgttattttatagcatttctcacattcctcccagtattcgttggtatgttcaggccttccctcctctcctggagtgcaagcaccctgcaggcagaagtggtctcattcttttttggtattcctccataaatggtaccttgtcccttgtatagcaggcatactcccaagtaattgttgtacatacacatgtgtcacagttatcattgaagaaatcctcattgccttttcacaaaccactctaaactctgagctcttcatcactgagaaaccaaggatcagacccatgatctagatttttttttttttttttttggagacagagtcttgctctttcatccaggctggaatgcagtgatgatatcaaagctcactgctgcctcaaactcctaggctcataggctcgagtcatcctcccacttgggctttggcatcctgagtagctgggactgtagttgtgtgccaccacgcctggccagttttttattgttttatttttattttttggtagagtcagggtctctctttgttttcaaagctgattgcaaactcctggcttcaagctatccttccaccttggcctcccaaagtgttgggattttgttgttgttgtttcccttctgtgggcaggacccagagtcccaactctcataaatccatctttttgcccccctttagatggccatgctgctgaaacttcaagaagctgccaactacattgagtctccagatcgagaaaccatcctggaccccaaccttcaggcaacactttaagggttcggcaatcactgtcacccccggacagcagaacgctggcatcagctatcttagctcctcctctcccctctcctctttcagagcactggctctccagccccaggaggagaacaggagggaggaggagatgaaagaggagggacaggttcttggtgctgtacctttgagaacttcctaggaaggaatggtggggtggcgtttgggaacttgtgccccctaaacacatttactggcctcctctaatgactttggggaaaagatgattctgggtctttcccttgacttcttgtttcaattacaaactcctgggctttctggggaggggttcagaaaacatcaaaacactgcagcagttcctaaatgattctcacaagcaaccctgagagagacagtcttgtgagggagatctgggggaggcaggaagctcctcagattttctcacagacccttcccaattccatcaccactgccaacaactcctcccccagagatctggctggagcccagaaaaagaagcatgtggtttaaaaaatgtttaaatcaatctgtaaaaggtaaaaatgaaaaacaaaaacaagcaaacaaacaaaaaacaatggaaaagatgaagctggagagagaggaaccagttgccaaggtagagagctgcccgctcctgccctctggatgacataggggacatcaacaagacggctgccaacctgagaagtcaccaaaccacaaaaataaccttacagccttcagggaaagactaccagctctgtctttctaccctctaatttaacaatgcataagagtcaataaaccctacttttttatttttggtttttattttgttttcatttttttctcccatttgcctatttatttttttgtttcccttttttttttctttttccgtttttccatttcctcacatgtccacgagatgcttgggttgcttttccaggggctagtttggcttttccaagtgggttttctttggagaatctgatgccatgcaattggcatgacacctgccatgccactatctttggcatccatggggcttatatgagacatgaagcattggctcagaagtagagggagaagaggaacccagttcccttgacttcccttttgagagcacacgttctgctgggtagctcaattgccagcctctgtcatgagaaggtatagccccatcttgatagaagagttactccgagctttatcatggaccagaggaaaaccagaaaactgaaaacattcctctgtcttgtggccagtttggcctttcactgcactattctgatggtgcctgactgaatccaaatatcctagctggctcttactatttttcacaaatgagtattcacatataagagatgaacatccatgtgagatcatcccaatcagaatataagactcaaggagtttgacttggtggccaatacctgccttccaaagagatcctacctttgcagatttgctcctttcccattgccttgaaggtctggcaatccctgttctttcatttgacaagtacttactgagtactcactatatacaaatcattaggttaaaacagacacacacacacacacacacacacacacacacacacacacacacacaagacctgggcccttaagtttacagtccagcaggaaatgttaacctccattcagctacgcccccttgttatctagaccttcgggatcatctaagaaatgtagctgaaacccaaggagccagctagaaagaagcttttgattagatgtacaatacattgggggcagaagatctgggatcaattaagatggagcctgaaggactatggaatcttgcttgtcaggaatgggcaagtctacttcctgccatttctgaaagccccgcgggaccagcttctaggctgagctgcctagtaggctgaagcttcaggactctgcaggtcaaggatatgtgatgagcaccggcctaagtgtttgctcttcagattcctaagtagcacaagactttatcagaatctataggcataccaacctggatcactcttccacccaaccgaggagtagatgcatctgaatcttcatatcggtatattaagtccaaaagatggtccgggctgcccctcacaaaagcttctgcatccacgtggtaagctcccatggatgacagggttctgtatgatggagactattattgctattgctgctaattccatgagctgtgaagatccctaaccaactcagctgtaacatatgcaattctgtggtgggaagaggctgtgtgtccaaggatggtgctgaaatcactgccttaaggtctctgctgtgcagaatgaggaggcccccgagctggctgttctaacttagaaggaagagaagactggatgggcctgcttgggatctaggcctcttctaaaccctatcctaagctccagttccatggcaaggctcagacttttaatgccatcttaatctgatggttgagcgcttcactctattttctggtgctgcccagccagtgccttctgccatggatgttactggctacttgagaaaaaggagaggggagaaccccttctttcattccaactgcctccgaccccaaagggattcttggctctctggtaaccatggataccaccatgaattttatttggatcctcagcaggttgattctggaggcctcatgctatgactttttatttctcttcctgggatccaccaccctctactctcagctgactgctgcatttaggccaggtctccaattgctttcctccagaaagtgtgttcccgtctagtgaggtagtattgaagcctcggctttccctctggagcctgggaccctgtttacagttgcacatctgggcccctcactgtggggattgatcattctcatgaaggaatcacagttatatggcaactgcagaaggctgagcctcctcatggtgctataaccccttgggacactcatccagacttctctgaagcagaaaacctgagctccccactcactgccctagaatttatggcaaggagcaaatctacagcattctctcccacctacgtcctgcttcttggttgagactactgggatccttcagaaaagaaacactgggtcccatagctaaattctcaaccgccaggcaccttcagaagaatccagcctaatactggaatttgtgctattatcttcctctccagccccccaactccatccctcaccacagttgtctaggaaatgacatgaattcaatatctaatgtcaaccaatggggagagccacaactccaggagaggttcctgagctgagtcccttaatttctggatgaagaagaccaacaagttttgtccaatgtatttgtttctcagaccttgcctaggcactaaaaataaaatactaggtcattggaggctaatgtgggacctgatgtctgcgtgtgtgtgtgtgtgtgtgtgtgtgtgtgtctccctctctcacacacacaagagcagtttgctgttgctgtttcctaccttctgaggcttcaaagtattttttaaaatctatgctttgtggcagctctacggtgcttatctctgtctttgtgtcaatccttaagtacccatgtctttttcatgtctaaccattgggaaggtagaggctggcagggaagacaaatctgctacaagtccatgggaagaccctacaatgaaatgttcattggttggtatactgttttagtcttgaattgccaactttccaactgatctatccatattccttaagtactaaagacaaaatagagggcttctttttctctcttaatgtcttgccttctggttttcctggtttgcaagactaagtgtacctaatctcaccatctcttcacttctagctctctgaaacaagggtcacactactcagagggataaccccttacagtggtctgaggagtaactatttcctaaagtattctaaaagagtaggaagagagaaatggtagcctgctgcttctcacagacacctcacatcctcacttgggatggcatccacatagaaaccctgcatttaggtaaaatttgcctgactgaaggggactcagtcctccaaatcaaggtcaagaagatatctgcatgagaccttaagaactctttattgccattatttggagagggcgggggaattgtcctaatcacacatttaacacagggaataagtgctgaagtgacccagatcaccaagcgcagttcctcatcatactttatttttgctttccttattccttggcactgactaagctaaagttaagaagccgacttcataagccaacccctgtgatgggatggaaaaatgggcttttgcagagggtttattaatagagatggatatactactcacaagttctggctcatggctccactgagaaggccatagtaataaaatgatcttatgaacactgttccccaaaggccaaagcctgaagatattgccccttataatccaatcagccttatattttaataagtcctgaatcaacctgactacggatatatggggccaccagggtgcatgggtgcatgtctgctcagcctagccctggaagtgagcactgccggccacagatcctgggaaaggtggtagtaacccagaagatgtagccttgaagggaggatacctatcaaaatgccaaagctgcagggacacgaagacggttgaaaattcaacctgtgtatactagatccttccagtttgatggtttggtcattcttcttcatgattataccatggagaattttctgtgacaagggtggtcatggaagtaagtgagtgatcccctggtttctcattccttaaagcagtggttcgcaaagtatggcacaagaccagcagcatcagcagcctttgggaacttgttagaaacgaaaattctcaatcccatcccagatctgctgaatcagaaactctaatgagaggacccggcaatccacgttttaataagccctcctggtgattctgatgcacactaaattcaactgttttaaagggaaagccctttatagtattggagttcccacactgagaggctttggggcccaaaataagaaggttctaggttgtcattcagactttaacattaatttcaaagtcacctttctcatgcttccttgtgtttctgtttttccatttatgattttaacaaagaaaggtatgtgtgcttttgggtggaagttaggagaatgtttgtgtctttcctagttgaatacaaccttcagagaaaaaccttatgccttggaaattactacctggcacacaaaggggcttcaacaaggaaaagcagttggaggtctcttccagattgctcttctgccgaattatttgtatctattccgagctgattatgtaataggatggaaaaagtaaaaaaaaaaaaaaaaatctaatttgtatttccatgacaacgtgttctcccagcaacatccctctcctttatttgagttataaagggcactgctgggcctgagaaccaggccagaacctccttctgtatggcagctaacagtgtagggctccagtatcccaggaaggccccttatccacactccactcagctcataggagagtcttgcataatgaagacacagacctgggcacttcagtccttgtgctcctcctctcttttccccacagcaggacctggatacagaagtactcagccaaggtgacagaataaaatcctttttttgttgttttctgtttgtttgtttgttttggagaaggagtctcgctttgtcacccaggctggtgtgcagtggcacgatctcggctcactgcaacctccgcctcccaggttcaagcgattctcctgtctcagcctcctgagtagctgggattacagacgtgcgccatcacgcccagctaatttttgtatttttagtagatacggagttttgccttgttggccaggctgtgctggagctcctgacctcaggtgattcacctgccacagcctcccaaagtgctgggattacaggcgtgagccacagcaccctgccaaataagatcctttttaaaaaatatctgaaaaaagcttcatatctttacaaactcataaaatagctgattgggccatggaggagatgaggctgtttagaactggttttgtttcaagtttgtcaattttccctgtatgagaacttgggtaaagcacaaagaaacatacagtgctagtaacaggtctcctgcgccctggaactaagtgtttggaggaaggactaaaccccgggggaggtgagtataaaataattccactaagatcacctcctcagtccccagaaggctgatggtggatcctctggccatctcctgtggggtcttactgctcctctgccatttctctatgcctgaagacacgaagatgatatcaaggcagagctaccatatcgcagccagtctctaggctactgctgtgcagtggctcccactttctaatgcttttttgtttttgctttttctaacaaaacaatcttttttcaaaatgaattccaacccctgctagcttccttccccgcctccatactgttttaggcagcaccgtttatgtgacagagtccgtgtttctcaaatgcatggtgttcctcaggtggagagtgggcagaagtttttgcaacactttttttttaagttattgggtgcaaaatcccaaaccaggatatgtgtatgtctgtgtgtttatgttttttatttgaccctcccctctttcaacctacccccttttatatctaatgtagaaaaagcgaaattgaatctggaaagcaaactgttgtatatagttgcggtaacaatcatgaagagagagccgggctgtcccctcagtaattcattttaaataacaaattatttaaaaataaaattcatgccagagccagctgaagaggccttccttcatcaccactgaggccacccccaatctgggccctctgtccatctggcatgtctcctcccagcaagattcatctgttcaatgccatttgcgtttcaataaagttatctcctgtactgtccactggttctctagctccctctctgcctggtttctgtctccatttatcttgtggcccattccttgattggcaaggccagactgcttgtggtcatttgcctaacccagaagtaacctgaaaccctaagctagagtctcctgactcccatggttgggggtgggaggaacccctgctcgcacattatggacatagaatccttcaccggatctcaaaacatccagcccaaacatcaaggctccggagtcctccatctgggttgctgcagtgtttgaaaacataccaccctcttgactttgctaaattttcttcttggggtaaaagtgaactgacctattagaagctgttgtaatcaagttcaacttcttttggccacttcaagaaagtaaataggcttactattccccattgcaaaattgaagggtccaagaagcaatcttttccctatgaaattgtagtaacataactcatctctgccctcttaacatgggaggtgacaagtgtgttgagaactctcttcaagccagttgcagtgggtgtacctgtagttctagctactctggatgctgaggtgggaggatcacctgtccagcctgggcaacatagcaagacccccccaactcaaaaataaataattgagaaagctttcttttgaagtaatcttctgatgagatgacttaatccctgattgttaccagtccagcatccacagtcttggaagtgacctaggatttggtaactcgtttcctttgccatgtgagaatgaactcacttgataagggttcctgggaaccattttgaaggcacataacctgaacagctcactaaaaaatacctgtttctgtttgctctagaacctcccattccaacaacattctatcctttctgccactacatgcttgccactctgccctgcattttttttaatttttatttttttttatagacagagtctgtatatcttgcccagactggaatgcagtagctattcataggtgtgatgacagcacactacagcctggaactcctgggctcaagtgatcctcctgccttggcttacatcttgctttttcttctttttctgagacaagatgtcactctgtcgcccaggctggagtgcaatggcgcaatcactgctcactgcagcctcctcctcctgggctcaagtgatcttcccacctccacctcccgaacagccgggactacagggcgtacgccaccacgcctgggcaatttttgtatttttttgtagagacgaagtctcgctatgttgcccaggctgttctcgaaatcctgggctcaagcgatcctcctgcctcggcctcccaaagtgctaggattagaggcgtgagccactgcgcctcgccacaccctgcatttttaacacctcactggagcgctcatcctctccacctgctccgctattcaggagcggctctgcaccgtaggccatttcccacgaccagctgctgacaaccatatcatcaaactgctcttgttctcgcacc

SEQ ID NO: 389 - DNA, 773876 bp, Homo sapiens
  source 1..773876: mol_type = genomic DNA
gagtgtttcacgtgtgtgggacaagccttcaattaagagggatgtacctgtgaagtcacatcccctctgctgcttctctcccaagcatctgctagtccttctcctcctcctcctcctcccccctcacaagccctctgtggccgagtctcatgtccgcctcttaacctgctttggcactgagctgtgcggaagccttttgtgataggggatggcttcggccttattccaaagtagccaccagtcaggacagctgcaagggagggtctgtgggtttctgtctagtacccgctgcggccggatctggccgcagctctcccggaggctggcatggcctgaattgtagaatggctagtgcgttcattacaaatgctggcaagactagtgccttttagtaaagagctccccagcccccattcctttccttcctgatggtgctggtgttgggggaggaggcattcataattacttgttgatgcatgatcttcctaggatcctcagatatgtccccacctcttggactatttatgggagggtgtaccaagtgtgaatatttttcttggtgcagaggtcccttcctctctcctccctccctgtccctccgagcttctgtgacgtcagccgggaggtgactgagtgtctgctctatctgcagattcccaggcagggaatgcggctccataggcagttgcttttcggccctgagacaatctcggctgctctttctcaccctccctgaggaccctggtgtctcgcctgccatacactgcctcctgcagctgtaattgggggaaaaatattgatgctttgtgcttcacagaccattgcttccctgtctcttcatactatcgtgccttattcctctgatgatgatgatgatgatgatgatgatgatcatgcaccccatggaagtttgaaagataactcatttccagctccggtgtgcttatttccagaacgtgagaagtggggagcccgtgaggcccctggagtttccttgtccatggatgtgctcagaggagcttggaaaacgatcatcggctgctgcttggttcaggcctcactatgtggctccagatggtgggaaagacagctcaaatctgtacttttctacaaaagacaaatctgactgttgaacgttttctcctcaggtatgggtcttacaccatgaaggaagatgacagcccaggaggggagccaccgctgtgatgaacgcttgcaggagccatgaggggcggctttccgcgcagtgtttgcagtgatttatgggagtcaggggctgccagagagggatgtggatgttagcagcttggtggattaaatgcccatttacattgttattgacatataaattatctgtgccaaggagacagtgaaggaaagggtttctggggcagtaatgtggtatgtgcctcaggatatggacttgtctttgcccagatttgtcctctgggctctcatgaagcgagtctcagacctaaagtaaaaccccaagacttagctctcatgatgccggcagcagtcaccctcattgcaaaggcagtggtgccgagtgaggttcccgagtggattttaagaagacaggaagacctttgaagaggtggtgctgatttccttggctggcgggaactctgtctggctgttgcatgcatcacttttgtgtgggttattttgttcctctgtggatttggaagcatcgctgaaggagagagaggattttatttctgggaaatggaatcggtttctgagtccagccaacagcagaagagaaagccagttatccacggactggaagatcaaaagagggtaagtggcagaactttgttggttgattggattatggtgctgattgctaagtgtgattcagagagcataggtggtcatcatcgagcatgcttgtctgtctttctctccggaaggaggtagcatggtggcttgagatttgctatgtctcgatgctgggtgtcttgacttactggtaggcaagaagaaagataaagaaaagggaaaaaaaattcagtcctggcagccaaaaaggcaaagatttataagcgttaactgagggagttaacaaaaaatgttggtgttctcaaaatccaatatgagtttctttgtactgaagcccccttcgggattcacacactcttagcaccttctggaaatgttgctcctgacagcggaggttttgtttgaattattctctgtgtggttgtctggctcttgtgtttatggatcaaaaacatattctactgcactctttggccctatctgtgagaatgtcacagccatttaaaatggcctgttgagtgtaggtcatttgctgtcattggtctgaaagctgcagtcacccaggacctgtgtctaccagttaaagttcaacttgtctttaaaaggcagacgcgttgtggagtagcatagggtggttggttgtctaggaagaaagttgaagctacatcttctcactcttggggcatagctaagaacggggcgtggcaagggttaaataaatctctagcagagtccaaatttttgttgaactgaaaataatttctgacatttcctttgaaatgttgtgtatggtaaaaaaaaaaaaaaaaaaaaaaaaaaaaaagacttctgatgttctttcagagtggtgtgggtatccctctcctcctgagtctcaaagattgactcttcccagtgtgaaatacacatggagatgaaaactgtccttctgactcttccctatgattttatgtggctctctctgtgagtgtgtgtgtgtgtgtgtgtgtgtgtgtgtatgaaaaaggattttgtattgcattttctctgactttccaaggataaaaataatcaaaaataaacattttataaatattgactccattcctaacaaaaaattcaatttctgaaactgctgtcgctataatttgggaagaatgcccactatcttgggaacctagataagtgggatttgttttgtggtgtttgatttattaagtgtataacctactagacctgtctactcctatttctacggaagctttcagagagataggagaaaaatcaataatagttgtgaacagaacccaggattgattgcatttgactaagtattagccaagtttggtatccagacacttagtggaggaacatttgggacctctgacactgtagacaattttaattgggctggtacagcaagataatatgcaattatgatggcttctttttggctaggtgtagatgtctgcatttcccatctgttcttggctctggctgtgttgggtccacatgtactatggagcctctggaagtagaatataaccccaagtgaggctctgcggcagctggggtaacatcaattggtcatgctcagctgacattcattttaacttgaactctagccgtcatggcgattattaaatttataatgatatatgtaagatccattttaatgagtctccatgcttgggtgagctctcacttgtgctggcaaaataaggcttaacagagtattacatttcatcttctactgaattttctgggctgtggttgaaactttgtgtagaaagaattagattgtttttcctgataggcattgtgatcgagttccacattgcccagagtacagtttctgggcttctagaaataccgccactgcagtagcttctgttggcggcagcagcttctgttggtgtgtgcatgtgtgtgtttgtgggtaaacatacaccccatttgcgtcaagtgtgaagctaaacaagcctctcagcgtgcagcctggaatgtcttgtccacgaagctgaaaggcgactctacagtgttttggctcatatacctcgggtgaactgaaaactcctcttcaggggggattggctgaaaatccaacaaaggcacaatcgaggcatctgctggagagctgggaagtctccaccagcatgcttaagttaccaagcattcattggcaccagatcctcctggcatttctgtctgtgtgtaagagatgtttagcgaaagacaattgtgagataagtcaagagacaaggcagagggctagctagatccaattttgctgtatttcccaatgtcccaagaggaaaagccacttctcatgcacctggttgtagcttggtgattgctgggggtttcatgtggatgaaatggctagtttagggccaaataggatctggctgtttgtgggtacgtgcatataccttctgcagtgaaaagcgtcatggaatatagaactagagacctgggttcaaatgccaatggtgctgtgtgttagctgtgcaaccctgggaaacctccttaacctctctgatttttagagtctacattttcaacataggacaatggggattttattatagggatattattaagattaaatggaatgtagctgggaaggactttggcacttggtaaatatttaagaaatgttccacatatccttgggatagattgcaatgtgggctttctttttttccttttgttcttagagggctgcatgtgattttgttttaaatccttaaaaaaatactcaagtcatacatacacatcacaaatctgaatgttatagaagaatacagaatataaatttctcatttctctaattctatccagcagtgactgctattaacagttttgtacatattattcttgactttttttggtttgtgtttcttaataaaatggattcatgccatacatatttttaggaagcttgctttgtcatttaaaataatgtgggtgcctgtctgagtccttacatacacacccaaatcatgccttctagtcactggatagagttacactgtagaagtgccaaaatttatattattaatcccttatagatgtatatttaggatgtttccaggtttttggtttgggctctgttttttgatattacataattccagtattcatctattcaagaagtatttatgaagtgcctccttgtgccaggcacctttctaagagctaaatataaaccagacatacaaagccacttttttcttgaagcctatgttttagatcagtgctctccaacagaacttcctgcaatgatggaaatgttctattcgtgcactgtacaaatcagtagccactagccatatctggctacggagcacttgaaatgttactagtgtggccaaattttaaattttattgagttataattagtttaaacttcaatagctgcatgtggctaggggccactgtggtagacagtacctttctgaagagccaacaacaggcaaataactacaccatcaatttccagacactggcctatgccttaaagaaaattaatagggcaaagttggtgtagtgagtgagagaggtatacatttcatatttatgattattcttgaatttcccttttaattgatgcataacttagattcagtaaagtgtgtgcttttaaagtttacaaatcaatgaagatgaatttttctacctcatacacacctatgcagccacagatgcataaggtattaagatctagacctcttctcttgccccaagaggatgagctttagctggtataaggggatgtctccctgaggaggtgtcttctgagcagagaccttagcggctggctgtgggaagatcaggaggcagctctcagatgtgaatgtgcccacttgtcccctgtgccaggagaggttatcattcagagctctcaaagctcctccctattcctttgaagacttacctgggtgccacatatagatggtagctctctatgcatccctaactcttgtcagattcaaattctgtgctgaagtgaggaaaaagccggggagacagggggcttctgcatagagaaattcaatgaggtaagtattgttcagtgctctaagaacctacttaactagcatagattggcgaagtaaaattttcctgacagacacctattgatcagtcaagggaatgactttttgattgatttttctctactcttctttagaagtttgtccttcacagacagaggtttcccacagcggatgaacattgtaaaataagaattgttggttgtttttttttttttttttaaagatgcttgatgattgagtagtgacaaagatggttcagtttgaatattctcctagctgtcaacttctcagcatgaaagcttcctggagccagtttttaaaaatgtctttggagagtgtgaactcgggtttagtgtaattaaaatttctagggttggctgaactgctctggatctgccaagccctgcccttcaaagggtaatatactatcatatttgccccatcaacctcttgtcttcatttttattaatggcattcccaatttcctcgtcacttgggtttgcaactcagaattgtttgaccttctcccacctcacaggcccaccaccttcttcaatcagtagtggaatttctagtctcactgctaccaccctagtttaaggtccaggaattcttgcctggatggtgacatagtttcctggctggctcccttgtttccatttctctttcttcagtcctgcatggtaactgtatgacatcttacagatgttttgtttacccgggaacaatgcccatgtcattcagcaagtcagggctgcatgccaccaccctccccaaggtcaatcccaggccagtagtgaggctgggctacattagagggattttccttggccatagtgatatgagctctggggcattgaaggtgtggttaggggtctggattgatggatactgacatgttaggtgaggatgaggcttcagccccagctccccagatgagctgaaatgcttgtttcctggactgggccagtgtttgctgctgctcctttggagctggaggtagcagcagttagttacaactgatctgccttctgacaggtcactgcctgtagggcccacctgtcttcctgacatgaatgaagggagtgttaagcaagagcttaggatggacagtgaggacctaccacagcacatttaaaatatcactgaagacgaaaggagagagactgtagccagatgcaactccattcagtaagctttgagacctgactcaggtatagggtcaggggggaggatggcaaaggggtcagaccaattcccagccttcatctcaatgaagagaatgtgagatagcatgattagtcttcattcattcatttattcattcatcctactttgttgagtacctactgtgtgccagccagccgcagcatgaggcactgggatcatgatgatgagcttagatattgtctcctgtttctgggcacttccagtgtcttgggggaggcaattcaatcagcagtgactgtgttattaggtaagcatccttctggtttggagaggtcagggaggacttctctggaggagggggaacgtgagctctgcctataaggggccaagtgaaaggcacactgaagagagaactaaataagcagctcacaggggaaccatgtggccttttggggggctgcagctgggatggatgctggctgttatggactgaattgcatttcccaaacattcatgaaaccttaacccccactgtggctgtattaggattgttttccagggaataaaacggccttcttcaatcagcagaaatgaatgctgatattttttattttggcttaattttcaacagtgaagacaatttgacatttttctggacctgattttaatgatgctggaaaagttgggttatttttggtccttaaagccgctagaagttgaacaatgattcaggcaccctcataggtggccattctccatttatttgacagattcatgtaaattgcacaaggatagctctgaacataagtaaactgaatttactttggctttgcagctctatcccaacctggcttccagaaaccaaatcattgagtcctcagcacaaaagaaggatgaaatttaatgctaagtggtatgcagtgccagccttcccactggcatcctgtgtagagatccaggattggcacatttgttaaagcccttttacttacctgatctctttagacttaattttatcctattggtctgtactgtgtcattatttattcctttcttaaactatctgaagtatggttttaaactggagggagaaagagcagcaatgtcacctaggttgtttggtatttgttaatcacataactttgaggctttattaaggggataatttatttaacctttctagcctctccattttcattatgaaaattaggatgctaataataaaacttttggtgaggattatgagatataatgtacttgaagatttaacacagtacttagcacataagtattaaatgatatctattataattcttatcatatgtttcccttgcattattttgcaaaaatccctgtaagaggcctattggaggagtaaaatggggatgggggtgggtggctgctgctactgcatttgagtttccttttggttaactgaaggtcacataaaattccttctggtttaaacttgtgttatgcacatctttctaaaagaaagtgtacttttctgtttcagaagtacagtcagtggagacaacaaaatcttcctttatgtagcaatcctgtaataactacttcgacttcatctttccacacgttaaattacaatatacaggaccctggcatgtagggattaggttaaacctttgtaagtgtgtctaagacagcccttacaggttgcatttttacttgaaattttttattgaatttcatttgatccactctgtggcatcccctataacctcagcaccaggaaaaaaaacctggttacctagaggtgggttacaattaatcaaggttttccaaaacccatcctaggctactttgctcctaaagcttggatcagattcttccatgcctggggtttgaatcacaataatgacatctctgactcccatcctcagggcattaatttttaatcttctttctcattggtataattagaaagagagggatgtgggggctgggaagagaaatgagaggagatgcggatggcagagcaggagtagatgttttttacaacgcagcttcttccaaagatgaggaacaacattgcagccttgcatctgcattctgagttcatttgcggggaggaagcagaggcaaatatgggactgggacaggtggctgaagaagccaagtcagggtgattcctgacatgggaattggaggtcatttggggaatgagccagagccatgtaactgcatatgttagagaggaaagttaagaactgggcttggatgtacaggggatttcttccttaagctgagtaagtaaagataaagttacccaaagctgtatccatttccagcacctacactcccttgaatctctgaggtcacagtgagacttgagggacaagaatcaggatgttggttacaaacagcaagatcctatgtccttcatctcttgtgaagccatcatagaggtaccaatctgcatacctgggaacagtgtgcctttatgttcagaatccaggtttttgtctgcttcttaggtgagtaaggttccttcagaccccctcttcccacctcttacacagaggtgtgtgagtctaaatttaagttaaaatatttctccttgtttccactgttataatttaaaaatgcaataagtaaaaatccttaatgatgtgagaaaatcatcatgagaagctaaaaagtaggataaataattgttcttagatacactttgcacctcacatgtgtaaatctatatttaattgtttgctgaaagtctctctttttcactagccattcagtttcatgtttgtttctgtattcagaacacatattacagtgttcggcatacagtagatgatcaggaaatatttgttgaatgaatgagtgacagttgacattccaaatgagagggtaaaagggagagataggactctcctttgactctctgagttagattctttgtggcacagagcagtagtttcttagaaaggagaagattttaattgtctttgatttgggatgggagaaatagtgtctggtagcactgcttagaggtaaaagttctgcatttgtgagtctttatgcgtgtggggattcataactgtgaagacccagttttattattgtgaatctattatccctgtcacccccactgtagagacatgccttttccctttgaatttccacgggtccatggtgacaggtgacctggaaggtcatttcattgatgtctgtgttggctgatcatttataggtaagataagaggcaagaactgtggctcagatgtacccaaaaggggatgtactgaataaatcagtgcaaaatatgcccttacatgttgcagcacaatggggcaaattgtgagagcaagtaatgaggagtctcaatttctgagggcagagtcagtgtcctgttgaagcccatggaatgttctgaaatagaaacaaatgacgtcaccagtcatttagaaatgcttacccagaagagaaggtggaatgctgttattctttccaaaaaatagaatgcattcaagagaaacagctttgagcaaggagacgctaattaaggttgttcctttgagtgtcagccaggcttcaggaaatcaggggctcaagatgctgccatgcgtgtctccttggctgtcgggtcacttctctgcctgtcttggttcagcaggtcctttctctccttcccaatactcttcctccactgcttctcatggtttctttctcttccctcttcccttcaaggctgatcctcattgcccccacccaccatcactactcgtctcttttaatatcactgtctactgagaacttccctctgggtttcttagttcagagtcatgaattgatctaattggcttatcccatcttgttgtgcctagaaactgacaaagactctttccttgactaaacttcatttaggctcctttgagctgtctcttcagccaaatctcagccttggcccccatcctgtctttggcctgccagcctggtcttagcaagaactgtgctaagtcaattattagcacaatcttcccacccttgagacctgatcaaattcctcattccccacctttgatgtatgtgtccttgacctgtctgtagcaagcatcctgttaggtcagtttagcaagaagcccctatccttgacatgtcctcttggtaattttccacccactgatcccctgtcactctgcccataggctataaatcctcagctgtctttgctatatttggagttgtgcccaatctctcccctgttgaaatttttgcttttattgcaatagtctcacataaagtctctccgactgttttaacaagtgtcagaaatatatatttatgtaaacaaagcaagtccatagagatagatcagccacccaagttctttgtctgtccctgggccagtcaattatcactagggtagggacagcgtcacatggtataaaacctagcttttgagggtggatcgctccagaagaaggcatgagtggacaggcagtgattgacatctctaatctattgggaaaaacctggtagaaaggggaggaagaagaaggctggagagcaggaggcactctttgtggtagatggtcaggggagtgatggaatcatctcttgaatgtttgtctttcccactgaactgcccctgtcctcgcaaagctcagtccaatggagcaaacaggcatcaagtggatacttaaataaatgtctacttaggtcccacaaactggcagatggaatataccagagaagatggagttcttgacaatggaaaacaggaagcataatgatgaggtggaaaaaactgtgacaactggagtgatctgagtttcaatcctggcctcagaaagtcctgggaaaaagtccagaaatcttgggaaaattttgtaacctcgctaaactggcttagatactataaaatgaggatggcaatagtttctgccttgtagggttgtattaggttagataaaatgagtaaagtacttcgcacaacacctggtgtattttgttggtgctgactaaaagtgagctcttttttatgtctctcagcctctgctaagcattttgttattgaggttttagtgggtctactttgggactaccatttcttgtccatagaaatctgagaaaaagtcacactttacagtggacttgggttccaatcccagcatgtcacctctcgagtgacaggcatgactgggtgtcacatcttatccttgggtatcagtttgctcctggactggtgtgagattcattgacttcttggtctatctagccttttgtgggcatttggtatctaggttgcttttggggatggggggatccttctgcacagaaggtaggccaaagttccgggctctaaagtgtcttcctccctggatgccatccacagtcctgaggtcactacatgaagcccagggagccagcttcctctgccatctgagatcaatacagcttgaaaacgtgagtgtgggatgtgtgagctctcttttctggtggccgtcaatcactggcagggcctgccataggacagcaaagagagaaacggcaaataagcatttgcattagtagaacatcacgaagccctttgcctacggtaattgaaaaaaaatctaatttctgcttgtgtccctggagtatcttcccatttggattcctatagagtctccaaatcttgtcaacacaagtgaggtggtggaaggaattcacctgctggagctgggttaagaggagaatccctaggctcccataatgatgcccaaatatcatggatttcagctagattagggggataaggtagaggggatggagaggaggtgagtgaggacagtggctctggatggggaggaggatgagctggagagggagatggactagcaattggtgaggccctgtaatgcaggtgcaggtatacactgtcactttaacttcacttgaacagcacacacaagagagtactattgttcccactttacagatgggaaagtaaagactcagagaagttaggtaactttcttataagtccaacagctagaagtagtagaccaggtctcgaagccagctctatgtgactccaaagcctgtgccattttccatcacataccattattagacattaacattccactgatctaatttctaccatattattaccaccttatgtgtctttaaattgactcattttttttaaattgagctttgtcacaagggtaatatcaatgagatcttgggttttgatgagctacttatttttctaatacccattgaaataaaaccacgatcattaacttttttaaaagttcgtcaatgtaccacctaaaataatgttgtataccaccaggagtacacagacctgtttggaaagcactgctctgtagcataaataataatatagtaacaatagataacatctttaattattggacacttgccatctgccatcatcatagtgagaagaacacaggttctgtagttacctgggtttgcaattcaaatctaccatttcttggacatgtgactctgagaaacttagttgtcttctctgtgcctcagtttcttcatctataacatagggtaataatagtattattatcatttagagccattttgagaattaaacatgttaataacatttagaaacatgcctgacacctactaagtactatgtcagtattagttgttatttgtttatcaattcattcatttgatcatccagtcattcaacaattaatgtttgaacacgttttgtatatcagacactgttctattgtctttacaacaatctgatgatgaagggttttttaaaattatactttaaattctggggtacatgtgcagaatgtgcagttttgttacataggtatacacgtgccatgctggtttgctggtcccatcaacccatcacctacatgaggcatttctcctaatgttatccctcccctagccccccaccccacgacaggccctggtgtgtgatgttcccctccctatgtccatgtgttcttattgttcaactcccacttgtgagtgagaacatgtgttgtgtggctttctgttcctgtgttaggttgctgagaatgatggtttccagcttcatccatgtccctgcaaaggacatgaactcatccttttttatggctgcatagtattccatggtgtacatgtgccacattttctttatccagtctattattgataaacatttgggttggttccaaaggtattattatcatcatcctcattttacaggtgagaaaacttaggttgaatagttttccctgatatcccccagctaatacgtgatgaaactgaaattcaaacccaagtatgtctgaagctctgctattgtgattcatttctatccacggaatacttctgataccaaatgtgggttgttcttttcctacaccaaccaattctctgactgcgtgtcctacaattcaattcaattctgatgctatctggctggaattagcatcagagcccacaggttaagggctcagacccacaagaccgccccaatttcagatgccaattgcatgtctagaccacctgtacctctcactgaaagttcccaagaccttctcttcaggtttgatgatttgctagaatagctcacagaactcaagaaaacagtttgcttattaccggtttatacaggaaataacttggaaaatggcaaatggaagagatgcacaaggcaaggtgtgtgggaaggggcattgagcttccaggcctctctagggcctccacccgcccagcacttccctgtgttcttcaacctggaagctctctgaatctcatggtttatggatttttatggaagtttcacaacacaggcatgattaactcaatctccagcccctctcccctccccagagggtggggctgaaagttccaaccctaatcacatagttggatcctctggcagccagcccccatcctgaacctttccagaagtccaccaaagagtcacctccttaacataaacggaggtatgcttgaaaaatgcttgttatgaataacaaaaggtgctcctttcactcctatcactcaggaaattccaagggtttcagaagctgtgtgccaggaatcagtgatgagaactacatatatatttcttattatatcacagtatcacagaagccgtagctggttctcttatctgctctgccattgctaccaccccaggaaaggaagctctccttcctgacagagggatgcttacttatttatttcccaaacatgtggccagactttctcttgaaccaactgatccttgcttggtgttctgaaagcagccagtgtcaccccctctgtctctgtcttccaattttgatcctagtcatatgtgaatgggtctttagctcctgctagcctgttctggcatatttgtgtcccctgaaatgtctacccagagcccctgcagtgtctgcttagagcccctgaacacagtgggtcatcactattggagcacaggactgcaagagggatacagtgacctggagcagacagatgccacggtagcagtacaacagccacattcacacatgaacatccagttctccaaatctaaggagttaagggtctgttttccactgtataaaatagggatttgctttacagaagatgtcatcatggaattcttttagttagagaactttacaaaaaactgtcaactcttgttatttttcacagatttgtttactatgcaaagctaggtttacccatacaacaatatttcggttttcgttcgttcaccttctgtaggaagatctctgggaaaaattttattaatctgagctttcttttgagggaaagaaattcacctccttttggaaagaatgagcgacaaatgatcccatctgaggttcttttccagatatgcttagagcccaagtttcacagatatggatgatagagttcagagaagacaatagcttatgtttgggcaaatctcagtaagactggctttcctagtggaaacagaaatgaaatctgtctaccttcacctcattctttccagttttctccaaccatctacccctagtcactattcaagattcatctcacatttctatccatttgaaaccttctctatcactttcctcttattctttcttctctcactcctttcagctctctccctgttttcctacccgatacatcatttcactgaatcacctgtggcttaacagcatgcactgtggtcaaaatgatgaaagtcctggttcagtgaccttcagaaagtcacttcacctcggtgttcctcagcttccttctttgttaaatggggaaatcaacagctgttataacctgggcttggtatgaggatcaaatgagaaaatacaagcacttagcaagtatctactagacaggaaatattcagtaagtgctgaccagaagcagtaatagtggtaattacaataattttgttcccaattagactctaagatgctagagggtggagattgagtctcagatttgttttctacccttcagagtcatagcataaatactcagtgtatttaaagaggctttatattttatgttttcccttctgtctgctttattagaattgggtttaaatacacttagtgttttgctgatacttagacccattttatagagtgcatgagtcagtgattaaatagtttgttcataagtgtttatcttcttagaacaataagcatctggacaaagccttgtgctttgaaaactcctggtctttgtcaactcgctgaatgagtgaaagcccaaagggagagccacctttgcccttttagtaagaagtgaaagtaggcctgattattgaaggagccagagaggaaggattagaaacagctctgagaatggggaattcttgtgggagatgtcagtaacccaaattatctctcatttcagcagccactaaaaagagccccacctggccccttcccctggaggggtgacctctcccctgagccagcatgatgggcccagctggggtgaggagtgagcagtcattaggggtcaggttaccagtaagcatgatgtcagggtggctcctggctcctaagagccccatgctagccagagagaagaggcagtagctgcacccaaagactgtgcccctctgtggagccctgctaggcctggagctctggatggatggcaggagggtgtggatggcttcttctcacctgtaggagagccagggctgctcttcctgcttcctgcttgcttcttctagctgggttgtctttctgtagctttccttgggatgctagtttgcagatgaagggtaccaggagcccctgggtgaggaagcatgtggctggatgagttgaagaaaggcttcagatccctaggatggatctgccagagctgtcagtggtggatcagaggcagagagtgattctgggaagagctgggtctggaattaaacagaccccagataaaatcctggatccaactcttacagtggaaccatatgcaaatcacctctccgtgagcctcagttccctcatctgtaaaatgaggagaatagcacttttcagggaattttttttctgtttaggagagagcaccaaggctgtctgagagaccctgagaaaacactgagaatgtgcatagtgagatctggacacatggcagccacttgctgtcccttccccgtcctcccactctcaagtattaaataggtaactagctagagtatactagctgcagtttaggagatgctatgatattctaatgatgtgtcagctcttcattttttgtttagtgactgttgagagcagtttttcttaagtctgatgaattctctttggtatttgggtcattaatccagagtcatcattatgcagacaagtacactgaggcccagaattgtcatgacaagggtgggagaaccagcaccaggctctcaatctgggtcatgtggcaccatttgtaatgtcctggcctctcaatgttctcacagcctctgagcatttgattcacggttccctctgccaagaacaaccgtcacagtgattgtgctgacctatttgtccacctttaagattcagattggagttgcctcttctgagaaaccttctctgcctcccacttacccactgggttgggagcctttcctctgacttccaaggccccttgagctgacttctacagtggcacttctcacattgttttgaggaaagctgtttccctgtctgtttcccctacttgaaaatgagcttttcaagaattcaagccaagtcttactcatcttcatatttctggttttatgtctgggacattgtaggtactccaagaactattcatccaaacaatgaataagtgaataagcaaataccaagagtataaagtgctcatggtggtggggttttcaagagagctcccactggctctctagatcctcccacccatctgctcttggagtcatctctgcctctcactgggatggtctccttgccagtggcccagagtgcagctattccttgcttgagttgtatgtccatccttgtgggccctaaggactagaatgcctcctaagtcaggtccagagaagcccaatatttagggtttgtatttaagacagctcttgcagctttcttatggctctatccttggctgacatcctcacaaggactgagttcccagaagatgcattaatggagacatcattatattataccccagagctggaataaataactcttatgtgcattcattcattcactcacacattcattcaatgcattcctccttccattaggacacataatcacaaactgactgtctacaactttatcactcacatggctcccgtgtcattcagaataggcaattagattttcccaaaggccagatttggggatcagaagggcaggctgatggagcatcaacaagtactctgatgttagctttaaaatatgcagtagaatcctgaaataatctgaaataatttgaaataatatgtctctcccactctttctgcttcatattcatgcaccctcaatgtccagtagcaggttcagagccacaactgctattttttcctctcccgaggcaaggaacagccagccagccagaccaagaggtcctacaggatttgaagtccttagaatagtggctacattaagtttgcttttgggtagaaacaaacaagcaagtttcctgctggcctccctgttcatctctaggtgaagtgaggaaaactgatggaatgttaaaggggccaagcttcttcccatctactgcagcaggactgtataagaagaaactggacctgaggtgtgtgtggccttggaagagccatttcactactgtgagcctcagttttctcatctgtatgatgaggctagtaatcccagccctttatcccttataatgttgttatgaggattagatgaggtcatatttgtgaaaataaaaagaacactaacagctaatgttcactgggtacttattatatatcaggaactgttacggtttatattttataactaaaggacctgaagctaagggaagttaaaagtcaaagtcacacagcaaataagtgatagagcatgtatttgttgtctgacttcaaagcctaagtaagcttttaatcatatttttcagataaatttttcagattttagctgtgcaactttggacaagctacctctttctcaggtcttcagtggtgccatctgaaaaggagacatggctcagattaacgttcaagtccatttagctccaaattcctggttatattttaacaaagtatacagacacacaccataactctttctttctccaagtttggtcttctttgagcatggaatgacttgactatttacagactctagctgagaaagtgtgctggagaagcaagcagattgtaacgcacatctaaatagcagagccgagcttcctaagtgggaaatggatgttgtaatacaaaggcagttagcagggtccttggaggtttcagcaggatgtaattatggttctttaaaaagaggctcgcatatgtttttgagcaaacttaacagatgcccggatgtcatgtctatattctttagggagtctaggatgactaattttctacagcaactttgcatagcacattggaacgacccattgcaaatcaattcctagggtgcaacttaatgaaagcttttattgatgattcagattaataatctaaaaacctttataaaatgaccacaacttcatttctgcctggtctactctgtatttgataaacaaaataggcagttctctccatagttatcacttaatgtgatttctttttaaaaagaaatctttaaccaggcctgttcatggagactgagggttttaatgctgtgtggttcatttttagtgcaatatcctttgcaaacttttgtgacttcctcagagattttctttgagctaggtgccctagggaatcttctatatggttcactaacattttattgtagaatgaaatgcacattgattctacagaatcaatgctcagttaaggcagtttgggggccatttccttaccccagcatactctatctgaaaaagcctcttgcaaacccatgtcctcctgaggttgttgtgaatatcgagccggtgcatcaggaaatcgaaagataacaagtctagtttcctttggtaggcaccttgacatctcttttcttgctggggctttaaccagtctgataaatttccaatcaagtcttttgaatcaagtggctctaagacctggtacaggcttctgggttcacttctctgtattagctgccttggagctaagaagttttcctcttaataataaacagttgaagatggttgaacacagaagccttgcatgtgtttggtttgggcagaatatcagcctttcaattgcctccaactattcataaccctccataatttcatagccatcgatttccccttctccctgatacgctctttcattggcctgttgcccacatcctgtaattgtgccagtcacccctgcgacctttcctttgctgagctcaattaataatgtactcaacatatttccctgttgcatcaaataccaatttggcctgaatgagtgaaagaatgtctaatgaggaaatggttaagtctttcttgctggacaagcctttacattgagccggtcttgggagatgggggaagagaggaagctgcattgtactacttgttcagcaagtttttctcaaattccacagcagagacttgttctaattacctaggtccagctattgtgcaggtgagagtgtgtcatctgatgtggaagactctgagcatcaaagacctcagatggcacagtttttggcacgtggttgcccactcctcaaatgtttctgctaaatattttagaccatgtggagaacaattacaacatggaatggaatgtttatttaggaaaggaggaagcaagaagaatagtcctccctttcctgtgatactttgtgtcctaaaatggcctaggaatgtgctcagtcagagaaggactggccagcctggattgtgtaacagtcagaggataacatggcgcctgtgcttgcagactccccaccgtgcacagatacatcatttgcagttgctttgagggccagctttgttgacagctaatgctaaggggacatgcaccaggagacatggcttccaaccttgtgtaacagcagccagctgggctctccaattctgaattttgggacgattccatggcttcatgggaagagggcgttttcttgattgtttgctcctgagctgcctgtagcctcatatgtagaaggtcagagatggaggttcttttaagaccttttagtccaattcccatttttcagacagagaagctagggtctcagatggcaagagacttaatgtcacacagcagcaggttagcctctgtaatcattgctgtcgctggaaaaggattgcagaaaagtgaaacagccaaaataaccaagctttattgagaatttactctgtgccagaccccatgttaagaattttacatgcattatttcatttaatcttcaggaaaattctggaaggtagatactgtttattatcttgatttttttccacggggcaatgccgtttggagagaataagtgtggaggagccagcactcaaatccttaccattggaggccagagtctgcattctgaatcaccatgttcttcctgtttccatctgattctagtttaaccctccctcattttacaggttaactctaacccaaaaaagggaagcaacttgcccgagacccttcaaatactggaaaatattgttatggtgactgaaagtagttaacgtttattgagtacttactgagtgcttaccagggattgtgctgtgtgcttttcattcacttgtttgttaccataattctagaagaatgtaggtagtactagctgaagtaactgatggctagggagcttaagaataacttatgccatattttatagttattaagtcaagattcaagaggaagccatccaactccaaaatttgacttccctaattctgctctgccaggccagcatcttggaatcaactatgcaactatgcctacctttttctgtatcaggttttttttttttttttttttttgagatggagtctcactctgttgctcaggctggagctggagtacagtggtgcaatctcggcttactgcaacctcctcctcctggtttcaagtgattctcctgcctcagcctcctgagtagctgggattacaggcacccagaaccacatctggctaatttttgtattttttagtagagacagggttttaccatgttggccaggctggtctggaactcctgatctcaggtgatccaccctccttggcctcctgaagcgctgggattacaggcatgagccactgcacctggcctatttttctgtatcacagttaatcctcatactaaccctgttggtaaggaattggaaaacctggatataattctagctttgctactaaaggcatcatgtttctcttggggcaagtcacttccccctctgaatgcctcagtttcctcatttgtagaagaggggtgtcatccttttataccatagcatcttgtgagacactgaatatgcacttgattccctagctgaaaagtgctgaatagagattcttctgactccttcaatcaggtccctttatcctttgaaatctgggagctttctctgctgccccatccactgggctcagtactggatggtctgcatttgttgtgaatagatgacagctgggcttgtattttcttcagatggagcttggcctgggtattaaatagctgtcagtaagaccacttttctaactggcgcagaggagcaacagagctgggctggtagtcctccctccagatgtctgggggtgcttgcagaggggagcagtggggtctctaacactgagtccccatccctttgtgcttgaaggatagcacctagaaaacattggccccaaacagaaaggctgacctccgctccaaaatcctaccttatttctatgtgactgtggaaagagcgggcctgagagatattagtaataagtaaagctgagaaacagctgtggaaacgaggtttcaggacctcctggccccatcagcactacgctctaattatctcacagcatttggccaattgggctgttggagtttctaggaaagattcattttaaccttaaccagtattattgtatttctttttatccagatgggagaatattgtttctttctccagtcttcactgatttctcgtttttaaatcctgcagaactttattctctttgaaacctatgagggacaacgaacatttttgggagtcgacttgttgttggacacttttacaggcattatcccataccattcccacagacacagatcatctttccatgtgatgttcacattctctttctttttctcccatgttaataaggtcttctcttctggctcctcctctgaatgttaagtgccctggggctcagaacttagtcctttcttctgttctctgggattttgtaggtgatcttatttaggcttttggccttacctttcacctctaggctgataactccccaatttatgactccagatccagctattcacctgtgctccagcctcatgtcccccacctggaagtctgagaggcactccaaggtctggcctctgcctgcctctcccctctcttctctttcactctccctttggccacaatgaccttcttgctgctccttgaatctgccaacaattcccacctcaaggtctttgcacctgcttttctctctggctggaaaagagttcccccaatattctcatggctgtatcactcttccttcaggtcacctcctctgaaagacctcctctgatcacatcatccaaactagtccctcctgcaggaccccatcttccactctgtagcctcttaccctccctgttttttgtttgtttgtttttttgtcatagcacttgtcctacctaaaatgatattgcatgcttattatatacctgttcattgactgtctctctccttagacataaaattcacaaaggcaaaagcattatcttcatgattgtcgctatagccctgaacctagaatgtggctgcatgtggcctggggccagtgaatatttgttacatgttgaatgaaagaaaatatgacaggtaggtgtcacctctagttttataaatgagtcagtggaggctgaaagacataatacaccccatatcacctgcttttttcccccctcagaaaagggggaaatagttttagtcaagataacctgtatgaaaacaaggcattgagttatttttataataatttataacttaaaaataacagtagatctttcttaattgtccagataacaaaactcagtatgtacattttatagcaattataataatgttatcatgaccataatttaccacacgtatcaccagtcttgttttctctttctcgaaaacacatgcttttctgacttcacacataatcttgctttcttgtttttcactatgtatcaatgaacttggcacccatacttctttgtcagctccagcagatgacaatttatctaggaatctgaatacttgacacatccaaagagaatttttccgaaaaggttttttttttttttttttttttttaaaatcagctattaaatgactcaccatgtaactgtcctcactgaaggatgatttgtgatagtgcctggcacttggttgcagggtgagctatcagtgagttgactggatggtcacatggcaccatagtgtattctctggcaacacatatgacacatagttgagacatcctcagtcactcacatactttagcagaaactaattgttttgatactttatgttgcaattatgcaagtatattttacatatccttttaaaaatctgcacaataggaagaaacaccaagagaactcaaccatgacttaatgagctagatcaactcttcttttttgttgtgttaagaaatcatctgtccttttgattctaagaagcctttactggaaatatcatgaattcaggagagatcaggatgtggacattcagggcatataacgttctcccgctttgttctccaactgtttggcccacctggcaatttgactcccattgtattactcaatgcctctcctaggtttttcttctctttggattggagcctgtctctgtctttccctatcaaggccttgccccatccccttcctgattctcagtcttttaggtgcacagaaactgactttgattgtagctatcccttctgatcggatactgcctctgacaacaagatgttcccacttggctcacccagcttcccagtcaagacatggactctgatgtccttctctctaggcacattggaagctccttctcgacaataatgatcttatacttctgtgttccttccaaaatgtagcccaagactaattaaaattagtaaatactcatttgtccaacttattggtttgtggcagccaattgttctttccatgatccctttagctttgagtagttacagtcccataaatctgggtaaaaaccctttcttccatgaggttatggtggaagacctctgcagaagcactgtttccctgctgcagacactcataagcaggtgtgtttaaatttatcccagaagatggctgggcacaggccgggaaacaagagaccagtcagtgagagcaggcaccgtgttggtactcccttctcctacaatctagcaaaattctttggggtcctattctttccctagtgcttgaatttcaatatctacctcctcccccacaaactcagctcttgctctacatcagtctaaatttactggtctcccagcctctccttcctattaaattagatattagagaaatccatcaagccagtgctgcttgagggtacagtttacagtccctgtgcctaaatcactggatgctgtggctcggatggacctaaatttatctacagaattacatgaaaccctcttgttttcacttgtgcaggtgttcaggtcccgtcacactacctaataaaacactgaactgccctggaaggtctcagcaaaataatcccatgttattatcacttggcattcctacagctctttattttttatcttctggtggcgatggtggggggtgtgtgtttacgatcattttattagcctttccacacaagattcgttttttattaaaaacacaaatatcattataaatatcttggtagagaggtagagaagagattttgaaagagactaggcaaaaggattaaatatctataggtttaaactgttgctaaaataaatgctcacaatatagccatgaacttttttcttaaaggtagccttcattaattatctttccaatgggaagtaacagctgagaccttaaaagccagatatgtcgcagggaaaaggcaagtttatggagatgatgttaagaaaaatctggtgtttagaaagtcttgttttctattttctgtagttacttcctgctcaaaactttttctcatttgtgcatttctggttatataatctggatcttgttacggcaacattaaagtggatttaaaaaacaaacaaacaaacaaaaaaacaattgctggtgaagcatcctaattggtaaatacagataataggtacatgacatttgggagtttacaaagcacctttataatgataatcacatttaaatctcatgacaaccttgagacaggtacacttagaaacccctactgcagaggaggagacgagggcacagaggggacgagggactcacctgctgttatactgctagtgagcagcagagcctggactcgaacccaacttctcttatttctgtttcaaggtctttctataatcacacattgtttcccaaagaaacagccttgttcattcattcaatcaactgtctgtctatagctatccatccaaaacgtttatgaaagatctactatataccagatactgtctagaaccctcagcttggtagggaagacagcaagtgaagggatgataatagtaaactgtaacaagtgctcagacattagcactggggctctggaaaaacaaagaatggacacttagcctgaggtggaggggaagctcagagtaagggaaggcttcctggaggaagcagtgctggagccaagtctggatgtgtatggtatttaacaagcatgtatttccctgggttgtcccagtttcctaggcaccacttattggccacttctatgtcacttttagttgagctcagttgtcaagaaagtagtagggcagagctagctaaaaagggaaaggcattcccagtgaaggaactttgagtggtaaggtgacccagagaaggctgtaaaacatggcgtggggaaagtgccccagacaagcatcaggagacctggttctggctcccagcaatctctgtcctttttctaggccttgttttctcaacagcaatatgaaaggattagatctttaaaaagttagaagggtggattgcattgccccaaggaagcagcaagaatagggcaaataggaatgttgtcagggagcatggaagggtgctatctatgtcttcttgtagtttcacacctgagtacttgctatgggggctggccatgccttcttataacctttgcactagctctttcttctgcctggaaagcctttgaccatcttgtccatctgctagcctctaactcctaccctgctctgttcctgttcccaggcagattcaggggtccttctcagctcctgcagagccccggggctacagcatgtttatccccctcgctgtgtttggatatttgcatgcctctctctccacttggccataggctccttgggggagagactgcaattcttatttccatattcccagtatgcagcactgtgctgagcatgacacatatgtgaatatatgagggggaattgtggacttggcttgattataggtcttcaggttgaaggagatttccaacctgaatgggtattcagaatcaaatacgttcatgcccattttacagacaagactctcaaggccctgggaggttagaatatgtattgggaaggataacccaggtctcctgcttcccagggcaaaggttctgccattccatgaaaattcccaggaatccaatttcatttcattcctttagcaaaacagaggggcctttttgttggagtaagctgaaggagatgggagtggggtgtaacagctcaacttgactctgggagtgatatgaagtgtgggaaggttcatttgggttacagccttttgaatagattaaggaggtgaggctgggaggaggcaggtggaagatcagaggagacagcatttgacaaggcagagctgtctggggtctgaacaaacagctcctctccagagagacaggagcagggcttctcagagcgtatgtatgagacaagctccatgtgcagtgaagtgatgcgtaccgcaaacacatttctcccatccgcttctgctgtcacagccccagcccccctacacatgtcatttgtcttctggcttccaagttgcaatggactttcaggcaagcagaaaacaaggagtgagcttttgggggtgcccgcttcattttcacgtccagtcgtcaccaccttggggtattcctttagttttctttattacccccctgccctgagtttattccttggcaacatgcccctggctcggtggggcctatggtgcatcctcctgatgagagacaccttatctgctccttggcagacgtggggaggtggtgcggggtgcacgcactgaatcgctgatagatgccatgcacggaatcagcgcgcacccttaataaagagcggcgcctcactatttgtggtgatagggccggtcgtgataacagcatctccttcagattggcttttgaaatggcagatggagggctgggtgggggtggggtagggagtcgctcacggaggagatgctccctgtcatgaaactgacttcgtgtctgccagtgctctaggtgtcaagctgaggacaggtttggcgccttctttgattgtctcctctgaaagaatagctgatcagcacacacaccttagtgctgctaagggcgtgcagcagcttctgaggatccgttgggtccacaaggcaggtcatgcactggcaccccgctctgagctccctgagggcaggggctttgttgttttcttccagttgtcccaccccaggctcggtgctgggcatgtggagaaattaagtgtgtcagcagaggcccatggcctgagttcaagccctggcttcgtccctcactccctgtgtggttttgggcaaattactcaacctctcttgaatctcttccccagtgtgtgcaggggcagggcagagaagtttcctggaaaggctgctgccaaagctgagtcttgaaggaggaggaggaggactgtctggaggacttttgtgggccagtgaagttggctccatagatccacggggctggtggtgaggagattggaaacttgcagtgtggctcagggtcagacagactggatggggcgtgagcaggggcaaggacactgaggccctggtgactgggcgtggggtcactaagggaagtaataaggtggaaaagtcagaggggtcagagagagaactattaatatttagagaataagagcaaggcctattacttgggagcaagggggtggttgagaagggatgctgtgaagcaatgacagaagtagggaaaatttcaagtgaaattcagaagacattcacatctgtacatcatacttgcttcactggaaaatgtccttcttctgtccatttcctagttatgttctgaagcagatacctgagtggccgttgtggaggaaagggcagagaaatgggaggagagaaagtgacagcctccttagattactgacacctgctgggcttggccacatccgctgccctgactcttccctcctccggcatcttcccggtcctgttgtggctctggtgagctgaccagagcttcacatggacttcttccaggtctttctctatttcacgtcagactgcctgctttccttggcattcctctgagacttcctcgcattctcctttttttctgttttgctgtctgcaggcaatccagccacgtaattctcttctcacctgccaacagtgtcttcccaggaagcatttctactcccgccagcaccaataatttaacaggctcttccaaatcaccaaacaccattccaaaaacagatttaattaacatcttggttagctttagtatctatagttatagacatatataataaaattatataattaatataatttattatagttgcaaaagggataaatacggccatgatggtttttaccttccaggctcctgcataacacatcccttttacctaatcttcttcatccccttattgttgccatgttacttgcagttaaccatgtaagtggaatctttttatgcaaagaaataaaactaatagcgtatatcttctctctactctggcaacagtctagtcagtcttaatgagatttgaatacaacacagtgatgttgatacccatcaagcttgttacagtgggattctctccatattgaatttccttaggccactgctgttcccttgcattagatatttcatccctgtggttctaaaagtctggaagacactagctagaaattgtgctggtctgggaaaatcatggcatgcttgaactgtctctggaatttccatgtcctgtgatctaaagggctgctcaggaagtggagtgcttctgagtaggttaccatgaggcatgtgggtgtgcaggagggaagagctcccatctccggggatcttccatgacattctccatgacagcaggccaacaggaagtggcagaaccttcatgacaaagcattggaggtcagtgtgctctgaggcattatgaatcatcccatggtgtgacgtggaggaaggtacaccctctgtctggatggtggaatcagtggagtagattttctgcataaattataaatacaaagccaatcatgctgcttctctgctatggtcttccactaactccttgccacctttgcaaaatgcccaagctcttgagcagaacaaagaaccacttgtgtaaagtggccaactgtcctgctttgcctgggatttagggttttcctgggacatgggactctcagtgctaaaaccaggaaaatctgggcaaaccaggctgagctttccaccctatgactatgacctaggtcctcaactaccccactgcagccccacctccttccacacactgaatagtaagcactagtggttctaaatgggttgtagtggtttccagtgtttcttgcctctttgcctatacctgtgttctctctgcttcctagaagccttccctggcttccctatccttgcctaactgattctcctcatcctttgacattcagccaggcatcacctcatctaggaagccttcactgacccaccaaagttgagggagattctctcctctgctcccctactatcacagttatcactctataccttctctgtcaatttccttgtctctctactcactggacttggagctttgtgaaggcaggactatgatttattagatttggtattcctggaccctagcacagtcactggacataaatgttcattaaacacttaatttaaggatttatttaattacataaatattgaagtgaatgagtgaatgaatgaagtcataaatggtaaaatatagtccaggtgctggggatctttcaaaatctgggtgcctgtgttctatctgcaagcatgcggagtagtttatgaaacatacggagaccctgactctttccagagatgagaaaggaagtgtggtagctcagggccaccaagcttgctgcccagggaagagggcatggatagtgaggtggggatatttgatgaaggtggtggcaggatagggctctgaagcgagctggtgtcctgggagttgggattgggagaggaacaggtcagcactgggtataagtggaccaaagagaaataacgtcagggcaaatgtggccatttggttttttggtgccaaagagatattcttaactaagatgccttcacaaatggaggctggagccagagaaagagagatgggagatacaggaaggcaaccagaactaattaggttccttttagaggggccgtttctgggtttctgaggacaagaggggctgtgaagccaccagacaggacctgggaaaatcaaagcagctctgggcagtgtgtcctatgccaatctgctgggtcgtggccagagctagtctgcaggctgctcactggggccatcaccacctgacccccaggtgggaatgctgctggaaagagaagactcctgggcttccagggggctgccttatgtgctggaatctctgtctgcaggatgaatatttcagaaaggcagctgggaaaggcagtgcctttttaatctaagctgaatggcgcctgagggggaagggcgcagtgtcctcgggagtggaataatgtgctgcaacaccatgttcccagtgtacaatgggacaggaggtgagcgtgggagacagctttggctatagaattctttttctttcggcccatgctgaatgagagcctggaattgttgccatgctgaatgagagcctggaattgttgccagtgaccttcgacagcagcacggggtgagacaattgtgccgactggcaaaccttgatgaattggaacttgtcggggagtcaagcagcgtctgccgttcatgcagcagctcgctccagccagatgctccggcagcccacttataggctgtgctttccacacatgactttgcttcacggcaacaacagctctgtgggaagtaattgtctcccccacattgcagaggaggaaactgcggcccgaagtctaatgactgaaaatcacaatgcctggcacatcatcccaacaatagtagctgaaacttatataaggtttgctctgtgtcagacattgttctaagtgcttctataggtagaacccatttcatccatataaccacctcatatagcttccattattccacccattttatagatgaggatgctgaggtacagagagattaagtggcttgcccaagattgcatagctagtacatgacagaggcagaacttgaacctagggagtctgactccaaagtttgagtgcttgatcatttactatacactttgtatatagacagcactcaataactgttagctgctattactcttattacctccaaaggcatatagcttgtgaggccagagctgggattggatacgggatgtctgactccagggtatctacattgaatttctacattaggctgattgagggatttgtggatttttcttgttaactgaggcttaggaagaaatcccatttgccttcaatcctgtgacagacactgctatagtgcactagcatctctattctctctgtcctggctcacagccccaccacacacccctgcttcctttacagttaactgtggccatgtcaatgaattctagccaacaaaatatgagcagaagagctgtccaccacttccaggcttggcccctcctcccaaataacctcatgataccagaggacttaaaggagagccataaggtggcagtagcctgagtacttgaatagctacatggagcaaagcccctcaatttgcccccagcattaaactatgatgtaagcaagagatcatcttttattgggttaagtcaataagttatttacattgttatagcagtcagtttctcccacccctgctcccaacaatatagaccctttttaaaaagcccttgagaaatgccttagtctgcgtctctaccacagtaaagagaagctgagagaatcaagttttgaaacagcacagacttcggcgtcacacacaactgagttctggtcccaggttaccatttcatgactgtgtgcctcaatctctctgaactccatgggcctcctacgtgaaatcaaggtaacactacccttgctggtattgcaacgcatcagaagtaattcagccaaagcccctaggacagtgcctgctgtatacttgctcaataagcgttaaagctttttcctttcaatgagagagtagttagacaatatgcgtcaaaacctaaatgtttgtattcctgttaacccagcaattccacttccaggaatttagtctaagaaaataatcttggatgctcaaagatttagctcttaaaatgtttatcctcatgttgcatataagtgaaaagttggaaacaaggtaaattttcagcaataagaaattggctaaataaaccatggtgcatctatttaattgagaactattcagccattaaatattatgtaatagaagactgtgcaaaacatgaaaaaatattcagagtagaatattcaaagtagaagaagcaaattacataacagtgtatgttccatgaacacatttttaaaaatagagacaaaaacgtatatatgcagaaagaagagactaaaaggatacatcttaaaatataaaatgtttatctctatggagtggtatttgtgtatttttcttctttggttatatgtagtttcacattttccatggtaaacagatattactttggtaaagagagtaaaatgagttataaaaagttattttttggccttgcctgcattagctgtgaccttgaacatcctttatcatctttatcattgtgcagatgttgacttggacagtgtgagaaacaaagacaaatgtgagttgactcaggatatctgtggaactatctaggatagggttggattgctgtcatttgtggcttaattgggtgctggttgttggatttttagtattatgggtgttatttgcatggactcatgtgcaccactcatctctccacccctcaccttccttgcaaaagtgctgcttctagtgtgaatcctgtcatggataggaccatgtatcctgtacactctccaggtgcccagtgaatatgagcttctctgaactgactgaagaccacaagatgaaaactggaaactcgcagccttcatacaacaaggcatctggtatggaagcgttcagtgcgggcttctctggctgatacactcgccatggaccttgctatccctgagctgggaccctaatggatgtgcatgagtttgtctccaacttgtaaaaaatgtgcttttgcaagaatgagtgaatcacagactgaaagaatatatttacaatgcatacacctgacaaaggtttcacatccagaatatataaagatttcctagaaatgcgcaataaaaagacaactcaaaaaaatggcaaaagacttgaacaagcacttcacaagagatatgagaatgactattaaacacacaaaaagaagttccacagccttgataataggtaaaatgcaattttaaaccactgtaagataccattttatactcactagaatggctaaaatacgagagtctaacaattcccatgattggtaaggatatggagcaaatgggatctcagttcagtgctattgtaaaaccagtttaaattctggtttatgttaaactctgttcaaaatgatttgatgtgataaaatagttttggataaatatgtttattcattcatgcacttatccaacagttatatatttagagttcatggtgaataaaacaaagttaaagccttcaagaaccataaagacagttcgcaaaaggaagccttgttaagttagccaccatatagctagtgctatttatcatattttcttgatcctcagatatatgtattatcttacaacaaatttcaaaatacacctgacaactgcaaaaaatgtttttgcaccaaagattgaagtcttgaggcacctgtgtttttctgtcattttcttcacaacttagacctttgttcatcaggaaagagatgatttttaacctcttgcctttgcctctgcatttaagttctttgaaaagaaatgcatattaatgcacatggtaataattatctcattctatctgtaaactgtttatttctcaactgctttttcaatatagctccttttttttttttttttttttttttttgagacagagtctcgctctgtcgcccaggctggagtgcattggcacgatctcggctcactgcaagctccgcctcctgggttcacgccagtctcctgcctcagcctcccgagtagctgggactacaggcgcccgccaccatgcctggctaatttttttgtatttttttagtagagacggggtttcaccgtcttagccaggatggtcttgatctcctgacctcatgatccacccgccctggcctcccaaagtgctgggattacaggcgtgagccaccacacccagcccaatatagctccatttttgacccctcaatgtaaaaacaattatcttaaattaatgcagtcttaaattgtactttgacatggctttgtttacttgccccaaagcatgaatgcaagcaaagataaatgcatttaacaatcgtttgggtgcccagcattgaatcaaacacagaaggaacagctctgaagtgaaaaactgatatcattttataatgagaggggttctggttttgaagtcagagaactgggttgctctattgctgtgtgatgtcttatgtgatcttgggcacatccctttaattttctaagactctgttttttcctggatggaatgggtatgatactacccatctcatatggttgatttaaatggatcaggtataaacatcctggcatgtaataggtgctcagtgaatgcctgttgaatctgaatctcagtggaggcataagatgcactccaacagattctcagagacagcgggagacagtggggagcctatattatcaagttcacgtttggactggtacagcttttagtgtaacttctacccaaggatttttcagcagcttccactgagccatagtataacatcaggaaatgtgtcaataactttgaccttggtttggtagagagaaaatgtgagttggcataactaaagtgagtttttgaagcaagctcccaaacaagccccttatctctgtgactcgaaaaggcaatgggtaaagggtaaaacaagtgggagcacggacatgatattcagaaataatttcctggaaaacaatcaagcatgggaggggctcagggtaaaaatagggggaggtgacacccactcaatggaaggacagtggggtctttctttggggtaaagtataggcaaaggcatgggatgggtgctgggagctgcttatcaaggctacacaggtggttactgcctgatccaggacaagaactcacatttcatcctccaagtatcctttttttgttccatttcaaaattttctttgataatttcattttcttggtctctcatttgctaagtgtgctcacacacacactcgcactcacacacactctctgtatacacatacacgagacagttgattggttcacgttaatcgtttaaaattttccatatcctgctgggtaggttttaagcctctgtgatcccaatcagctaggtgctcagggagcatggtggcgggaggaggagtagcagtggaaggacatcccagagctttctgtctctgagattagaggatgacagctctaaagaaaaggaggtagttaggatgcaatggcattccgagaaagggctgcataaagactggaagcatggaagtttcagacactgcttgtagttcaggctgctggagcatgggctgggaggtgggtggtgcacgagagaagatgctgagtctcaccacccatttcctccaggggacattttcttccccttcccagttttgctagccaagtggaacggaaaagtatattcttcctcaagcaaagagacaggaagggattgagtagttggtgggtattgagtgaggttgccaggtcgcaggcagcactggggacttgacccagagagtcccagagactggaaatagaggactggagccattttaatgccagtgaagatggttaaaactggttcagaggaacaactctgtagtcatttgttttctttaagtcttcctctttgctctaatttgatttaaatagagttctttgattttcagcctaatttaaaagtagcatttacagaaaaaaaagcataatggagaggaaaaacttgcaaatgtgtggttcccttctatgaatctttgacctgattcacccacttgttctcttatgcatctcctctctcagtgagccaacctccagcaatgacattgcctgtgagcttgtgagaaatgtagagtcccaggatcttccccaagacctccagaattggaatgtgcatgttaacaagatcctcaggtgatctgaatgcacatgctatgataatcatagaagtataactaatttcctaggagatgaaaccttgaaaactccaagaaagaaacgtcagactttgggatggaaggaacggggtcaagggattttagaaacaatgtgcgaatctttgtatgttttagaatactttgtgaaaccgtggattatacagtgcacattggagttcctcaggataatggacatttatgactgtccttgcaaacccatcgctcatctctgaaaagactttgcaagaacccgactgtcccagctgttcccagtcccagaaaaagcagctttatctcagatgtcttgagtcctgcttcctcacagtggagcttcattggagatgtttaaaatttgcctgctgattctctttcttattctaaagattttaattgctaggaattaaaaacacccatgtaatacatattccatctgagaatctgtttttctgaacttcctgtactgtaatcttcacagaaagattgaactataagatgaatggggattttggctgggaggaagtctgagagggagtgggtgtgatggcggattttggtgggtttggagaaggtgcttgaccccgaatgctgctttcctagagacttacgaaataaacgttagcagtgtaggtacgctgggcaagataatatctgtgaaatcttattctgttgtaggtatcacccctaaaattcacgatagccatagtttattgaacacctactatgcaccatggactttggatacattgtctataatccctacaacaatcccatcaaacaggtggtgttctccccatttacagatgaggaggctgaggttcagaaaggttaagtacctatcccaggccacagcactagctgtgatgccggaatttgaatccagactcttttaacttcagagttaatgatctccctactcagtcttcaatagttcactatgagccaagctcatttttggcataacattctggttttttaccagcctcctctctccggctatgctttgtaatctagctcacagctgtccccatatcaatactcatttccctgatgcctccactgatggaagcaaaactcataaacttgtctctctgtgatccactggagggtgagcagtgactggcttgctgtccatcctgtctgctagcagtcaatccaccaggttgtcaattcaccaacattggataaatagctactatgcacaagacagggctctaggccacagggaggtagaagcctttaagatagagacttcagtcttatggagacaagcaaataaatacatttaccacttacctgcacatgctaagttgcatattggaagcacgatgttctttcccaacgtgtcttatatttcagaggctgctgcaatatatcagaaagggcacataatttggacacaaaatgcctggctttgaatcttattctcccactcaccagatttgtgatgctgaacagatccttttccttctttgagtctcaggatcctcatctggaccatgaagatcaaggacagtcatcacacaacaactcacaaggagttgtgcctcactgtgttgtgcctcataagggttacatgccataatttgtgtgaatggtcggtgcagtgtatgtatggcacacagtaggtacttttaaaatgtttatggaactgtgagtctttggtgctttactattttaaaccttgctgttcccagacatctcatgtgtgttcctgtggctggcctaggcctcttgaacttccctgaaattctctcgcccagcccacattgctaagctcttcatggtgaaggactggccaggttcctacattgcttctcagctgtcagctggtcagaccaggaaaactgtggcctcagttcggaggcagaatccctctgccctctattcatggcccaggctgctctgtgaccctagccatgtgatatttttgttctttggctagagttttgtaatctgccccatttgtgcaaacattccaggaaggaattgtttgtgtaggctcataaatttgtggatggtttacatgtgaagcctgattgcatgataatctcctggggcgcagtgtccattccaggatcctcaccatggtcattgctttattttgggcccagctgtgtgggtgctggtggactgatgctgtgatgattctgttctggtctccttggacttgttttctataccctctctgtggcctttcatgatggatagtcctgggcccacagttttctgtttctcaagtcttttcaagcagagatcaccatatccttgcctcagcttttgaatcccagtggatgactcccagatctgccctgaaagcctaatcctgcttccctgccagaaaaataataacaaatatgaatctggtccttttgcaaacattcattgagttcctattatgtgctagcccttgggattcagggaaattcagggtgaacaatataggcaaaactcctggacagaagcaataaacaagtaagataaataaataaatcataaagtttcagttggggggaatgaaacatcaaaccaaatggtcagggaatagagtgattgggttgatggattgtctcataactgatgacccctctggtttgcctgctatgaggaaagtatagtagggtaagtggtgaaggggaggggagggaaatggtcaggaaggcttctcttgggacatgacctctaagcagaccctatatgctgagaaagagctggaagatcaggggaagaagaagccaaatgtaccaggaggccctgagatgggagtgggcttggtcagtgttaggaaaggctgccatttattgttcaataactacttgccaggcagtgtgcctagttcttaaatgcagtatctaattgatcctatgagctcagtgataacactatcccttccaattactcaagaggtaggagctactctaattcattcctgtcttaagaatgaagaagctgagaggcagaaaagataaataatttgcccataggtatcccaggccaagtaaatgaggggcccagcatttcatgggagtcaccgtaccccaaagctttcgttctctagtgatcattgctcacactgcctcctgctgccccggtctctcattctgattaaacctcacctctggccttcactaccactcacctccaaggggcaccccttccctgtcagagcccctctgacctgcctctggcctgtccccctgcttcacccttagcttccattcagttctgtgttagtgtctcacctctgttccttcccagctgctgtttcacctgttcccaaagcccacagcctggtttctaccaccctgtccacacaccttttccagaagaattgtccttacatatgacttcatcatcaccctcgagttaaacccccagtgagttctgatgctctcagtttcaaaggagatcaagtattttaaaccttatcaatgacactgagaataatgtccccttacattggaggaggatgttgaagtgggcaagacgttcactgttaatgtgtccctgtaagtagcaggaacagtggggtatgattttaaatttgggtgttgctagtggcactgctgtaggaaagttatagttcttttaatgcctgttagtctggtgtggggcagtgggggaggggcaggaactgggggggatggatttcatactgtgtgttgtaacaaacactggagttaaatctcaagtgtgacttttctttttgagtttgttcttctccagtgtgtctagaatactgactgacaaatacttaggacagtaccatgcacatagaagatgctaatattcgttcccctgctgtgtctccacccatcagctcaactcgcagggattaaccagctctcctgtatatgtgtttattttaatgtgaccatcactgagaaaattatacttaaatgaagctaaaaaataaataatggttacaaatcatagtaaaggaaggaatacattaaactcctgactagaaggcctagagaatggagagtttggattagtggtttctaggaaccaaggattaatcagactctccttttactttgatgatggagaatcagacttgaaaagtagtatggaatagtgggtatgggcatacactttgccagctgcgttcaagtcctgattgtgctcattgcaaactatttgaggcatgaattaatcaatccaagccttgattttctcatctgtaaaatggatagaacaacagtttatttcaggcatttattgctatataacaaaccactccaacacaatgacttaactcagttacatatattttgttcaggaatatacaatttgagcagggctcagcagggtgatttttttttttctgctttttgctccattcagcatcagctgaggtgacttgaagctggaatcatctgaaggttctctcactaacatacttggtggttgatgctggcagtcagctgggctacatgtggcctgtccgtgtggcctggctttccttacaatgtggttgctggatccaggagggagcatcctgagagcacgagcaagccaggcagaaaatgtactgccttttgtgacctagcctcagaagtcactcagcatcacttctccagcattctgttcattgggagtgagtctggaaggctggcccatataacggggagggatattagactcttgatgggaagggtggtaaataatttgcagccatgcttaaaactgccacatagttcctacctggtcagagctgtagtgaggttcaagtgtgatcttgcagtaaatccaggcatagtgctgggcacacagttacaagagcagccttaggaagtatgttatctttcttatttacaattgaagtgactgagactctgaggtgatacgtgacttgctcagattcccagtgagtgccagagcagggatttgaacttgcttatggcctccctatgggtcttccagaggctagcaaacagtactgatgtcactcagcattgttggtgcgttgttccctggtgaaatatgctatgccactggtcacaggcagagatctgtgaattggatgatctaacccctgcagcctaaagtcatacttccccctttcccagactgtccatccctcttttctctttgaaagagggcttatgggttgattacctggggactgtaatattttgctttgcactgcccatcctgccatgggaatgacacagtaagaccaccagtttcattcttctcatgctgttgaccagaaggcctctgataaaggtgccagacaggcctatatgccattgagcccagtgcctgctgggaggcttctaaaatatgctggcttgctctggaagcttctgtcctctacttcagctgttaagtaaattggtctgatctgtagctttaaaatacttccatcccattctacttgctgtgctccattgatttagaggggaagctgcggatccctttgtctgttgtaaaaggcttataaaatatgagctatatctgtactatgaaattatatgtgtgacaataaaatatatagtttttggaaacaaacaaaccttgacaaaatgtgttttaattttgcaacggaaatcgtatcagctgtcaaattaaaatttatttttcctccttgaaatgaaaagtaccttttgtagacaaaaatctaaggaaaaagacaatgtaattggacatacctctaggctttttaatttggattttcttcttttttctctctcctctgtgcctggttatttttctttcctagtagcaatttgctcgccttaaatttgaaatgtactggctgcagagccttttggctccatattattacttctgttctaaaaagagattttataacttaagggttttttttttctttttttttttttaggtcaaatctcacttctaaaagtgtgaaactcatgtagactgttgtatcagaaacttctctttccatttggaaactgtaaacctggaacgttttcagaggcagcagtgttgaagacctgctttacttgggggaggcagtgaagtgagaagtcaaaggaaacatcataggtctcttctggaagctaaactctgagccattcagcatggtttcattcccatggattgcatcatagccaggaaagtcactgagtctccttaacatcctggatgcttttggcccaatggtgtctcatgattttactgtttagggataactttgggtcctgggaaagagggtatttcccagtttctttctatttctcttttaggtatagacagtacttttataatggggaaaaaatgctttgatttaaaaaggaaaaccacaactccaaaagagactgtttccagggttgttgggcattcattcactcatttgtttctttagccaatattttctggacacttactatattccaggcatacccatgctagactctgggcgcatagtggtcaatgtaaggagccaagactctggcacacaatggtcaatgtgaggagcgatggctcttgtcttctcagagcttagagtcttgtgggagtgacagcagtaatgatagggcctcacagacatggcacattcaaacagggatatgatgacatgtctagtggggaaggaaagtcccaggcaagaaggtgagataaaacttccccgagctgaaatctgcaggcagagtgaagttgatgagtgaaacaggagagaagagtatctcaggcagaggaaacagtgtgggtaaaaccccagtgaggtggggagtggtggcatgagggcctgaaagaggttcaaatgtggcggggattgaggcctcatcacaccacacagggctgcagcgcatgttcaggaaggatgtccttatctgaaaaccaaccaaggaatggctgaatgtaacctgcagtgtgtgtggttaaccagtacataatcccgtaaagcccaaaatgcaggaagtcactgagctgctaagcctcgcttgtcagaggcaggcctttttcagtctgtgaaatgggaacattagcagtgccaatgaccttccaggtggggacagctttgggttcacacagtatcttgaaatcttctggtgctgtgctttgggaccaatgaggaagagtgagactgtgttcccatggacatacctgtgagcatgtgcccatgtgcacgtgtgaggccatggctacacctgagtgggcgcatgctgtgcgtgttagtgcattcacattcctgttcattgtcatgcagatatttgtcagggagagaaagcccctcattgggcccacacatctgctaccttggatagcacttgttcctctttgcccctacatttgttcagtgtgcattttgaaggcctcctttgtgcagagtgcttgggatgtagagaggactcttgtttctgacaaaactgccccagtcagagcctagtctgtggagaatggccagacatggttgaggccaccattgtacagggcagtacctgtagcttgtctttgctcagaagcaggtgcatctgcccaggtcctgaccaaggagacatcatctttgcaggagtctgaaccatgcaggcggctgacagaccttcccactactgtcctcaggacagaggaagccctcggagtggacagcggctgagccactaaacttgctaccggtttctggatgtctcttgggagcaaaccaagcacactgatggctctgggattgatttcagcctctgtccttgccactgggcctcttcccgcctcccttcctcatggtctctgatcctctttccccctctcctctgcccctttacatgctgagcccctttactagggctatgtgtagacatgttccttcaattataagaggttctctctgattaccagagctatcaaaaagtagacaggatgctattcctgtagcagaactgagtctctgtcccagccttgcacttccttatggagtataatctaggagagttttgagttggcctcaggcaggacttgggaatttgctcatctttacaatgggtgataatgcctacctcctgggattttgtgagcattcactgggataatgcatatgaagtacctagagccctgctcagcatgtcccaataaatccctaataaatgatgatggttgttgtgaataaccagtctcagcagctatgaaaatacagaggagagaggatgtctttaaatcagcagaacaactggcatttagtaagcacacctagtactaccactggctagcatttgagcactttgtagccagtagctgtctatactattatccaagatcgcatggtgaggaagtacggaggcaggattcaaacccaagcaggggcccaacatgatgtgtgagaccaggactcagcccagtggtgtctgccttaggttggcgtttaaagtgtgactaacatacaacccatgagggtgtctacacagtgtgcattttctgtgaagaggtaccacattatttagaacgccctatctgtgtccttctgctcttgtctggggctcccctatggcggccacactatgagatccatgaagtctgttgcatctccagaaggagcatgtgctctttctgtcccctggcacctcactgggtggggaggtctcaacagtacgctggttctcgggccctgctctctgccagtgcatcccttcttaggtgttcactgataaagaggacttggtgaacattgatggagtggtccgtggggcctccagttcgtatttggagtgggatccagatatttgtgtggcagtggatactgtggaatttgatgcttatttaaactcccacagagatctctagtaatgtagaattttcactttccaaaagaatccaaaaatacatgctaccaggcaaggcatccttcatgactgctacatttggacttagatatggtggattcccttaaagtgaggctcatgtgtattcaccggaagcctcttcctctttttatggggaccactgaggagtgagggtgtaatgaatgtatctctcccttgcagttccctgtggctctgccctggatgaagcttgtaagggacacgtggtcttgagtctgttcttcagatatcattgatagaaccaggggtggttggcatggccgggagaaaacccagagggctatggggactattcttagctgcttagaggtccccataaaaagagggaactgatgtgtttagggctgtcaaaaggattaaactagggctatgggtaggcattttccttcaattataagagggtttctctgatcattagaactatctaaaagtggacaggatgcttccagaggtaatgatctctttcggttttggagggacacgagtcaggactgggtgaccacttagcagagctactgtgtagagaattggattctctggggagtgtgtgtgtgtgtgtgtgtgtgcgcgcatgtgtgtgtagggaatactgttcttgtgtctgcctcctgaaaggggctgtaaacacctcctgtagcttatcaaactgtcacagtggttacctctggtacatgtgtttatggataagctgggtaggggaggaggtacatcatctttacattttattattatttttgcatgtatatttaatttgaatttgtcacaacaaacaagtattggttttataatgaaatataggttaaaattgcaccttgaataaaaatggcctctaaattatatgtcacagagaaaagatcagctcttaagagacctggagacaagcttcagcttagctgctctcttgccacatggctgggtgaggtacgtctcccctctgggtctgagttttcccatctgtaaaccgggaggactggactatatatgctaagcataagcccatacagctctgagactggctgggctgcagtaggggaggggaaaagagaaaaggagaaagggcagcagcagtgcctctgtgtgatgggaatagggatagtagctggcattgctgtattccagaagccttgatgccaagagggatggcctttggagaaacagactggggaaatggcactgctggcttcccccgcgtattagatcattcttgcattgctataaagaaatgcctgagactgggtaatttataagaaaagaggtttaattgactcaatactgcaggctgtgtagaaagcataactggcatctgcttctggggaggcctctggaaactgaaaatcatggcggaaggcaaattgggagcctgaatgtcacatggggaaagcaggagcaagagagagagagcaaggtgccacacagttttaaacatccagatgttggagaacgtactcactattgctaggagagcaatgagaggatggtgcgaatgcattcatgagcaatcaacccccttgatccaatcacctcccaccaggccccacctccaatactggggattacatttcaacatgagatttgggcagggacacagatctgcatgacatcaccctgcattggcctgtctctgtccctttaaacatagctggctttcccacgtaccatgcttcagccaccacagagaacctgtggtatcagccccgcttacactctggcttgttggtccgccaagcccctgctatgttccattcaccctctgctctcatgaacttctgacccctgccttcattctccaaccttctgggtgtccttccctaatttcctgaagctcagtttcccttctgactctcagttcttgctcagccccttaattatgacttgacccatcatttgggattaaaaagcattctgttaatctcctgctcccaagcagcagcctgccctgctggggatccgggcccctccttccccccacagacacactcacagctagtgggtgcacaacatttttggacgcagcctcagctcctagcaaacacttttcctgaactcagggtcactgttgcttaagtcgcagctggaggctggcttcagagcacattgatttttcccagggctttaataatcctgagcttcagtttgcctattggctcttttgtaatgcatcagcctcataaaatggtcactttcggttaaaagatcttattactgcaaaaagagatgttgaatcacactttcaaggtctctggtgaaatgtgatctttgagacttgttggccctgttccacggcacgagaaagtggatattaagaagataaattagaagtcaaaacacagttctgtgttcccctgtgtcttaggctgagtgtccgtgatgaattttgcaagaaaaaaatcagaactccctctacccacgctgcactccctgccaccttcagaagtcagattctaacctggagagtcagcagctctttatttcagctctgacactaccagtatgctaatctccctgggcagtaatgcaggcgccttccttctctcccacaagtcagagattggatgtactccttagctgtcatattttgcaattctgtgcagctcagcaaatccttattgatcagttttctctgtacaggcccagtgtaggtggacaggggacacagagaaactggagaaggatcctgccctcagagcccacaagcctacagtgtgggagcagtggacagatgggggtcagagccccctcatgccctcagtactgcagggttaagatggcagaccctgtgctaagtacttaatgtgtattatgtcattgatcctcaactgtaattgctatgatcagcttcatttatgatgagaaaactgaggcttagagagattaaaatgcccagggccagtggtgaagctgagattgaaactgggtaggtctgcctgactctgaagttagctagccctttaccacatatagggtgctgccccttctggcacccagatcgttggtgggttctctgatgggatggctctaggagtacggaagagaagccccttacccagcctggggtcagatgggcttcaggaatagattgttggaagtgatgacgcttcagttaggtctgaaagactgagcaggagttattcacagttaaaggcaggtgggaggagactatgagaatatgggaaagaatgaagaggtaacagcagttactataaagagcagagtacatttgggaagctgtaagtctttcggggagttgtggggactgggaatgtgtaggaaagtgtgaataaggggtaggcaggaaaaagactgaatgcttccttacagcagagacaaaccttataagctagggatcaattcagtaagagctttggaaaatccgacgtggtgtgagacataaggagtcacaaggaagaggaagatacattatcttcatcaatggagtgaggctccatctccctgctatgttccaggtagaacctctggtggtgggctttgccaattccgaaggtcctaaccgtgtgataaggaggcattaccctggctttcccatctgttccagctggtaccttccttcaatctcctggagtcacatcggtccctcttagcagccagcttgtgtgctgtccaccatagtgctaggaaaacaacacaggaactgaagccaggtggactgagtttgagtcttagcatcaactctggctaattgtatggcggtgagtaggtcattcacctgcctaagtctccttccttaaatgtagaatagggataatgactcttaactcgcatgtcattagaaggtaagaattagaattagaaaaaggtacccttcttcaagacactactgtcatcttctagcccatgatgtgaacagtgacccctagggccatgtaggatgctcattatctattgcataaatgatagctgctgctattataatcattatcatcatcttgatggaaaatggctccaacttgaccttttggtgggttagttggaccagcctgattaattcagatttcatcacagaagggcagttctaatctgaccagctagtatgtaattgtggcaactggtaggggtgagccgggagtcttgtcttcttattggagctttttagcatttggtgtcaaaagctgaaggtcgtcaaaacattggctccctctaaattattgtgctgccagaataactcctaccacagagcagattgtctccagccattggagatcaaaatagagcctaatggatttaggaaacaatcaatgctctcagtgcttctagagacgtttgtgggttgtagcccataaaatattaattctttctatttgtctttaagaatatattttatatgttaatgcattattgaaagatacttataatattaagtgacttaagacaaaagcattgaatgaccaaatttctttttctttgggatattcatgtaaaatataaagacaaaaccaaataccactgactgcgccagcagccacgaattgccagccttggaatccaactgtacccctgtaaaatgaaattgtcttattggtgttgataggtaaataaataacttatgtatggcatttggcatttcccacctaataaaatgtttcactgttggatttactgggcacatttatgaaatcacaactgtgcagccaagctttatttggccttagacattagagcgagacagggatatgtctggatcttcaatgtacagaacgatgcagttgaaggaggaatgatcgcaaatcaaaggaagaaagggtaatccagaagatgcagggaaaattatttaagatggactcaggattcacccactctgcagggagcactatgtatacatttgcattcttctgagcgtgagcatgtggcatattccatacaaaagcacacaagatatgtttctcggtatatttcatggaacactaaattctagaaggaataatttcctgcactcctttggggccacagaccactctgaaaatttaatttaaattgcagtgccacacttaagaaacatgtcacattcacgtgcacacaaatttctcccatccaagtactaaccaggcccgaccctgcttagcttctgagatcagacgagatcgggcgcattcagggtggtatggtcgtagacatgcatgcacacaaatttcttcatgtgatttctaagggtccctcattccctacataagacattggactctgatctagtccagtagtcttatttttaactcaagaatgctgaagtccaaaggggtagtggcccacccagggtcacacagctcctgacacatcatcctaaggccacctctctagatggtaggagaaggtgttctcttagcaatgtgctgaggagcatggactctggagcaagaccacctggttcaaatctaggtttgctacttactagtggcttgactttgaacaagttacttatgtttctgtgcctaaatttcctcatgtgtaaaataaggataacaatagcacccactacatagagtcgtggtgattataaatgggctgatacatgcagagctcagtgctttgaaacagcgaacactttgtaagtattagtttctatcactatgtgtctagagcaaggtcccctgctatatgcttttgtagctctttttgtatatttccttcacagtctgtatttttaccccttcattgcacttatagtgtaatttatatagcttttgaaattttttcatttatttgtttgcttattttttatttatttgagtgtaaatagatactgctttatccccagtacctggaacaacccctcgcacatagcaggcaatcaatagacatttattggataacagaatgaatgcaggaatgaatagtccttattatgatctgtccatgtatactcttgtgattaagtagcatctgtctccatgtgagcattgctcactgtagttacctctgtctctcagcacagcgcatggcacattgtgggttctcaacaaatatttgtgaactgaatgtatgagtaaggagcaggagagagtaagaataacagaaagaacatagagataagagggaaaaggaggagaaaaaagaatattacttaaggttcaacattcatccctcatccattcattactaatgcaatcgggagtggcggtgaagagcccagactctagagctgggcgcaaactccagctcagccacttatgttgtgtgaatttggggcaacttatttaacctctctgtgattctgtttctacatctgaaatatgggttgttaaaaggtgatgagttaatctctgccaagtgcttagaacagtgacaggcaaataggaagcacccaacagatgtcaaatataataatcatttatttgttaaaccagcagccacttatgaagtatctaccgtgtgccaggcccttgctgggtgcttcagatacataggaaaaccaatacacttttctggagtggaggtcagcatgccccaggggagatagcaaagcataccaacaatgatactctagtgcaataacaggagatggcaaggggcatagaaccggcactcttgccaggtctgggttcaaggtaggaagacacgtggaatttcccagagaagggggctttgaacaaaagctgcaggttagcctagcaagaggaatgggaggaagagcattccatgtaaaaggaacaacttgttcaaagatagggaggcatgtagcggcacacgatgtggggatcagcagacagaatgggatgccatttgttcatttaattcattctatcaatgttcattgagaggcaacaatgtgtatggtaggcactgttatgtgcacagagatagtgcagagaacaaaacgggcaaagtccttggtgtcatgaagcctctgttctagtgtgggaaggcagtaaataaacaggcatggatgtcaggtgccaggtggctacaagtatgtgctatggggaaaaataaaacagaggaagggatatcgagtgtggggttaggggaaggggtgttattttagatggggtggccatctaaaatcaggactctctgataagtgacatttggcagagcccaagggaagtgaagactccttgcgtacgtggctcttacggggaccatggtccatatagagaaacagtcgtctgcaaaggccacgaggtagtagcagactgggaaatggtgaagaggtgagtctgaggagtgagtgaggggacagtgggagaaggtcaggcaaaggtgggggcagattctgttggccttgtgaagataaggtggaggccttgagtacagggtgcgagacagagaggttgggagcccaattgctcggggccctggcataatctttgccaagggagtgggctttcttcatggagggggagatcatggaaagattttaattgtgaacgatgtgatcacattgtatttgaggttgagagtttcttggagttcactggagtcaagtgaggtgcacctgggtcactcagatgagagaggaggaaggcctgaacttggcaagggagcagagctgaatgcacgtcaggcttcttgcctactggtgagttctcctctctccagcacctcagcagtgcctcactgcgaataagcatctcctcctgaattgagttgtgggtgggaaagatcagaattcattggcctatgaggccaatagtgagaaatcaaccttcagctttctgtggatgcttttatagatatagtttctgcagctttaaccctaggttctgaatagtgagtctttttttttgagtatggtatactgcattgcaaatcagattattttttaaaaaattaatggcatctgtcattttaaaaaattgtaaatgcgcctctgtgcctgctctcagaaaacactaactcttaatttttatgctaaatcgagtgatcacaacccaagagctcagcaattttgcactttaaacatttactctgatttatttccttccaatgaattcatgattaaattttaaacgcacactcctattcagcagggaatcatagaacggagggtaaaacaacttttttttctttttttaagtgttaatctggaaggcctgtctgtctggtcttcaaagccccactgccaagtggctggttgccttccctcctctctctgtgctctctgtctggagttccagttatacgaggcagtgtacaaggactgtggaccaaggacagaggcaaaaggcagctaactttcataaatattttgtccctggtccgtggaagacaggaattagtattaactgtcctagaaaagcccagaatcctgatgcccctgagcgttcatgaataagaaaaggaaaactcattcacaagtacacgaaggctgctggtcttagaccccaccaggcatatgctctgccaagtgagtgggctctcttcatggatggggagatcatggaaaggaacaagatcattatttcccccaaacaaatagggaagcagatgtttgggaggtgcctgccagatattgattgtttttcacccaaattctgacattggactggctccctccccttctcctttcccacctgggtctctcgtcttccccttcatgataaatgatcccttcctttctgtagcagttgcttctgttctccactgagttctttccgcagtcagggctgtatttatctgaatacgaaggagtaacatgaggctgctgaaaggtgtgtgtgtcctgagaattcctccttctgtatactgttagaaaaccatccgtctcccttgcatactcatgaggtgcttgaaaacaccactctgttgaaagacagtttgacacagtgagattcagacaggcctagattgaaagcagtattgtcacttcctgacttttacattggattgagttattaaatctttccaggtctcagtcccatctgtaaaatgggattgacagtacttgctttgtaatatctgtgcatgtgcccagcacagagtgggatcagggaacatgattgttctcattttctctcttcttattaggcctttgagtaaaagcactgggtctccaaaaagagccctgtaaaaatgccaaagtgttatctaggagggatgtcatagtcatcgcccataattatcttggtttggattgctaatttgataaacaagacagggtcactgggacagagtagcagaagcatggcattggtcggtggggaagggagggataatgtaatttgatgctggatacaaagaaataaataccaaaaaagagctatgaggtgcctggtaggtagggagaggtgaaacgtattgtctacttctgtggtcagcccaggctggcttggcttttgtattctccccccaggttacagctggcgggaaacttgtgccacctggtagcctgctaagcttgtgggagcacacactgtggactcatcctgagtttaaatctgtgcatggccacctactggctaggtaagcttggacaggtggctctattttttctgacccacagtttcctcatctgctaaatgagggtcctgtctaataggacgtgggaagactaaacaatacgaatggggaagcaccgcgcagaacggcaagatgctaagcaaactgtggaggagagcgttttccagaagaggaaaagggaacatagaaacagcgggtgacttggcctaaagtcatggggtagacagagccgaggccatggctgtctctcctccaggctgggcttctcagaagcttgctgatacttctctggtatccctgccccgccaatgaagttatacattcccttgagatgggctcatgtccccgggaggctcttcctctttcccctcatccagccttcttttttctcaattaactaagctttttgttctcttggaatctctgtcgtcaccactggcttatagaggatctgggcttccctgccccatctccctatagccaacagggtctgcttagttcccggcccttgaaactcacccatgaatgcagcagcatatattcatgatagtttaaggaaattccttaatatcacctcttctcctgactgctcctgattctctctcacctctctgactccaaacttctgggccacacaccaaatgccatgcccacttctactcccctattttggggtaacttccaaactccctttcaggaattgtgtttgggacctgtatggcttttaactttgttaactcatttaatctctccttcctggtgccagatggaggctcatttggatggaggcagggaggagatggaggtcctgaccctacttggcaggatgtgtgtgtggcccacttaggacagctgcctcctgccagtgcaaagattctttctctgcatatttactcattcatttcataaatagttttgagcatctactccgtttcaggcattttgcagggtactggaaagaccacaaacaaggcagcccctgcctctatggagttagaatctagaggcagggaccaaggcatcagcaacacagctaaacagagccgtgctgagagaggctgacaagcagcaccgaatgccaacttaatggtggtcagaaaagacttcctggaggaagccgatctcagctgagacacaaaggatgacatgtgcaaagaggatggcatgtgcaaaggcctacagatatagcccgagggtggaatacaggtgggagcagagttaggtggtgtaagcaggtgcgagaacatgggagggtttgtaagcatgcggaagagtttgacgttcaccagtggacaatgggatttgcattttggagatatctctgtggctgctgtgtagagactggagccagccactgaggccctgtggtcacaggtgacttcagcctttgggacttgtattctttagagaattccccacccacccatagcccccgcatgccccccttccaacttgctaccttaaaaagcaatcgccagccttctttcccttccacactcggcattttgtgtgtcccgggctttgtccaatcagcactgtctggcttagcggtgctcccgttctccggctggggcatgataatgcgtgttgtcctttgtttcattgttcaaatatgtgtctgcgatgtggttgggactgataagtaaagaaaattgtgtagcttaacagcagacatttcatgacctcaggagccccccaagatgcgtactcccagcaaattgtcggcaagcccatttatcaccgtgctgacctgggactttgtgcacatttccctatgaaaacagcccagtgccgtcagttcccatctgccccaatgccactgtaatgaagcgagctttaactaaccctggtacccactgagcggcctcatcacaaatggctttcgagatgcagacacctgcacgtggggatgcatcctctttctaatggtggatttgtgtggacatccaatacacattgaagctttatttatttttggcttaggtaattggagagcattaattatttatattccatgttgcaagcaggcagggaaagggcaggaaaggggaggctgggaggggaacagcagacccattgagatcatggaaaggagctaaaatattctgaaccttggttacatctgagtaattgtgtgcagtcactccagataatttttgctagaaatattgtatgtggtttcccataaactgttttgtgtctgcatcaaggcaaaatgaaaatgtatcattgtttgggaatccccttggcagttcaggtcctgctacctcaaaactcattaccctccatcctcacaactttagtgacaaaagcaaactgcaatatacttacgcctgccaggttctgtgctgagatcacagtaaatgttgcactcacttgaacctcgcaacaaccttgtgaattgtctgttgaattattatccctattttacagatgagaaaactgaggctgaaagagattaagaattctgcccaaggtcactgccagtgaacggcagagccagaattcgagcctgggcctggctgatgcaaactttacagcctcttttttctggcggggtggggggatgttaatactccaaactgaagacagccctcctgcccccgagaactcgggagtcccactggggttttaagctgcatggtaggatcaggatggagaagtggatagagttccctctttcatacttggctttcttcatgagctgtgaagctaaaggttaccctgttaattaaatggggggtggggagaggggggctcttggaggatcagtggcaaagtgactccaattacgtccttaatgagtatgttaagccatgtaaatcacatgtcttttttttcccctttgggaacatcagcttcccttggtgagcaaatcattggcccaccccatgtcagccaagcctttgggaaactagaaagatggtggatttattctgaaaatgcaaaagtctaaatgatgcttgagggtttaaaaaagagaaagtaagaaagaaaagaatgctttcctcaatcactggtgttttatgtgattttcagatttaacaaagcatggagactaatttaagcattgtttttctggtctttcattaacagaacttgatttctttttgaaccttctcatcactcccagtcactctctaagcactcagccttgctcttgggtggtgggtggagtcctgaagctctctcttctccttccatctcttggatttagatagctcttggctgcttggaggggccttggcaaggttgagagggaaagaaggaatgcagcactagaggcctgtcctttctaagtggaatggtgaaggctgtcagcagaaggactccaagactgtctggtctgagcggccgttcattcctttggcaaatatccacagagctcccgtgatgctgcaggcaccatgccccaggattcaccttcactatttaatttagttctctccaaaactcttggaggtggacttatggccctgtctccattctaaagatgaagaaactgagactcacagagggtggttactcacttcaggtcacacgaatcttctgttgtagagctggtatttgaacccaggtcttgtttgacaccaaagtttgagattttttaatctacccagagttggagagaaatgactgagcactctgggctgagacaggcggctcaggattcagtgggaagaagtgggagccctggcccaactcggggctaggaacttctctgggacgctctcctggtctactgtaaacaggagacaggaccccactaggtgaggccccaggatgtccacagcttctccctgccaatcctttgtggagctgcttttccaccctacccatttcctgccctgcttcaggggggcagacagaggtggtcctccctgagtaatggggacctttctgagagctatagaacatgcagaggcagccttaactgcgttataaaggtggcaaactttttgtttcgcttcctcctctgggccctttcctccctttcatcttccctttcatatggaatttcattctgactctgctggtttccatctaagccctgcctgattatatattcaacacacgcttaaataatgttaagtgtgccctgcactattctaagcactttacaaatatgaattcatttaatctccataccaactctactaagtagcagttattatctctattttacaaataaggaaaccaaggcatggagaggctaactaccttatccagggtcacgcagtcattatctggctaagctgggatttgaacccaggggatttggctctagcatctgtactcctggccactacattgtgctgatgcttctgatgactcctgttataggatattctcatttttttctttgtgttagaaagaaaagcatgtaaaacataactaatgaaggtataatagatagaatgacatgccataggaggtagggactctgtgtgtccttcatgacattcatccctgcagccagtgtttccagggatcatggggaagaagaagggcaggctggtgtatatacttgtttgcagttttgagcccctattctcaaggctcagcttgggttccaggatcaattgtttattttttgtttgtttgtttgtttgccaatgaagagaatcatggatgtgtgcacagagagcagcttgacatcaaatctttctttagctagtctgaaatacagggaacccatgttgttggggctagagggaccctgggacacctctgttgcatgggaaaggctcccctatctcccttttcttttgcattcctccagggcattggcacagcaattggcacacacgggcatgccagtcacctggaggccttttttaaacccaggttgcttgaccccacccccagagtttctgattcattgcagctaggtgagtcctgagaatctgccgcaacaaggtcccaggtgatgctgctgctctggggactaccactgcattagcagcaggaggtacttcagttctggaccaccttgtcagctaatttgacctcctgaagccattgaaagccactgggttgtggggagtttaaatgatcttctaagtacacagactatgttctctacacccatgccaccaatagcatttccttccccttctcacatgcgtttaggtgctttctccgttattacaagaccctggagacacagaggacctggagtcatttatttattgtggctggagtatctttcttccacctcctgtaaatctcttctagctttccttcatctggttgtgtcccatttattatttatcaagaggctgctatctcaatctcaaggtgccctgagaatgttctaagggatagggattggggagagggtatgtggagatttcctttccacctgggtgaggagagggccagagatgtgacttaaccaagagcatagccagctgttggatctgccctacttggtgcatcttcatttagatagccaagggctatctaaatccaagagatggaaggagaagagagagcttcaatttgtgaagcatcttcacaactggcatctcgttttggtacatccccatgacccctggaaacactggctgcactggggagtaaatgtccccattactcaggtgcatctatgaagcagaaagggcatgcatttgctatcaagattgtaaagatgaagaaattgaggctcaaagtggtgaagtcatctgcccaaggtcacacagctcatgctatagagtagagcttggaaagaaaaccaggggtctttcgagctagctgcaggtgtttttttcatatcccagtggcactggcacaccagagagacagaaccattcactcccctggaaagggagctgaagccagggagacaagtggtctagctcagcagctcccacccccacagagcccagcaagctaaaatccactggcttgaaattcttgctgtcagcatagcagtctgaagttgacctgggatgctcaagcttggtggggggaggggcatctgccattactgaggtttgagtaggcggttttcccctcacagtgtaaataaagccccgggaagttcgaactgggtggagcccaccacagctcaaaaagctgctgtagccagactgcctctctagattcctcctctctgggcagggcatctctgaaagaaaggcagcaaccccagtcaggggcttatagataaaactcccatctccctgggacagagcacctgggggaaggggcggctgtgggcacagtttcagcagacttaaacgtctgctgaaacgtctctctgaagagagcagtggatctcccagcacagcaatcgagctctgctaagagacagactgccttctcaagtgggtcgctgacccctgtgcctcctgactgggagacacctcccagcaggggtttacagacacctcatacaagagagcaccagctggcatctggcgagtgcccctctctgatgaagcttccaaaggaagaaacaggcagcaatctttgctgttctgcagcctctgctggtgataccctggcaaagagggtctggagtggacctccagcaaactccagcagacctgcagcagaggggcctgaccgttagaaggcaaactaacaaacagaaaggaatagcatcaacattaacaaaaaggatgtccacacaaaaaccccatctgaaggtcaccaacatcaaagaccaaaggtggataaatccatgaagatgaggaaaaaccagcacaaaaaggctgaaaattccaaaaaccagatgacctcttcccctacaaaggatcacaactcctcaccagcaagggaacaaaactggacggagaatgagtttgaaaaattgacagaagtaggcctcagaaggtgggtaataacaaactccttccagctaagggagcatgttctaacccaatgcaaggaagctaagaaccttgaaaaaaggttagaggaattggtaacgagaataaccagtttagaaagcataaatgacctgatggagctgaaaaacacagtacgagaacttcgtgaagcataaacaagtatcaatacccaaatcaatcaagtggaagaaaggatatcagagattgaggatcaacttaatgaaataaagcatgaagacaagattagagaaaaaagaatgaaaaggaatgaacaaatcctccaagaaatatgggactatgtgaaaagaccaaacctacgtttgattggtgtacctgaaagtgatggggagaatgaaaccaagttggtaaacactcttcaggatattatccagaagaacttccacatcctatcaaaacaggccaacgttcaaattcaggaaatacagagaacaccacaaagatactcctcgagaagagcaaccccaaaacacataatcatcaaatccactaaggttgaaatgaaggaaaaaatgttaagggcagccagagagaaaggtctggttacccataaagggaagcccatcagactaactgcagatctctctgtagaaaccctacaagccagaagagagtgggggccaatattcaatatttttaaagaaaagaattttcagcccagaatttcatatccagccaaactaagcctcacaagcgaaggagaaataaaatccattagagacaagcaaatgctgattttaccaccaccaggcctgctttataagattctgaaggaagcactaaatatggaaaggaaaaaccaataccagtccctgcaaaaacataccaaattgtaaagaccattgacactatgaagaaactgcatcaactaacaggcaaaataaccagctagcatcataatgacaggatcaaattcacacataacaagattaaccttaaatgtaaatgggctaaatgccccatttaaaagacacagactagcaaattggatagagtgaagacccatctatgtgctgtattcaggagacccatctcacatacaaagaaacacataggctcaaaataaagggatggaggaatatttaccaagcaaatggaaagcaaaaacaaaaaccaaacaaccaaccaaacaaacaaaacgggttgcaatcctagttctctgataaaacagactttaaaccaacaaagatcaaaaaagagaaagaagggcattacataatggtaaagggatcaatgcaacaagaagagctaactatcctaaatatatatgcaccaaatacaggatcacccagatttataaagcaagatcttagagacctacaaagagacttagacttctacacaataatagtgggagattttaacaccccactgtcaatattagacagatcaatgagacagaaaattaacaaggatatgcaggacttgaactcagctctggaccaagcagacctaatagacattgacagaactctccaccccaaatcaacagaatataccatcttctcagcaccacatctcacttattctaaaactgaccacataattgaaagtaaaacactcctcagcaaatgcaaaagaatggaaatcataaaagacagtctctcagatgacagtgcgatcaaattagaactcaggattaagaaactcaatcaaaactgcacaactacatggaaactgaacaacctgctcctgaatgactactgggtaaataatgaagttaaggcagaaataaataagttatttgaaaccagtgagaacaaagacacagtgtactagaatctctgggatacagctaaagcagtgtttagagggaaatttatagtactaaatgcccacaggagaaagcaggaaggatctaaaattgacaccctaacatcataattaaaagtactagtgaaacaagagcaaaaaaattcaaaaactagcagaagacaagaaataactaagatcagagcagaaatgaaggagatagagacacgaaaaacccttcaaaaaatcaatgaatccagaagctggttttttgagaagattaacaaagagatagactgctagccagactaataaaaaagaaaagagagaagagtcaaatagacacaataaaaaatggtaaaggggatatcactactgatcttacagaaatacaaactaccatcagagaatactataaacacctctacgcaaataaactggaaaatctagaagaaatagataaattcctgaacacatacacccttccagggtaaagcaggaagaagtcgaatccctgaatagatcaataacaagttctgaaattgaggcagtaattaatagcctaccaactaaaaaaagcccaggacccaacggattcacagacaaattctaccagaggtacaaagaggagttggtaccattgtttctgaaactattccaaacagtagaaaaagagggaatcctccctaactctttttatgagaccagcatcatcctgataccaaaacctggcagagacacaacaaaaaaagaaaatttcaggccaatatccctgatgaacatcgatgcaaaaatcctcaataaaatactggcaaattgaatccagcagcacatcgaaaagctaatccaccatgatcgagttggcttcatccctgggatacaagcctggttcaacatacacaaatcaataaacatattccattacataaacagaaccaatgacaaaaaccacatgattatctcagtagatgcagaaaaggccttcgataaaattcaacaccccttcatgctaaaaactctcaataaaccaagtattgatggaacatagctcaaaatcaaaagagctatttatgacaaaaccacaaccaacatcatactaaatgggcaaaagctgggagcattcccttcgaaaacccacacaagacaagtatgccctctctcacgactcctattcaacatattattggaagttctggccagggtaatcaggcaagagaaagaaataaagggtattcaaatagaaagagaggaaaccaaattgtctctcttttcagatgacatgattgtatatttagaaaaccccattgtctcagcccaaaatctccttaagctgataagcaacttcagcaaagtctcaggatacaaaatcaatgtgcaaaaatcacaagcattcctatacaccaataatagacaaacagagagccaaatcatgagtgaactcccattcacaattgctacaaagtgaataaaatacctaggaataaaacttacaaggtatgtgaaggacctcttcaaggagaactacaaagcactgctcaaggaaataagagaggacacaaccaaatggaaaaacattccatgctcatggataggaagaatcaatattgttaaaatggccatactgcccaaagtaatttatagactttatgctatccccatcaagctaccattgactttcttcacagaattagaaaaaaactactttaaatttcataaggaaccaaaaaagagcccgtacagccaagacaatcctaagcaaaaagaacaaagctggaggcatcacattacctgacttcaaactatattacaaggctacaataaccgaaacagcaaggtactgggaccaaacagatatatagaccaatggaacagaacagaggcctcagaaatagtgccacacatctacaaccacctgatctttgacaaacctgacaaaaacaagcaatggggaaaggattccctatttaataaatggtgttgggaaaactggctagccatatgcagaaaactgaaactgtaccgcttccttacaccttatacaaacattaactcaaggtggattaaagacttaaacgtaagatctaaaaccataaaaactctggaagaaaacctaggcaataccattcaggatgtaggcgtgggcaaagacttcatgactaaaacagcaaaagcaatggcaagaaaagccacaattgaccaatgggatctaattaaactaaagagcttctgcacagcaaaaggaactatcatcagaatgaacaggcaacctacagaatgggagaaaatttttgcgatctatccgtctgacaaagggctagtgtccagaatctataaggaacttcaacaaatttaccagaaaaaaacacaaccccatcaaaaagtgggcaaaggatatgaacagacacttctcaaaagaagacatttatgtggccaaaaaacacatggaaaaaagctcatcatcactgataattagagaaatgcaaatcaaaatcacaatgagataccatcccatgccaattggaattgtgatcattaaagagtcaggaaacaacagatgctggagaggatgtggagaaataggaacacttttacactgttggtgggattgtaaattagttcaatcattatggaaggcagtgcggtgattcctcaaggatctagaacaagaaataccatctgatccaacaatcccattactgggtatatacccaaaggattgtaaatcattctactataaagacacatgcacacgcatgtttattgcagcactattcacaatagcaaagacttggaaatagcaaagacttggaaccaacccaaatgccgactggataaagacaacgtgacacatatacaccatggaatactgggtaaataatggaacactatgcagccataaaaaaggatgagttcatgtccttttcagggacatggatgaagctggaaaccatcattcttggtaaactaacacaggagcaaaaaaccaaacaccacatgttctcacttatagtgggagtcgaaaaacgagaacacatggacctggggaggggaatatcacacactggggcctgtcaggggatgggcgtctaggggagggatagcattaacagaaatacctaatgtagatgatgggttgatgggtccagcaaaccatcatggcatgtgtatacctatgtaacaaacctgcatgttctgcacatgtatctcagaactcaaattatgaaaaacaacaaaacaaaagggtgtcttctctatgactttctgactttctggcatcaagatagtacaagcaaacagtctatcactcaatcaacctctcaatctgtcagtgttcattgagagcctcctatttgacaggctgaatgataggggctgagagtgagctatgaacaagttctacattgcatctgctttcaggaaacctacagtctaggagggaggctagacactgagagaagaattactaaatgggatgagcatttccagaggggaacatgcaggtggtgtgaggcttacagcccagagatgccttctcaccttgggcttggatgagtgttcactgaaaacatgttttctaagctgaaactcttattcaaggatgaacagaatttgggagatgaaggacagggaaaaggcattccagacagagcgatcagcatgtgtaatcacatcttaccagcatatgatggtaggagagcgtaggggcacatttaaggaactgaaagacctgtggatctgaagcaaaataagccaaggggagaatggattgagacggggttggaaaaagaggcagcagccagatcatagaaggtttggcagatgatcaaaatggcttggggcatttttctaagggtcgtccaaagccattgaagggcttgtggtggtggggtgttgtgatcagagttgcatctgctatatagctgggtggccagagtggagtcagggagaccggttaggctatagtgggagtccaggtaggaggatgatgggctcatctctggtagtggcagtaaggagtgatagcagggcatggattccagacatagatgacctgtaggcttagttaagggtatttgggaggtaagggaggaggcaaggataacagtagtgagtgcagtaatagggactcaaggagggtatacagacctgtatatatgtgatgagatgtatgccttgagtctgggagctgagccctggagattcaagggtcagtggcactggggggctggcactgtgctggagtttgggtgccttccctttctttcatggcccctgcctgcaagtagctcaccttctatgaactgtattttgctcatctttgttgttgaaatgctgtttcacaattatttgctctttcaaaaacatgtgactttcttactatctttagaggagaggcactgcaggtgagcctcatcaaaagcacttgcagaaatccatcatgagccaattagaaaacttaggaaacatgtctgatatggaggaatctcatgaatatgattctcctggcaatgcaggcagaacttttttccagcagcgtgcatacctcaggacagctgaggaggaggttgctgcagcaatcgactgctcctccctttctgcgctttgcttggcatgagaaaggaaccgtggcaggtggggcttcgagacccgcttctcagtctgatgtgaagacgtggggaatgatagaaatgcatattccaaattcttttcatttccttgtagacaggattgagcaaggatcttccatttgtttacacacttggtgagtgagtaaaccactcacacgcttagaaacaaaccagtccaccataatgaaactggaaggaacatcagagatcctgcagttcaacagatgcttctgagaaatggagaagaagtgaattaagagtcagtttaaactcagtgaaaggaaactgaactggaatcagaagaaggtaggcctgaagtttgcgtcgggtacatacttggaaagttatgtaagctcttgagaataattccttccttgcctgcctttggcagtttgctgtgagggtgagatgaacgaatgagcaaagccctgggtcagggctttgtaaatagcagtggcagttctttcctaatggcattgcatcagtagctggagagcaagcagtaaggtgaggtcctctgagtcagtctactacgcccacgttactgtctttaaaagttacattgacctatgggcggttgtgtttttcccatgtcactgtctttagaagtgatgttgacctatggactgttgtgtttctcccatgtcactgtctttagtagtgacgttagcctatgggctgttgtgcagtttggaaaaaaacaaaatatgggtgacttatatgcacactagaatggctaattaaaaagataaaaaaatgccaggtgttggcaaggatatggaacaactgaaagttgcacacactgttggtgggagtgaaaattggtgtgactgatatgaaaaactgtcagtatccactaacctaaacatgtctgtatactatgactgagttattccattcctaggtacacacccaaaagaaatgaaggcaaaagtaatctgctagaatgttcatagcaacattacttagccaaaatctgagtagtattcatatactcattaaagatagaatgaagtctgtttatacagtggactactacacatcaatgagaacaaactaagctacatgcaacagtatggatcaatcttgcagacataatgttgaacaaaagaagccagacacaagactccatacgtacgatttcacttctataaagttccaaataggcaaaaccaatatcaggtattaggtattaagataatgtttacccttggagcaagagcgtgaccataatagaatggagcatgagggggcttctaggatgaagttgatgttttatttctttttctgggtgcagttcagtatttgaaaattcattgagctgtacacttatgaattatgcattgtcctgtcttctgttatgcttcaattaaaagctaagctaacaaggaaaacaaaacagaactcaagggtgacctccacggtgcatggcagggtgctaggtgggcctgccctcctccccacagcctgccataactagatctctgaggatgttgctgcctctgaaggtgttaagcagctgctctctctagccttgtactgtgggacgcctggccttggctttgatgctgtggctgctggtggaggggtcatagtcgatggacctgcctttcccttctctccatctcttcatgttcacctgccccaagccctccagccctctcagctgcatcccaaatggaagccatgcttccctgggtcctcagagctcaactctgcctcctttgcccacctgctgcagtccaggttcccatcacacagctgcctctgtactagcccagcatccatcacagaggaccagagtgcgcagctggaagatgacctggctctaaggcgtgcatgctcacatgtgtccatgctgggggaagggccgagactcacagagcatttcctaacagaaggctcacatgctccaaggtgtcacttggatgaacagtttataatttaattgttatcaatttattttgttgcatataaggaaggaatataatcagtgcactaaacccttgatattatgtatattattgcttaggaggatattaactttttaaaaattagttgatttaaatttgatctaaagacaaacattaagtattagcatatgtgatatgaggatatggcaaaaatcatggaggtggaaatttggaaaactgaggctggaaatggtgggagaaacaacataatgattctaattcctaacactgatgacttgagagcccatgaagtgccttaagagagaggctttttttttttttttttttttttgcccaagcatgagaagttaagataatgaccatgaccattaacccttattacaaatgaaggagcagagcccctgaggggcagtggtgagaatacagggcttcaaagccaggccagcctggaatcacatcctgactcctcattttcttgctgtgtgacactgtacaagtcacctagtgtctctgagcaacaggtttcttacctgtaacgaaaagctttatacctgcatcatggggttgttataaggcttagaagagatgttcaagcccaagagcctgtcagtctcctaccctagagagaggaggggacttgcataaggtcacacacagaggcagatccaggcctgcaactcaagactcactgctcctagcccatgctctttctctgaggagccatccctcatgctgctctgtgagtccttgttccagtgacacagtgccagtctggggggcggggagcgggtggaaatcacgccttggtacgtggtggtttactctcatctctgctgggctgatccagctgctgatggtgagagaaccagtgcttttaagaggccttcatgcgtgatcccatggaacagtgagttcagtctggccagcctcataggctgccagccagtagggagacccccacggccctgaagagcaattaggggctgaaagaaagggaaggaatgcctctgtgacgccaaacccagcagagcgtggctggtctgcacaggattgtgggttgggtaggagctggagagcctgattcctgtcccaacaggaagccgcccataaggcccttctgcggctgagcatacaggagaggcctctctctctctgttgttctgcgcactggccagaaactgctaggtctggagtccagcctgttctgcatggcaacaattacacagaagattacattggaatcgtctggccttgtaggaattacccagatagttacagtgcctgtgaaagtcttccctttcattcctgttctctccatcactctttcttcctatgcctgctctttctctccatccctctccccttctgccattcattgatccattgattcaagaggcatgtggcacatcaggggcttgaggcagacaggcctgagtgtgagcttgtcttctccttttaatatcaggtggatgagacttcctctctcttggccattgttgtaaatctaaaagagtcaaaaactgtggtcaagttacttaacccttgtgagcctcagttttcctatctgtgatttcaactgtttcacaaggttataatatttaaattataatatatgcaggatatttacctcagtgcctgacacacagtaaatactcatttgtattttttaaaagatgggatataggcaacttcatatggtttatccattattttggtagcttcagcaaagctgccataccaaatctctttgagcttttgtatctttaacctttatacagtgacagtgtctaccttatagagctgttgtatagattaaatgagctaatatgtgtaaagtgctactggtaagcacccaaccactggtggctatttttgttcattcattcattctacagatggtcatggactaagaaccgtgtgctaggccatgtgtgaggtgctgggagtagagagatgggtcaaaaagctctcaccttcaaaaatttactgtcctgtagggttcagaggtaagaggcttgagaatattctgttatggggaaagcagtgaagcttccaaactgctggactgaaacttagcatcttaagtggggagagcatttattgagcatctactctgtaccatgtacaacacacatgttatttcattgagctcttgacattcctctaaggcaagtacgatgtgaggaaacagtggctcagagattgaaagtggcttgccaatgtctatctaactgggtttcattatcttttactctacacagctacttcagggagcagagaggtagaaatcagattgatctgactgtcaggagtttcttctcactgagtcacccatgagttggtagagatatttggggccaggggagacttctgacaggtttagcctttttgcttgggacgggccatctgtgattgagaaataactaggaagttctctaggagctgaggcatgagctgagaatcgtagaataatagtatgaaatctctttagatccaagcccactccccaaagatgacatgttaatgaaggatcccagaaaaccacagggtccccatttcctttgaaagggagtgaactgaaatggagttgtatgctgcactgtgataaactaatgctcttagaattttagctattctttgtatgagctgctttggcagggaaattagatatgcggaattttgagctctggccttattcaatttttaattaatttttgtgtaataagctgtaagcacattaatatcaatgagatactttctgcacggtggctaatatacagctttaaggagccatgggtattgttttcccctttatttgtgttgaataaagattactagttctctaagtattatttgctgcttcctagaggcatggggaggctgtaagagaggaattaaatatttccagaaggttgggctgaaatgctgtcagagatatttctttgagggccaagagaagagcactatgtgtggcattcatcaaagatttgactgtcgaaattaaaggttcctccacattctaagaagcggtcaaattagggatctatagcaaataagccatagaatttggaataggattagttcagtgtttttttgtttgtttgtttgtttcgagacggagtcttgctgtcttctaggctggaatgcagtggcgcaatctcagctcactgcaacctccacctcctgggttcaagtgattctcctgcctcagcctcctgagtatctgggattataggtgcctgccacacgtctggctatttttttttgtatttttagcagagatagggtttcgccatgttggccaggctggtttctaactcctgacctcaagtgatccgcccacctcagcctcccaaagcgctaggattacaggcataagccaccgtgcccggccttagtttggtgtttttataagaagatctaagcaagaatttaaaaataaaaatatttaaagtatttaggttaaattggagtaattttgctatgtccccataatatgttgatattatgggaattcatttattcttccattcagtcagtcattctatggtaacctgggcatatactatgcttgaggcattttactaagcattatttagtacacatttgtggaatacaaccttgtgtttataagactacgggctattatggaataataaggcaaagtggcaaggctcattatagaggtgcaaattaatgctggaatagttcagtgaagagattgtttatagaaaaaggttaagaaagtgacttttgaactggacctttaaggatgaatagaattgagtctcatgcagaaggaaagaaatgttattcttggagaagagcagagccaatccatatctaagaagagtgtagatagagtcaccaaatccaaggacaatgacaaacatgctttaccatggacattgatcatgctcttcccttcttcatgaatgccttttccttcttccagctggataggtactctgtgccctgctagtctctctttcattccatccagagacagcctgcactaattcaactggcttgtcttacatgcgtgggaactgagacctagagaattagaggggcatgtagccagtggttacagtctggactagaaccatattctctgtttattttacgtggtcctgccccattatgtcacagaatagtggccaagaaacattatacaatggaaaggttcagtgcaacttccattaaatactaaatttggggacagggatgattctggataatggaggattatccagaaaaccattatggttttaacccttcttagttctgatctctttttcacacgtgaataggtagaatataagactcatattaaatccctttttggttattgaggatgttaaaggatcccaggcctgtaattctgaacatcaattcccaaggctctttattattgatgtcaagacccatatatctactaaaagttatcatccaaagccctgaggtgagattgttttcttatcttttgccttgtttcaatgacacagagaaagagggaagtagatggtatttgagttactgagagttctgatttagcaagatattatgggatatttcctgaagttgcgctgtttcagagaaatgcaccatttggacaactctagctcagtgattctgagttgtggtgaaaggagacatgagtttgggattggagagattctgggaatgtgggtctcagcaaaatttgacagcttcctgcctggcctctccagtgctcctagcgtctcaagaaaccagcttgcctcacagctctagatgtaaagtgttgtttcttccccaaagaaggggtcagatgggtcccagggagtttccaggatggggaagtgcggctggcagtctccagaggaatccagcttccccagggcatttaatggctttcttcctcatccctcttctctgaaaatttctgccatcacaacctgatactccttgaaggactccatgaagaaataaaccagggatgctccttggttacagaaaaaaaatattcgcctttttgctctagtccctaatttacaaagatattcccttgccaagcacaacaacatctacccacagtggttctactaacaaggagggactggtcagcaggaatcctagtctctcataggaaacttgccaagagaggaatatgttttggggttcagggagagggaaaccaaataggccatagccattgagaacctcttttcaggcttagagtaaacagtcccatcaattttttttttttagttggggggcggggttgtcatcaatttattgactcctcccacaactgctgttttggcaggaaaatttatgtctctcttgaggacctatctgactctcagccctaccacactacccaggaacctaatgatttatgcagtgtgaagaatcttcatactttctcctctcatcagagggagcaatggcatttgatgagttcagtgctgctatttgcttcacacagagcatccatttaagactggtcttggcacctctctcactggagaagagtattaaagaaaaacacaaattaaatccctggcatggcaccctgctacagtgtgactgagacttcttagcagctgaccgggacactcttagcctccagatttcctttgactcaatcaatgaaaaacgacccatatcaaaataagcttttcctccaagggaacccaagctgtggctcctttgttcagtcccctctgcacacatctgtcaaagaaatcaagtcatgtggctactctgagtctctttcctcccctgcagaaagaggatggcaatactctcacacttgacgtgggctataaatgagataatgcatataaagctctatgcagctcctggcgcacagcaggcttgcaattgtgctggtccttcttccttctgcttccctttctttcttttaataagaaatagaagagcacatgcagctaggattactgaggagacacctgttatttttaacctgaacctttgcctagttataggagggcagcatgttaagtgtcaaatagaacccagaaaaaattctcactttcatcttcagaatccaggtagaaaactcccaagggaatccagcctttgggacacatgacttgaagtcaaatggcttcctggctgtggcacaaatagttgttgttgttgtttttaatttctgggatgggggtcaaggcggggcggaattgcaatctcccacagccatgccaacagtgtattatgaagatttagggtatttaccattctaacatgtgaaaaatggcattttgatgtgattttactttttattttttaaattatgagtgaagccgaatatcttccgtactcaaaagccacttgtatttcactgtctgtgatctgtcagttcattgcctacagttgtttcttattgggttgttgatcatgtacttattgatttcttaaactttttatatattggagagctaatccctttctgatatgagtttgaatctgcatccccccgctagtttgttttttgtgtttttgattgtgtttggggtattttttttaatgtagccaaatcaatcattccctttagaacttccggattctgggtccaaattagaaagaacttctttaccctgaggttgtaaaaggattctccaatgatttcttctgctattataatgggttttacaaatacgtttaaatctttgagatctttcatgtttttaagaaaacccagaagtcagggttttttttgttgctgttgttaaatatcccaatttttaatattggcaacgaatttaaaacacacatacacgcataccatttcccaatttgtttaaaagcctctgccctttgtctgtcagtgtctgtggcttggaaggggtagcctagtggcttatctcagtactgggctttgagagacactggaaattttgccagctgcaaagtggggctgaaccaattaatgtggggcctcactgagaattagctccttgacgcattcaagctagtgtaccttcttggctgcatttaattggtttcgcatccaaagaggtaagtgcttatccctgctattacttacactgaattcagatttggattacccgagttaggataaatgcagcttgtgttcttccttctaagtcttttgagatcactggtcaatggtgatacttgaatgcgaaatttaataccttgagcaggaattaaaccttgagctctatttgttttgctctctttggggaagtaccttagcagtcatctttcctctatgccacctagtcatcttcctgtcataaaaatttctaagcagagaatcagggtgggaagagaagggctgatcagtaggactgactgttaacttgtgaaatgagcagaggtgtacaagctgattgtgggaaacttctttcccatgtgattctttcttcatccatatcaggaaagctgttgcctaagaaccttgacgtgtgtgcattatgataatgtacttggaggcaaaggtaaggttagaaacgccttcctgctagctccactacacagccaaggaattcaaaactgggtacctctaaaacagagaggtcacctggggagaaggggaatggggaagaccctaaatggacctccatccttttctacccgattgcacaagctgattaagccctctgtgaagcctttctagaatcccccaggtgcactcagagtcttctgcttctcttgccagattgggagctcagtgagtccagaggtggtggtttccaggtgtgtatccagctctaatcatagttcctggagcagggctggtactctgtgaattgaaaacttgtgccaatgcatttatttactgggcacttcttggcacggccaagggggccaggaccaagtctaaaggtctccagtcacttttcagttaaccaatcaataaagcctcactgggctattacgggagtgtccatacacttcatagaagaaaaaagactggcctgggggtcaggagattttggtctcaatgttgattctgccagttacccagtgagtgaccttcggcagtaggactccagtctctctgaacctcagtttcatcttctctaataggaggaagttagaccacatctctccacagtctcttcatctctgctgttcttcaagtctgttggtttaaggttgcagggaggggcctctgctcagtgatggcaaatagaggaagaagggagcactgttggctgggcactcccaagtgctggacactttaaagattgacataacattttcattttagttctcaaaacacttctaggaggtgggcattttgctctccatttgacagatgatgaagaatctaaggtttgggaagattaagtcctgagaccgtgcaaccagtttgctgagtggcctgaagtcagcaggatttcatcaggaaaacacattgtcttttcccaccagggcctccaaactcacttccctgtcacttggagaaacatcatttccagtcccttttagctattagaaaaaaagtggcagcagcctcatcttgagtaattagaaagtctagcccaatataaatggaaacttcaatttcacattcagtttacaaactttatccctctcatcagctcaaacctggtctagagttcagggagcaatggtgggcatgaggagaccctggctgtcctttcactcttcagttccacttcttacccacctgtccccttacccccacccctctcagttctggctccctagggcagagcaagggaaggaaggaatggggcagaggcctcttcatgcagctgatgctctttgcacttttcgcttggccatccaatcacctttgctggggcagtttcctagagtcagctcttccatggagtatgtggcaggctttctgagagcctcggcatgtggtctctgcccctaaagctgacccgtttggtgtcttctccccttcttcagtcccctctcgcatagcctcctcaggctgggtcctcttgagacagttcaaacccagcgaccctcactggcattccctgtcccataagtacagtgcacccttgccctgcgaggaggggagtgagcagcaagcctagctgctgacgccatcccctcacctggctatcacggcagcttcagctcatgggcagcaatgtttattttacacacactttcaaacacctggagacagagcaagttctcaagaactttctcactttggcctgcttcactaacaccagggagttgtttttgcaagtttctggagctctgcacacatccagttaagaagatatgatgccagtctcccctgccgtgtggatcagttgacagttgagggtagagagcatcacttttctttgtcccctccaattcatctacagatgtccgtggaaaggtccgctcctcagagaagctccagcctcctctgacacagcctcttacccagggagggtgtttccaggctagctttgccatcttccagtaagtgctgcaagtgtgtcaagcagccctctagaacatgggctacttgccaccaattatctttagcctgaggctttagccaagattcagacacaatagaaaaaaactcccttcatggcctgctaaacctttataatgtaaatctgccttattttagctttgttaaaggcaaaatagacaggcaggtggaggggcatctcatccctgcctggaagctgcccacagctagtttccactgctgtccctcagccctggtctgatggtaccagggataaagagtgcatcccttcaagctgtgctgagttgctgctggttaaagcccgaagtgggaatcggcacagcaggctgttgcttcctggagcaagaaggtaagcgaaggtaagcagtcattcttctagttctttgctgcgtttaacgactgctgaagctggaagtgtgacagggcactgcagtgtacccatcttagtgtgccgcaggaggaggtcctgggggtgggcaagcatgctatgctgagaaatgagaccaaccactgagcacagaagccacaaaaagaccctgcctccatggttttcaaattttatttctgtttcagaaaatattgttccaagaaactcttacctggaattctgttgcactagaacagtttttctggccaaagtgaggttggggctgggtgctgaccccatccttcttggtctccttcctctccttgtggttctgatagggctgtaaggaacctttggaatttacagagcagagagtaacaaacaaacaaacaaatgcctggtgtcggaagatagaatttagattaagagcaaatttgcaggactgggaccttctgtagagtctatcaagatgaaatatagtaagccaagatttgcacatataggtgcaaggtagagagtgctggcttagcagcagctaggaaaaacacagcttttggattttgccataacacacatcacattttccaacatacatcatagtgtgatctggttgtcgaaagtattgataagactgggtgcggtggctcatgcctgtaatcccagcactttgggaggccaaggctggccgatcacctgaggtcaggagttcgagaccagcctggccaacaggatgaaaccctgtctgtattaaaaatacaaaaattagctgtgtgtggtggcacaggcctgtaatcccagctacttgggaagctgaggcaagagaatcacttgaacccgggaagtggatgttgcagtgagctgagattgcaccactgcactccagcctgggcaacaagagcaaaactccgaccaaaaaaaaaaaaaaaaagcattgataagcttgaattcacattctgtgaatgtgatgaaaacccagaatccttctgtagaaattgccactttcctctcctgtggcccacccctgtcatcattgttaattgatgtttattgattaggggagagcatttgaactaacccataggctgatcagcagctgctaggacaaactgcagctaaaacatttcatgactgagttggtggtgattaagggaaaagatcatattctctccctgtggaagtgttgaatttaagtcatagagagtatgttgggaaaaaaaccacaaatggcacactcacaagaaggcaggcagaagccaaaaggcgtcatggacagtgaggaggtgaaagccaggatgaagcagccactgagaagacatggagcatggagagcgaggcagtgggggagtgggtggtatggagagcagcagaagtcaaccaggaaggagctggggcccccaaggtacagctagggtgtccctgtagtggagactgcactgaattctagatttccctgcaggtttcaaagcatgttccagtactaatccattccagggtttctgtgaggcccaggttcttgtgttctttaccctcatttgaatctccccaataactcttaccgcagctgaggagagctgctgctgtcctctgaggcaattcttacttttcaaaatgcctcaaacccaaacacaagagtccagctcacccagaaccacagtgtcctgaaggcactgatgttaaccccattcctttccatattgctcaaactgtggccagctcctgtcacttcagttttcactggacattgacaagctggagtatgttctgaggaagagtcctgggagttatgctgtatagaggactttggggcagagacaaggaaaagataagagttcagacttcaattctgtcttcaaatgcctgaagggtcaatatgtagagatggcactatattttgagaggatgcctctaaagggcagatacaggactgaaaaatggaatgtttgtggaggtcagtttcagctttctaactggaagtactctttaacactagaatgtgttacttcattaagtggtgagctccccatcaaagagggcaagcagaacaggatgctctacctggaattctctagaggaaatttctgcatttgatggggcaccaacaaggtaaagcccaaggtgccccgcaagcatgagatccttggctttattttgtgccttttaatagcaaacagatatctggtcctgctgacctgcctaaaaggaggaaatgaaacttgttgactattgctttttaggactgaatttggaaggaggcaaaaacaaatctattttcagagcagcaaatgccagcacaatttacatcaaaacccccatctgctcaactgaaaggcggtggtatggaccaagcattttgtgagccagcaacaggcttgcttgttgaagaatgttagctccatggggagtctctgattaggcccctgaagctaactggggcctttatattaacttcttgcagttgtgaccactgttggcaaattgtatttcccccaattcaaaggcagatcattgcttttcaaaagatctcacatccaattgaatgtttaaagtattatatgcacaaataaaatctgtattagagaaaagtctcaaaaaatagaaatgtattagagtaaataatgctggctgctgtaagagatgagcctcaaaatcgcaatggcttaacacttcagcatctggccaataggcaaaggaagagagagcaagaagtatcatgcaggaagtgtaggtgccaggcttggaagtaatgactattttgcacacactccattggtgcaaacaaatcacatggcctctgttggatgaaaggagagtggaaaatgagccaaaaaaaaaaaagaggagaacatggatattggtgaacaccagcagtctgttataagaaacagaagatgtggttttccatgtgtctcaagagatggatactacaaatttatccatgaaattggaccaaggcatcagattttacacacagtagatgctcagtggctgatgaggtacatattaaagatattaaggcatcttggtccctggagggagaaagtggcactggggttcatttctgtgtgattaggtgatggagaactgaagcatttttaaaagcagaattcatatgtcagaatggccaatgttttattattgataattagaaaaaggagaatgaagaagttggagagcaagaaaggaagtgaggagtttttcagtgtatccttgagaagaagaaaggagctgagttgccaccagaagcatggaatccagagccagactggacatgaagctaccaagaatgaatacacagtgatttatccccagctttggggcacatttcttttttagctcctttagaaaataagtattttaacagctcctaaggcattttcctcttttgcaaaatcaaattactctgaactgggaggtggagtcaacaccttggctttgttataaatgagacttcaaatatcacaaagatgttcgttaacattatacatggaaatatcaattgtcacgtgaatctctcatatttttatggtcaaaagaagcacaggaaagaagcaaaaggttgtggctttttttttttttttgccaagctcttttcagcaaagataaaaacagcctttattttctcaaaatatgtctcaacttctcacactgatatccagttctttgaaatcttttctttcctttataattgataaataattatatatatttacggggtatggtataatgtttcagtacatatatacattgtggcatgatcaaattagactagcatattcgtcacctcaaatatatatcatttctttgtggtgaaaacatttaaaatcctctttttaaactattttgaaatgtacaatacattattattaattatagtcaccatgctatgcctatctaactgaaactatatcctccgaccaatgtcttgcctttccctgtccacctttcccaccccaccaccagcttctggtaaccaccattttactctttcttctatgagtctggcttttttggattccatatataagcgagaccatatcgtatttgtctctctgtgcctggcttatttcacttggcataatgtcctctaggttcatccatgttgtcacaaatggcagatgtttctgtttttttaatggatgagtaatattccattgtgtatacataccacatttaaaaactctattcatctgttgatgggcatttcaattgtttccatatcttggctattgtgaatactgctacagtgaacgtgggagtgcagacatctctttgacattgatttcaattcctttgagtatatacccagaagtggattgctgggtcatgtggtaattctatttttagtttttcaaaggacctccatactgttttccaaaatgcctatactgatttacagtaccaccaacagtgtacaagcgttctctttcttccatagtctcaccaacacttgtcatctttgcctttttgataatagccagcctaacaggtgtgagatgatagctcattgtggttttaagtttcattttgctgatgattgagatgttgagcatttttcctatatctgttggccatttgtatgtcttcatttcagaaagtattcaagtcctttgcctattttttaatacggttatttgtgttcttgttattgagaaatttgagttcttcatctattttggatatcagctccttatccaatgtatgatttgcaaatatttccccccagtctctgtgtcgtctcttcattctattaattgcttcctttgttgtggagctttttagtgtgatgcagtcccatttgtttatttttgctttcgttgcctatgattttggggtcacatccaagaaatcattgcccagacaagcatcatagagcttttctcctatgtttgcctctagtaatttttcagttccaggtctgatatttaagtgtttaagtctttaatccattttgacttgattcttatatatggcataagtcaagaatttaatttcattattctgcatgtagatgtccagttatccgaaaattgtttatttaagagactgttctttcccccattgtgtgttcttggcatctttgttgaaaagcagttgatcatagatatgtgaatttatttctgggctctgtagcctattccattggtctatgtgtgtttttatgccagtaacatgctgttttgattactatagctttgtaatacattttgaaatcttgtagtgtgatgccaccaagctttgttttttttcctttggtcaatattgctttggctatttggggtctctcatggttccattgaattttaggattgtttttcctatttctgtgaaaaatgacattggaattttgatagggatttcattgaatctatagattgctttgggtagtatggacattttaacaatactaattgttctacttcatgaacataggttagaagacatggaaacacctttccgtttatttgtgtcatcttcaattttttatcaatattttatgcttttcagtatacagagctttcatttcctgggttaaatcttattttctttgatgcttttataaataggattgttttcataatttcttttttcaaatagttcattgttagtgtatagaaatgctactggtgtctgtatattgattttatatcctgtaactttactaagttcttttataagttataacacatttttggtggagtctaaaggattttctatacataagatcatgtagtcagcagagacagtttcacttcttcctttactatttggatgccttttctttctttttcttgcctaattactaaaatgaggtaggcaagactgtgaaagcagcagtgcatttctagataatgtgatctatcacaaaggaaactgaccactcatgagataaagctactactatcaactcatttaactggaaggtcccaggttcattagtttctgattacttaaggctaaccagacaaatacttttttccaatccttggaaaactttcaactcaaaacccactatcttcccaaatgtacatggtaatctctgcttgatgactgaggatttcacagtgtcttggtgtcatcctttaaatatttattcctatcaatcagattaaacctgtatccaagtgttaatatatacaatctgtttccaaccccaccccacactctgcttcccttttctcttttccatccccttccttctgtcctcttgtctttctttgcaccattattttccagcaaaattaactctggaaaatactggggacaatagtcttttatacctttggctgaattccttctttaggcagttaaagctcacaaatgggtcaaatatccaaatgtctatttgtaaaaaggttgttgcatttcatcaaatctcaaaaaccattggttataacattcactatgatttatgtgccactcagaaaaaaaagttactgccaattaaactatgaaacgatgcattctcatcacttcaaatgtttctacccattataaagttttcttatacttaactagacataactttctatcatataactattgtgcaagcataaaaaagacaggcaaaatacattgaataagtattcctcaaacatctccaattagaggctgagttttcagaatcacttctgagtcattgatatgtgtatttttctccataatatcaccctctgtgccaacataatcactggtgatttaatgtctctggaatgaattcttaaaagaatgaaaagccttcactggggctaggttccaagccgcctccttggcaatgacataaagtgcttctacttttgactctggcctcacctgacttctgatccactatcacccatcccttgttctatagtcatttcattctcagggttaaaagaggagttccctgtggcctcatcgttgtgctttaatgtgcaccaaggtactctccatggactgtcttgtcaatccttaacagcaacctcatgggtactattgttatcccagtctacaggtgaagaagctgaggcttccgaagattaagtagcagtcatcaaccactgtgtgtggcaagacagggagcaggggaagcacaggtttggatgcaagcagccctattctcaaatcttgtctttagcccttgtcacctgtgcaatcctggggaacttattctgtatctcagagtctgttttaccagctactatgatctgtttttaactcataacacttctaacaccaaatgtgagggttttccacaccaacaaccaattttcatactctccagacaccaaccattccaacaattccattcaattctgactctaactacccagtgacattgaccaatcagctataaattaggattttccacacctccttccttgggtttgataatttgctagaatggctcacagaactcaggaaagcattttatttacattgactggtttattataaacggtacagattagtagtccaaaggagagttgcataagatgaggtctggaaagatcctgattgcaggagtctccattctgtaaaattagagtgtgccaccctcctggcatgtggatgcattccaacccaaaggctctctaaacccaaaggctgtctaaacttagaagtttagagatttttttttttgtagaggtttcattaagtggcataattgattaaatcattggccattagtgattagctcaatcgccagcccctccctcctccctggaattggggagtggagagggctgattgctccaatcctctaattgcatggttggttcctctggcagccagcccccatcttgaagttttctaggggcccacaaagggtcacctcattatcataaactcaggtgtggttggaaggggcttgtatgaatagcaaaagatgctcctttcactcctatggctcgggaagttccaagcgttttagaaactctctgccaggaacccaagacaaagaccaaatatatatttcttattgtatcacaatatcataccagctaagtggcagtgatacacactggggtctataagagggtggagggtaggaggagagagaggatcagaaaaaaataactaataggtactaggcttaatacctgggtgatgaaattttgtacaacaaacctcctgaaatgagattaccctggatcatccagatgggcaccacataatcacaccggtccttagaaaaaggatataggaagagtcattcattttacttatgtaacaaacctgcacatgtacccctgaatttaaaagttaaaaaaaagtggcagtgataatattgacctcacagagaggttgcgagctgtggatgggataacctatgtaataggcccaacatgatacctgtgtttattttctatgtcccaatgtgctcattcacatatttggctccttaatcattcatacatgacatgatcaagaaatacatttttatgaatgaacactgtgactgatgcaatttcctaggtaactgagggttaattagaaatcctcttttgtttcaacccttgttaaaaatccttagaacatgtcagaattcatttttcttacatgcgctgagcgtgatttaatcttccattcattctgaacatcagtcctcattacccagggctgcaggtatagccaaggataatgtgggatattgagagtaacatacaaattggtttaaaaaaattaattacaagtacaatttttaaaagtaacttacccttttgaccagaccttcagcaaaacgcccatgtatttgaagttatataattaaaagctagataatagaagcattctttctttatgttcaattgccactcaaatgtttagtcgatcacacacgtaaaaaataatctttcagggcctactatgtgtcaggcaaatggctggtataccagatggacgtggttgctgtctgcatgaagctactgtctagtggggaggacagacaattagcaggggagatagtgggtgctatgggaagccatggcaagaatcccaactcagtcttaagttgtcagtcttgggtctagtgagggtggtggtggtggtgatggtcaggacagggaaggcatcctgaaggaagtgatggttaaaccaagtgcttcaggatgagttggagttaggcaaagggaaaggttgtaacctgtacaagggtgtaactagtattgtccaagctgctggggtcggtatggttggaatagagggtgggtctgggaagttgagaacggggtaaggagaggggctaggttatgctcctggctgattgtctcatgggagtcttatataactctagtcattcattcttgcattgaacatttatttggtactgaggatgctgaaagtactgactgtgttaggttaagtgcagtcaagtatggtaagggggtgagagatgggcacagaataccaagccatggctgtcttgttaactgttgaacctgactgcccagtctacacacctcctggcatcgactaggcattcagtgaactctaggtgattgactaactcaatgaatgaatggaggcttggtttaaccttcaccctccctcaacaactattcccattattttctttgtgcaggataaacatcttgaaacacctctgccccatcgctaagtaggccaatcttccacagcgtctagaaaccagtacagaaaaaatgcagtttgaccttgctgtcattgtttgcagtgtaatgaggaaaacaggcattaaataactaaccatacaaataattgtgtaattaaaactgtggcacatgatacaaagaagatgtacaggatgatggaagggcacataaaggagaaagcccaggaagcctttattgagatattgatgtttaactaggtttagaaggggcaaaaggaggtgggaagaatgtctcatgccgggggaggaatacgatgcaaaggccttggcaggacaaaaggccagtgtggctggaccctggggatcatctaggagaatggctggagatggatgggtctagagcctggaggagattcccctacaaggtctctcagccatgttggagattttggtttttgacttaagagtcctagtgagatattgaaatgttttaaacatgagagatatgtgatcaaatcacattggctgctgtgaggagaacagatcggagaggtacaagaaaggacactgggacacacacacacacacacgcacacacacacacacacacacacacccttcaacaggctgacaatgccctgtgtacagatagcagtaagagcatgaaactgagatctgattcagagaagactgaagtcattgcacgtcatttcttcctaatcttttagaaacaacccactccttcattctgtcttatggtgggcacttgtaagtgggctgctacttcttatttattttttaaccaattttgtgaaacaacagatgtggtgcttctcttgtggttgttattctcaaagagaggatgttggttgcagcagacaatttatcggagcccattttctcccttggcttcagcagggagccaggggctgggggtgctaagttgggcaggagtggaatccacccttctgtcagccgctggcttgaaagcaagcattagcacgtattcaatttggtctgggagctctcctctggacaccgaacctggtccttatctatttttcccattaataatgagctgttaaatcacattgctcatgccatttgcaagatagcaacgtgtggtttaattgtgcctgctctgttcccccatcatctcaatcctcctcctaatggcttggcaggcggggcagggctgcttgggaaccactggctcaggcctgccatttcctggtctagcaatctccagttttagaaacagggactgctgtggcggaagtggagtggagctccgaatgtgagggccctggggaggggagactgtgtgcactcacacctgcactctccctcctccccatcatcccagaggccctctcagaaatcctaatggttgaggaaagggggctggcctggcaagaggctgggcctccattcctatttcccctgctcattgcctgaggctttcaaacagttcccgctcctatctggtttttgctggcggcacaggcaagttgctgagttcttgtgataaggctggctgatacataaggataattacgtctgtgggtttggaatcactcaaaaccaaaggtgaaatgactcaacacagaggagggctttccccagagaggtgactcatgcgctggtggtggatatggctagaaaggaggtgcatttctcaaatgtgagaagttgacctttctctgctgttgctgggagagcccaggtgtgggagagctggccaggatcagagggcagggctcaggtggcctgcagaagcctgcagtgatgttgggagatggtggcatcatagcaagggcccagggctctggttccaccctgccaccaactggctgtgtaaacttaaacaagtccccctgtggctgccttggccctagagtcccaacctttacagcaagtgtgacaataggctatataaaaagtatcattctctctcttccagtagcttcaagaatgtgcttgtttcccttgactaaagcagcttagaagtggattgtcctgtgtttttggtgttttaatttcagctgccccttccaccatcgggagaaatgtggtcccttttaggataagatctgagatgcagtcccgcccaaagaggtccccctacctacccatcaaggtgtctgaaacacccacatttagatctaactggagagggaggccaggtaacgtagtaaaaagagcttgagctttgggaatgagacatgaatcttgggcatcatattcctcataccacttccttcttcctgaagtcacagttaccttgtcctgctgccacctatggcagcatccttgctagaatctctgagctgaagccctgggacagcatggccttcatgccctctatgccaggccttatccttgctgagttgctcctccactgcgacacttggatgaaatgctacactgcaggatatggtttctgaccttctcagtggccaccaatggtctgcaatgacggagaagtatacagtcagctctccatggagttggaccaatgagaaggaagaaacttgaaagagatgggcagtgcatccccactctctctccctgccatggaccactctgagatacagtttgtccttgcaaatcttttgcagaaagtcccacatgctgagcaaggacacctgtcaggtgacctgctgcatctgccagcagcttgtggtaaagcagtggccagcacactaaggcatctctttgcatccttttgctcctttcttcacatgggttttcttctctcctctttctcactgtcctgggcttgcacttcccaaagagtgtttacactgctcaagctctgctttctacaagacccagactaagacatctggcttggaatttggatctgccccttgataggtgtgtgagattgagcaaattcttcacatcttctaaaatgtcagttttcttctctgtaaaataggcataataacatctatgttttagagttcagaaaagtagatataattgtatcaagtacttagcacagagcctagtatagatgcgtagtgagtgttcaataagggacaactcctcttattattattattatcgttattattatttttttgagacggagtcttgttctgttgccaagctggagtggagtgcagtggcgcaatctcggctcactgcaacctctgcttcccaggttcaagtgattctcctgcctcagccttctgagtagctgggactataggcaccagccaccatgacaccacgactggctaatttttgtatttttagtagagacgaggtttcaccatcttgggcaggatggtctccatctcttgaccttgtgatccgcctgcctgggcttcccaaagtgctgggattacaggcatgagccactgtgcctggcccttattattatctttatggttgctgctattgttgtttgtggtagaaatggctagctgtctccaaagatttgggctccccctccacagtgaagagttattgctcagaagccctgcccagccaggaactccattcctcaacctttcttgcatctagggaaagtcatgtggctaagttctggcaaatacagcgtggatagaagtgatgtaatgcctcttccagatgggctcataaaatgttcttgctgtggtttaaccatgtgctgaagatggtgcagcaaccatcagcctggatccctgaatggctgtagaaccggccccccactgcccacctgctcctcccctcactctatcattgaactctgtatgaacaaggaatgagttccctttgtgttgaaccaccaagagtttggatcttacctgttaaagcagctaatactaccttaataattacattgttattgctgttgttcctttattattattattactaattattatattattactaattattataaaatatagaataagatctcccctgagaggtcgttttcaggcttttctagtggttaactgtgtagactctggagttagaatgcctagatgtgaattccaactccatcacttagccctgtgaattacttaaacttttttataaataggcatatggatattatgggacttggagaaagaaatctatatgaagaataggaaaatgtctggcccagagtaaaagttcaataaaagttaactaccacaaccaccatctctgctatcactgccatcatcatctccatcttcatcatcaccaccatcattatttatcaatggagaatcaggcactgggtgaatgggaggtggactgtggtctggtcctggggttgaagagaggcatgcagaagattgagaacatggtgcacaggtgcaaaacagacagtcaaacacgggaagaggaaataaggaatgtggtcctgaagatagacagggccccctttgaatttggtgaccagaaggctacatttttctggcaggtggtttttttttagtcctactggccaacaaagatcagaatacatcctgcaggtagagcactgtgctggacactgtgggagatacagtgaagaaggagctgagggaggggactctgaactcctgggaggcaccaggcatgggactaggcactttattcatgttaacttgtttaatcctcatcacaaaccttatgaagttgctatgatccccactttatagataaggaagctgatacaaggtacttgatggaattatgccatattcacatagtaaattttggagctaagatttgaattttaactgggtagggactctggtctctcgagccacatccatttgccaagggtaattcagcagaatgtcaagatgtagctaggaaaaagcagaaagtgttaggagactgatacttgcccatttccactagctggatctagctctgtggcttttggcagccctctttattgtctctgggcctctgattttttttttttttttttttaaataagagagaaagggagatggagggaagttacatgtgccaggtaccatattaggctctaaacagagcaaccatatcatttaatctttccaatagtttacaaggtaggtgatgttattatccccatagtacaggtgagaaatactgaggcagaaagcgagattaagtcacttgcccattctctgttgtagactcaacttcttagctatgtcatcctgtcatatgtccttgtgtcaacaatgtctttgtggtgcaaagcccaagtcattttgctttaccatgctgtgcatcttcaagactttttccagatcttagtttgctcagtctcatctatagaatttcttcaggaaacaacacaagaaaaacaacgatttgattatctagctctacattcacctatcctcactttcccagactaaggtaatgaaagtggaaccaagtagcctcgtttgaagcacaggatcagggatcttagttctcttggctagaaaacccctccctcccaccaccagagaatcatagctatgggttcctagatgcctccatgtttttaaggattggggaggagcaatttaaatacaaattttgcatcctttcttccttccctcccagttccttttagtatatgttctgtgacattaaccaaggctcagccgacacagagaacaaggccagaggttgtttgggtttaaatgaaagttgacacaactcaaggtttatctgcctcagtgggcagctctccagagaatggagtttttggacatgttggggagttttctgcctcttaatgagctccttctagcctgccaggtgatagcagggggttagcaattgctttaggggattcgataacaagaatgaggactgcatctcagacggtgtgcctgcctgcctgcctgcctgccgccagagtcatcattaatgcaaacagctgaaccgctgaactgcttggagcacctcaaatgtgggagccagagcctggtggggagggagaaccaggtcattgtaaaggccattgtccttttgaatatgaccatcccattacagactggaggtctcatgacccccaaacaacagtgtggaacagatgttgatgtagcctgggaccagggaaaggggagccaagcgtcagcctggtctctctagtgccatgaaagtcctccaggcacctgtgattctacttctctccaaggaggggagacaatagtgaggaaaagaacattgcatgaggaagtgaggttactatgctgcctgctggaccagaagggagttctatgtatcccctccccggaatcaagaagattttgccccactcacaacttgggatactgagagccactgttgctcagaggcctgcggtaaaagaggtttatctgctttctaatcctaacctgaatccttttccaaatgaacaaaactagttggaaacatgatactgccaatctcttccagattacttgagtcatctctgaaattgagtgggctggttcttttcaagatagattctccatcagtctgtcctatgaacccaaataatcattggcatttgcaccttgcttcgtggtttccaaagcatttccactcaccctcatctgaaccggttgtgtggggtgaaggttcagagcctgggctctggggtttggtagagttggtttgattccagctccaccacttcctggctgagacaccaggacaaacgtgcttaacctcagcttcctgctgtggaaagtgaggatagtaattcccacctcacagaggtttgggggaaggcgagacgatgcatttaaagcccttagctcacggtctagcattcagtgagctgctattgttattaccctgaattcttacaacactatgacataggtggggtaaatatcaagcactcctgacttagaatgtaagcctgcctcatgggcagagaccgtatctctttcacttacccacagaataagtcacagaaggtccctttctggaccgggtagaactgggttgacttgtaagacgtgctgcttctggagaagtgctgcttctgtcttccttagccttgacgttccatcagcaggtccttctgctggattcttgcagtgagatatgagagatgaggcacagggacccccgcctccatgctcacccccagctcccaatgagcagctcagaacacacaaatccagaccctcccaccttcctctctctcctctgaccaaacacgcaccctggtttagcttgagctgttgcccaccacaagtggttaaaggaagaagggtgctgtcatggcccagccctgccctcaagggacacacaatctggtaagggaggcagacatggaaacagactataataattagggagctataaaagcaccccaccctgtgcccctaccccaccccccatcacactccccctgaattcttcctttgccctcagtcaggcgcaaggtgggggccagccctgggaggtggcggtccctgcctgaggaggtgtgggcaggcaggctcagcatagaagtgctttccctgagcacagcaaccctccccgtggggttggtaccaatgtattctgcctgtggctgttacttctcagctcccacctttcaaactagaccaggtttcaaacctgagtgttaccttagcgctctcagcaggcttggctctctcattgcgtggattggaatataagcattatcctcagaagcaacatcagaaatgcagatggccaggacatcctgggaagtctggctcctcccaatcccaagttcatcttatactgggatcctggcacgtggttcttcatggggagaccatttgctatttagtcggacattttgttttacgaggtctgggctgtaagtattcattatgtgaacttgagttaagttccctaacctctctgattctgagtttcctcatctgtaaaatgggattacattccttacttcatattatgagcattgaatgcaatgatatatgtagggcatgctggatattgcctaacatatagttagcacttaataaatgccatccgttttctcttttgttcacgtagtgattagtttgataaataaagactctttggcaatgaagttatggtctgtgaaggagggagagaggagagccagaaagtcaatgtgctctctaagagtgattgctaaggaaatagagctgtttagagtgcagttatttatttgtaaaataaaccacccagtattctacacagtgtgagactattttttttttaaactgtgaaatgcaatttgtatagcatgatctatggattattaaattcacttagccttgagcaaggcctgaaattgagcgattatttttggttctccacactccctcccttccagccccagctcctggttctgttaagccatcatgaacctggcctccagtttggggagcatgacccagctgggctctgagctgaggaaagacaagtgtggcctggtccacagtgatataagtgatgtagagggctcttgaaacactccccaagagaagattctgacgaatgtggaggcctgatttgaaatgtgggagccaagcccggaaggcggagtttgcagtgagctgagatcctgccactgcactccagcctgagcgacagagcgagactccatctcaaaaaaaaaaaaaaatgtgggagccgagaaggaacagccacaggcccacaggcagaatgcattggtaccaaccccacagggagggctgctgtgctcagggaaagcacttctatactaagcctgcccatacctcctcaggcagggaccgccacctcccagggctggcccccaccttgcacctgactgagagcaagggaagaattcagggtgtgtgtgtgtgttgtgggggtgggggggtaggggcacggggtggggtgcttttgtgacttcctagttattatagtctgtttccatgtctgcctccctcaccaggttgtgtgccccttgagggcagggctgggccatgagagcaccttctatgtccgcagtgcctggcccagagcaagtcaatggctgtgctaaaaacaacaactgtggactccggtgacccccctcccaccccctggcccttccttctgcaaatctttctggtgctctgccctccacctgaagattcgtggcttcattcggttatggtgagaactaaccagacatccatagcaaagggcagcaaagagcctttattcacttttctagggaaagacatgacaggaagggatgccgatctgaaaactgtgttattttcaattcaccactgggacctcattttaaaaaatgaactgcctgagtgtttggaatgggggaaaagaccttctgggacaacagtgacagcctgaacaaggaatttggaaatccatgtaccactgtacagtggagctgcaggggtgagcagccgcatggtacacatggatttttaaaacccctcttctgagcacctggggagtggctcaacacctaatttccctgcacagcgtatgatttgactcctcagtggtgacaggtcacttaaaatcagcagtattcagacctgcagggccacctattcccttcccctctcatttttctctttgtcagtgtctaaagaccagctccttgagccatggagtgctggatgaaaaccatttggtagcaggaaaatggctaggtctatccttttctcaccggaaccagcctaggcaaatcactggtgctaagccctgaagtcatttgttacatcctgtagcatgaatggcaaaaaactttccaaatccattaatggcttattcaaaacagcacataattcagaacctttgccatttcccagctgacaaaaatgtcctattaataaaaatatcagaaaccacacatgtatagtttcactttgacttttgaattaatgtctgatctcctgagttttaaattaacaagatttccctgcataacctatacaacttcgtcattcacaactaaatcaagcagctgggttggcttaatcagtttggtttggcagggacgcgtttgtgtagagttttcaccaaatggcatggattttcttccctacagaacagggttgtgcgtgtgacaggcttgtgcttggtgtttctgaagcctcctcattgaagccacctgtgcattatggtgccaactggtgggtgatcctgtgggtctgctgggtgaggtggaggtgtgtagcagcttctgaatgaggtacagagttacttttagggaggatgaaacaacttggaagcttctgatcagagtggccacttagtaaatcaccacccagtagggacttctctgattaccttcccataatatactggcatagagagctttagctgtccccaggttaactccaccctgggtcacatagtatgaaagaagctgacgggacagagggacatagctctgtctgccccttgtttgtatctgcatccctccatctccccgttgttccaaaaccgagtcccaagcctgctgcctattgtctccacctcctctcatttctctgcccctccctcattctcttctttcatgactccaagatattcctagagatttacttgtatcccccaagcagcacagagttcgtcacatcacagaaaaggaagcagatctcaccctaatagattcattgtccgtctatacctctccccaaatggtacacattctctctccttccttccctgcatcctttccttctttccaacagatatttattgaggacctactattattcagctctgtgctgggctctaaacaaacagcagtggggcttactgtctaaagctggagacagagattttaaaaaccaagttcgcaaatactaaaataattacaggtgacttgggtattgcacatgagaagtgtaggatgctaggaggacaagtcacagtgagacctggtctggagaattgaaaggcctgcctgtcctgaggatgttttagctgggactgaacataagtctgagtttcctagcaggaaagaagggaagagggagagttctagaggaaggaacagcctcacagcttgtgcaaaggccctgaggcagaaaggtgttaagcaaatgtaaggacatggaaatagaagctggctggagtctagagagtgacagagcaacagcagctgctgaggtgggcaaggacagatcagcagggtcttgtaggccagaccaaaggtgggtgtctttatcctaagtgggagaggaggcattgaagaggatcaacaagaaatgtgtctttaccatgaagtatcctcataactacggtatcagctgtttcatcctcactacgtggttcacgtcattatcctgtaactatgcaacacctggtcagttctattaggttacaaaagtgtgtgtgtgtgtgtgtgtgtgtgtgtgtgtgtgtgtgtgtgtaaagattaatatttcttcttcatttcctttccagtcttttcacctaagtggataaccctccagagatcagttgaactaaaggcaaatttaagagattgcttttaaaaaattaagaatcaaatagttatggaagaactgccatgtgccaggtatcatgttgggccctgacatatggagacgaatgaggaagataaagacacagctgacaggttgggaagatgaccataaacaaatgaccatattgaccatgccctctctgtcttccaaaaagacctctaggacaggttccttgtctagccaccatcctcttccatagcccactgtctgggtgagaaatcctcctctctcttccacagtcctgtactgatgctccttgatttaccgttgggttacatcccaataaacccattgtgagttgaaaacatcctaagtcaaaaatatgttaatacacctatgctgctgaatatcatagcttagccttgcctactttaaatgtgcttagaacacttacattagcctacatttgggcaaaagtatctaacacaaagcctattttataataaggtgtgaatatctcatgcaatttttttgaatactgtattcaaagtgaaaaacaatgtatgggtactcaaagtactgtttctagtgaatgtgtattgcttttgtacgatcatataatcaaaccattgtaagtcagggaccctctgtatttcgactttcataataacaataagatagctaacacttaaatagtggttactatatgtaaaagctttttacatgtattaatccaatccacaacaaacctttgctatatccccatttcacagatgttgaaattgaggctcagagaagttaagtaattccatcaagatcacatgaacccaaaatcacatggctggtaagtgcgagttagggtttgaacccaggcaatctgactccagagactgggatcataactgggattgctacatgacattgctcatattcaactgtccactgctctgagttcccctctcaatttagacagcagacacctcgtgttttttgtgccctgtagatccccagtgctcagcactgtggctggctcatcataggtgttcaaaataaacaggtggatcccagctgagtacaaatgaggcaaagcaaaatactgggcaagatatggggcccaaggaaggagaaagcctttcaggattggaggcaccaagaaaggatgcgtgtccttaagaagggctattcttgggactctgacaaagtgctaccgggcagcaagatttagatcaattcaggaaaattaatctttaaccttaaactgatgttagaaatgtgtttaagggatccctgactatgctaacagtttttggaatgtgaatttcttccctagacaccttctggagcccccatgggctgcctggatcagcctgaaatgtatgtcatctatgtggccttgcccaaactgccccatctgctcctgaacctgcaggggcttggagagcagtctaacctggccttggagcggaggccatgtctctctgcacaatcctcagggcccccacagctctctcctcctcctgaaatccttccagccatgaatctaaacccttcgctgataaatcctttatccttttaaatgactctgttaggttttgtctcctgctcaaggccagagtcagccctttagaaaaaggaaagaggccatccagagccatccattggccttcctgtcactattgtgccttaattgaatgcctttatgttgggggaggccattacgatcatttttccttattaattgcccatccatttttgcctctgaatagccttcttgggcaattttggacaccatccgctgccaccgccttggacgtagattctgctcacggagatgtgctggctccaatgaaacaatggttaccgggctctgagtctgcaacttaaagtgaacactccccgtccctggaggcattgtgattcagagcactgagaggtgaaggctgggtcagactgcaagtcccaagttggagcacagggaagctggaagaagggctgtgtctctaaatggttaggtttcagcagctcagggttgttttgatgatactggggcctgtggtgtctgcagagggaaagcagtccgcctgacctcatagggttgggggccacagtcagctgcaaatagctgcctcaatgctggctgaaaaagtaggtccccaaggggagctaagaggacacagcctgtctgtggcttctattgaaggagaatggatgttttcttcaggcccatcaccctgagcattggaggttaatgttaattgacatttactgtgtgctgggcctggggctttagacgaagtgtcctggactggaagatccctgaggacagggatcctgtttgtttgcaagtttgttcattctgagcattcttattgactgctcactgtttgccagcactgtgctgagctgggaggcaagacagacccagtccttctgtcatggagcctccaggaaggtgggccaggctgatgatggaacagaccagagactgtaaccgtgaattaatgggacacgtaactgaaagtaaaggaggtcaatggctaaagataatatttctaaggaaagggcaattgatttgagaaggagctagcaaggggagtgttgggaggtgggagcaccttccagaaagagagaacagcatgtacaaaggtcctaagataagacaaaactttgtgtcttcagggagcaaaaagaaggtcctgtggctaaaacagtggttcttactgtgggtctctgggccagcagcagcagcatcacctgcgaacaggttagaaatgcaaattctcaggccccagcccagatttactgaatcacagactctgggggtcaggggtaggcagcaagccttccaggtaattcagatgtacctgagagctggagaaccactggacttaagcaagaggcagagtgactttagaagactcagagaactggtaggtcttggtagggccaggttgggtcaggtaactgccatagcgagattagattctaagtgcaattggaagacaccaaaagagtttcagcacttgggtgatataatgtaatatttatttacaaaaatgtttatggctgctatgtggaaaagtgatgggttggaaggttggagaccagcttggagtctgtttaccatatccctagcacctagaaccacaagtagtatatagtaggtgctcagtagctgtttactgacagaatcatcacattttaggccactatatgctctcatagcaccctgtaaattccattcatagtatttgctacatatgaaattgaatgaattgtacataatctctctcccattctgctgtaatttctacaaggcaagaatagctactagatataatgcctggcacttagggcctcagtgaatatttgttgaatgaataactgaatataaccacagcatctctatgaatgggcactattattatgccattttacatgacaagaggtaagtaaattgtctcaggatcccagagctaggaagtggaggagctagaatcagaactcatgctcttcaaaactatgataattcctccctcctttgtgcatttacctctgtgctatttaaggaaaaccatcagtagaattccagggtaatgtctgtgctggcgaaacagtcccagaaattgctcttgagcaacgcaccagaacctactgcatcaaaaggctgtggatatttgggggcctgcccggttgccatggtgtttgacctatagaaggcagaggcatccttcctccccagctgtggctaaagcctgaccgtgcatattcatggtggggccagccctgcagagggggagggaaggaggccaagccaggcagcactagcttcttctgctattcagggtttgagcaccaaggaggtataacaatgtcatccaagcaacctggattgctcccaccagctcctccaagacagttgaggacccaactctgaaaaacataaccggaagcccctgatttaccaatggaaagaggaaagtaaaagagcgtgcatttaaaggatacctgtgatatacccagtgttcctgggatattccttcatgtgatcttgaagcagccatctaaagggcactgactgtgggcaggtgccatgatagatgcacagtcactgtttcattgactcctcgaagtccttcatgaaataatgactattaataagtagtgtctattgtgtggaacaaccttgcagagtagctattattatccctacttcacagataaagggtgatgggcctagagaaaatgtccatcctccctaaataggagccacagagaggctgtgttctcacagctcctcccaatacctactttctttcttggccagcatagaggcagctgtttacagctggctttggcccccaaccctacaaggccaggtggactcctttccctttgcagatgctactgaccccagcatcatcaagtcaaccccaagtcactgaagcttaactttttggaggcttggagaacaaataaataacatgtctgacctcccaggtaaaattgttagaggtgggatttgaacccaggtcgtctgaccccagagctcatgctctctaccccattctcgctctccctttggtgcagtttcctgttatggctggactgctccttcccaggactagactctcctggacagatgctgtcatctgcttaacaggctgatgtgagggaggcaaacaggagatgaacccaaatcccttcagactagaggtcctgtggtgccatacttggacatgccttttgcttcccacctcttaggactcggctcttctgtaaagtacggtcaaggcagggtgggagtagttaacctattagatcttttcatttatttttaaatacttagtgagttttcattatttactagaccctgctcaaggctcagggatacagggataagtgagacagacaacatctctactctcatagagtttatactctaaatggagaagaaaaacaatagcaaaatttaaaaggaagaaaacaacagcagcaatgtcattttaaggaagtaatgataaatactgtgaagaaatcaaaatagagtaatgtgagaggaaatgcagggttgacatacttggctaattcacattgggtggtcagggaacacatctctaacaaggtagcttgtaggcaagaaggagccagttgtgtgaagacctcgggacctgaatgtaacgcagaggggacagcaagtgcagatgctctgaggcaggatctgacctagtgaggacgagaaagagaacaatggtcagggctgggaagagggatggaggaggggcaaagccagattgtggagggccttattgaccatggtaaggagtttaggttgaattttaattaggatgagaagccatttgagagagttaagcaggaatgacaccctctgatttgcattttttaaaaggtcactagggctgccacatgaagtgaagggtgaattgtagggagtgggagagaggagaacaggaaggccagtcatccctgcaggagatgccagcctggggtgtcaccagcaaagtggagaaaaggagacagattttgtaacaagttttggggcaccaccgtcctgggcagaggggagaacagagatgcacgtgacaaagcccccaccctgaagggtcttgcagatgagttgcaaactcatgttttgcccccaagaaataattacaaagaattgaagagaatgaggcacagaagtgggttgctgggacatgcacggaatagggcacaaggagttagagaagaaagatggcagggggtcctcccttccaagcccagttgccactccttgcctttcttatggcctcaaaacccccatctggtccccctcctatgatggtttggcagcaggcaagttccctatatgacaggcatcctgctttcaccagtctgcaagcccagccagacgactgcatctgggaaatggcagtctcactggcggaggaggtcctgaggagttctttgggcctggtgcccatagctgccatcctcctgaagcatgtggatgagaggtcagcccagtgacagccacactgtagcagggagtaggcagtgcttgtgctgggtgaccagccagctgtggctgctcccagagccccttcccacagatgtctggtcaaatgtagaggaagcattaggtgggggatcctttacttgcacacggaatgattcaccaaagccttcctgtgcctaagccacacattcatgtgaaatatgataaagtctagccatgcatatgccttgggaaattgcccaggaccattccatggctctctgtctcctacaaatgaattgtgataatagctaagatttagattgtacctactatgtgtcaggcacttgtctaagtgcttcatctttgttaacttatttagtcctcatgatgaccaccttttatagaaaaggaaaccgaggcacagagaggtgaagactccaagtcccagagctagtgagaggtagagtcaggatttgaacccaaaaagccttactcctgagcccatgcttttaaccagttctctacacatgtgaagaataatgctcagactcctgtgctagcatggggtgccccttggcccctcataccacctttctagtcatacctcctacctctctgaggcagtccttcatggctgttgaggtcaaatgctgagatggatgagtgtggattcaaatcccaatctgccaccaactacctgtgagactgtgcaggccactgttgcagagacagcatgagccacagcagggagtcttgagtgtgcgtgagcacaggtggtgatgtggtgcttggggctggggagaataaaaggagatgagcgtgggaaggcgggctggggtccttgttgctcaggcctagaaaatgctaaaggcagggaagagctacatcaattgtaacttctggttataaggaaatttccagttgtaagtcatagaaagcccaatctatacaggcttatgcataaagaaatgcattagcttgtgtcattgaattgaccgggggtagctgtctttgcaggccaggctaggtccaggggcaacacactatgcttttaagaccttgtctttttgcatctttcctctctgtgagctatgttcttagatactggtggcaaagtggctgccaacagccttatggtcaaaatcctcagtctcccagaacagagaaagtttctgccttagccagagtcctgggattagctctgagtggattgaacagacttcactcaggtgatttccttatacctaacccaatcactgtggcctgggggaggtgatcatctgatcagccaggcctggtcatgaactccctctaaggtagaatgagtggaggacagtcatctctattaccaggagaagagctaaagggtggcagcaagtaggacagatgtttccatagagccatctaagatgttcaaggaatggagtgggataatcaaccagtattctagagagaatgctatgatggttgtgtggaggtgagtttgagacagaggatatagggggtgtctacttgtgctagaaaagatgcattgggtataaatactggaaaagccttttggaatcagattgaggagccagggtaaggaatttaggcttttctctaggtcttgggagccacagaatgtttttgagcaagaaaatgctatagcctgagttgtgtcttaggatgattaatactgcaggagcagttagggtggattgcaagtggggagaagatgcccttccaagacttatcagcatggtgtagtggataaagcaagaagtttagacttggagagattaggattaaaatccttgttctgctactttttgtgtatctctgggcaagatacttaacctttctttgcctcagttttctcatctggaaaatgggataataacctgaaaggaatagtgtgatttagaaaatgtctttagagcactcagcatggtgtttcacacatagtcaatacacaacaaatactagtttctttcctttttcctttctcttcttgtgatccagggacctgattccactgaagagtttgaggaagtagctgctgacttagaaagaatgtggggttgggctttgaagtcagagatctgggtcaaatccagctttcttatttaccagttctgtgattttggacaacttaattaacctccctgagcctcttttcacatttgaaaattttcctttataatcccactttacctaacaaataaagtactcagcatgttgcccacctggcacatggtgggtgacccccaaatagtagttattagatttcatcatttaaaaaattcctttggtagcttcttcccttgcgcttcccaggtgagcaaactatcgcaaggacaaaaaaccaaacaccgcatgttctcactcataggtgggaattgaacaatgagaacacttggacacagggtggggaacatcacacactggggcctgtcgtggggtggggggaggggggagggatagcattaggagatatacctaatgtaaatgggtgcagcacaccaacatggcacatgtatacatatgtaacaaacctgcatgttgcgcacatgtatcttagaacttaaagtataataaaaaaaaattcccttgggttggagggaatccaagatgaacttcctagataagtaaagatctcatctggcagccctggggtagatgttttcctttgcctgctaggtggggtcctgtacactcatccccttctacatgcaatagacagagttgagacatagagcatgcttctggtgggattcatacttccaggtccttagaattaaactcaggtctgattttccaggaggggactattagcactgcagcagcttccgtctacagagttcaggtgctgcagttgtaatttgtaaccagcactttcccatttggctcctttgtggccatctggtccccttagtggagatctgttttgttggcaactacagtgctgagtaaatgccacgggaaagttgaaatttactcaccagagctcagtgcaccatggagattcccttctcagcctgcacagaatgatcatctcagaccccgcctcccctctccctggtccattgccaacactcctccacagggatttttatagtgctacgattattttattgccaagaatcagagtaattataactttcggagggatttcctaggaaaaaatgaacttgggtttatgcataagcacatgtgaaagaagaggtttgggacttgtgcgttttatgtggttttaggcattaacgtgagtttcatttcacttaaaatacttaataagtttctacccactgtgtaatttgttaataaggatgatgatgatgatagctgctgttaattgagaacctggtatgcaacagccagtaggccaggtattttacaagcatctcttctggtcagtccaacttggaagggaccgtttagatcatgtttcttttcaaatcatagcttgaaatccattagtgagtcatgaaatcaacttaatgggtcaaaactagcattttaaaaatgaaataggacaaaattacatggaacaaaatggagtagcgagtatcagagagtattttgagaataaagaagaatgttttatgaaccttatatctcggttatgaacagatgtgtgtgtgtggaaactagactgtgctggagtgcagtggcgcgatctcgcctcactgcaccctccgcctcccggattccagcaattctcctgcctcagcctcctgagtagctgagattacaggcacccgccatcacacctggctaattttttgtgtgtttttagtagagacgcagtttcaccatgttggccaggctggtctcgagctcctgacctcacgtcatccacccgccatgacctcctatagtgctgggatcatagatgtgagccaccgcacccagccgaaaaataaatttcttaatatgagttgtgctgaaaggtttgaaagccactggcttaactgagtggttctcaaacttcatcatgtatcataatcacctgaagggcctattaaaacacagaatactagactctatccccagagtttctgattcaataggtctgggtagggcctaaaattttgcatgtctaacaagcttccaggaggtacaactactcctaattccataccacattggaaaaccactggccgaattattcctatcttataggtggggaagctgagattcagagagagaatgaaagtcacccagggttcacagctggtgtaattaagagctaggattcagacacaacgtgccaccaaaagagtaaactatgctatgcccactttggttttagagataagctatcttcaatgagtgaatcagcaataattcctctctctatgtttcatgtatgcttttgtatttcatctccaagtcatatataaactgcctgagatagaagaagcactggagcttacaaggccaaagctcataatatttggatgaggacctaacacccagaatggggtagtgatgaccaggtttgagtagcacaggtttgaggaagagcatccttagcctccatcagtctttgagagactcccaacctcactctgtctactccttcttttgttctcctctctatagacacctgagtcttagttggagtcttgatacgtgcgtgctagggttcagaaagatcctgaagccaagagaaagcctcactgcccagaaattttccctatatcagctctgtttccaggtgggcctctacagagtccaaaatttggcactttctgggctgaggtattcagtatagtattcagaggatacttcttttcttcgatagtaactgagctgaaagagcaatagctatgggcttagacagagctgggtcaaatcctgtgtccattactatgtgattctgagccatttaccaaattattttccaggtctggatttgttgtcttttatataagactccaaatatctataacttcatagaaatattttgaggattaataatgcaaataaagcagcatggtgttagcttggtatttaatgggtcctaaataagtaatagagatcatgttcttcatccactcacaaatatttatcaagcacctactatgtttcaggcattgtgccgtgtctaagaaaaatacaaagttgccttcgagcagctcacaatctattgctaaactggcctacccgtctccactctaatcccatgcctgtgtcagacatggttaatcaattgtggtatcatttcacactgagctcaatgtgcaactttagcctccttctccatacagccattcagacagcactgccaggcagatggagtgagcacagactcctaacttctttgcttaccttagtttggtgagagaaacccagaaatggacaattactttggtgagtggccaatgccacgataagggaaagcagaggtccccaggagctgtgtgagggctgctaaattttctggagagggtgtggtgtctaaccagaaaaagctgagtctggaaggacaaatagtagttaattatgttcagaggcgagctggtgatgagggagaagggcaatccaggcagggaatacaaggttttggaggcaagagggaacagggagcacttgggggaactggaaggacagagtgtgggggcaggggctggggagagctgacacagtggcagtagggaagggctgggctgggggtccttcctggccatgctgaagtcaggggaccctcaccatgccccagggagcaggcaggtgagtgtctgccatgctgcacccggaaagaaggttgaactgatacagattaacctggagaaaagaagccaataggcaagaaatgtttctcctctgtgtgaaaatcctcgaattcagtgaaaatatttaagggataatggaggcatttctctatttcatacggtagtaatccaggtccctcaggatcaagcgcagaacctgattagtgctgggccagagcagcccagagcacccgtttccatcacgagctgactgcaggctacactctagtgggactgtttgtttaaaaaaatgccatccctgctttaaaaacctgtctttctccctgagccagagctctgttgctattgtgaggggctggggcccggaaaaatagctaaggccacactcttgggggtcattggctttgaattttagctgcagaagtttctcgttaataagctttagagtttcaggaatatgaaagaagtgagaggggatacaggatagatcctgctgatgagagcagaatgaagcaaacaggcaatatccctctaagagagggcctggcattcagacttgtcctactcctgggcaaccttgggcaagtcccttctcctctttaggcctcagttttctcatctgcagaatggagaagtgggaatcacactatccaaatttcctttcatctataatattccttgtttagacagtggttgcccaggagatgtggttcatagggatttcaatcagcaaatttgtcaggctctgtctgttctcatctgtcagagggatgtgccttgttaacatgccttgttcaaatttgctgctgtgattggagacaaactcgtgcaaaaaggttaggccttcctggcaggcccacacttgaaaatggactgcatccctacagtttgcatttaggacttttgtgttagactcagaatgcacttttcagggagcatttaatttgaagataactttcatggccaatgcacagaaaccctgtttagtctttaatggaattaaaataatattagctttatagaaccaagcttataatattactatttttacgggctagcctggagttgggctcttttgtgagctagcctggaatagcactgttttgaaggggctcctatgcagtagttctgtttctatggattggtctgagatagtgttgattattgacaagctaacttaaaatggagctattttacaggggagcctgggaaaccatctgtgaagggtcactttccactttccttaggtaagagggcactgggagtgtcattgctcctgaggttgtgtcggcgtggatgggaagggttcagggtgctcctgatccgccaaagaaaagacagccccctgctagaggagaggactacccggccatggtggccatggagatgttatcatttccattccaagattttcccatatctacaggtagagtcgaatcacagatcttaactttttcttttataaaatagcttctttgtattaaataaccattatcatcccaacagattttaattattttaattgttattaaataaatcaaatttaattagttcagagaaaacttctgtaatttccaattcatgatgaaagcctaagtaaaaatatctgacctttttgtgtgttggaaagttatagaaacaggaactcgagagaaagtcccctgattagggcttttgagaaagtgaccagaccaaatttatagctgaactgtaaggatgaaagatgatatagcataaggcatagtcatttgaggatccactatgggccacagtttattcttattatcccacttgatcctcaaaactatcccgtaatgtaggcatttttaatatcctttttacagttggggaaactgaggtttagctaaccagtagcggaggcacagttcaaattcagctgtctgattcctttgctctttctaatattttaggattagaaatgatctatgtcctaaggcatgagctcagaagggaatcagtagagaggaattaaccagttaaagtggtggatcagagagcaccaactgtttcccacaaagtgtgacactttctagagatgtaggggtctagaaatatacatgaatgtgtttcattaaaatgcggttcacagcacagagttcatttagttgaatttcttgtttccacgagaagagtgatgacgatgataatgttggtgctgtgtgtgtttgatattttatttaaatttttatagcgatgtgccagatgggaagacaggcagcatttataaaagccttgtctctgtgttgggtgacaggccaagggaatgggttggatatttcatttgtctgtattggtgggatttcccctcctgtgacctcgatgcggaaaatccatttgcacctgtccacaatcccttattttctctaccaaatgccccaatcgtgcctgtccctgagacgtggctggcagctacactcttgggagagatcatttctagtttgggggtgaagcctgcagtttctctttgcttttgtttctgaaagtctgtgaacaaggtaggaggtgtgcaggtgccaaagccagctgctgctcagagcagatgagcctttcttggaaattgtcccagacgatgaattgcttgcatgatgcagagagatgctctagaaaattgtccattcactgagaccgctcttcgactcttgaatgcactgacacttgcttattctacagctctacatagctaaggaaggagccacacacgagggctctgaagaagccacgggatgaacccagaggagtctgtcagttgggacaggtcatggacacatgcaaggagcggcaagggtggtgtgcagggacaggtcactgggcagatgctccctgtcccctgcttcagttatgcaagtgttggcactaattgttacagagatcttagaaaacacagaaagttgtaaagaagaaaataaattcactacgagtcttgctacaaaaatgggatttttaaatgtatttctctaattctgagaactctctctctctttatcagccatgattcactctttctatcttgttctctcttctctctctctctacacacacacacacacacacacacacacacacacagagagagagagagagagagagagagatagatagagagagagagatggatatctatctgtaatccaaattgggatcacattacatgtacatgtataattctctagctcaatttttcctcttaacagtagagcatccactttcccctatgatgttacattttcttcagaattaacatttttaatatgtcagatatgatatttaaatttttagaaaagccataacttgtctagtcaataaggcatatttcttctgtgagtataccgtaatttaacaaatctattgactactgtcagatatttaggctgtttttagtttcttcaaaataatattattttaatgtacatctttgaacacaaatcttggtggtaatttctgattatttccatagagaagatttttagaagtaagttaaaaaccatgaacttaagacaagaaaatcactcgtggtgttcgcaactgacttgctttctgggtacctttccattggaggtgaaataacttgttttatcacatcctggatggacagatgtttttccatgagaggccgaacattgaatttagagtaagttaaaggtaactgatgcccagtgttgccaaaaacatccgggaagtgttttgatccttgtgaggatctgtggacctctcagatctggggcgaatcagaatggcatcttgctgccagaatcagcgtcctgtctttggagcaggttgtctaagggcaggtgagaaaatactgggtgagagatgaactccctgtccttagttctgacaagagctgcagaagatctggcctggtcctggccagaaagagctttcagtctggcagtggaggctgggcttaatctgaactgaagaagtgggctgcagagaaaggcatgaagaaatgtgcttcatagccatggaagcatgaggctcagagaagggagaggccacatgggtgagaatcaacagcgagtcttccagtgggaggtgggcataaggaagggaggcttgggtgggcagaaggagctgatgagggtaatggtacatggaaggcaattagcatggctgagactgtcctagggagaggctgtggtcttagtggtagagcatggaggttcttgagtcagacaaacttggcttccatccccaactccactactcacttgctgcgtgatcttgggcaagttagtcaatgcacttgaacttcagttttctcatctgtaaaaatattttttaaatgcctagagttgtatattagtttctgagagctgctgtaacaaagtgccacaaactgggagatttaaagcaacagaaatttatggtctcacagttctggtgctagaagtccaaaatctaggtgttgggagggctacgccaccctgaaggctctaggggagggtctttccttgcctcttccagttcctggaaggcattctttggcttgtgacaacatcactctgatctctgcctccatcttctccctgggtgtctctgtgtcttcttgtggcattctcctttctgtgtctctctcctcttcttataaggacatcactcattaagagtcctctctactctaatgtgacctcatcttaactaattacatttgtaataaccttatttccaaataaggtcactttctggggattaggacttcaatatatcttttgggataacaaaattcaactcataacaggaggattaaattgaaataaaattcattgtctagtgtcagcatgtagtaaatctcaaaatttggaagctattattattattactgcatagtgaggtccttctctgatgttactgtattttgaggtagctttttatttctcattttttagaagggaaaattgaggtacaaaggggttacatgaaatatagatcaaataatggtttaagtgaagatattctggagacaaagaactgaggtttgagtccctgtggagctgtaaaattgagataaccaaacttaactcataggattatcatgagttcttaggttctcatgattaatctcatgattaaatgagataattcgtggaatgcacctagcatagtacctggcatgtggaaagtattcagaaactgcagtcctctggcattgcccaagtggcagagctggaagcaaaccctattatacaagagtgatgtcaaagtttctttccaaggaacccactgcctcctaaagatcagtggctgttcctcttgctccagttctagcaccaagaacatccatgtgtgaatgaaagtcatgaatgagctgagtcagagccccagggtgaagcagagtggtagagaagccatctctttaggctgtgatcttcacacttccccattaactctatgggaagaggtggagaatagcaaggggcttataagtttggcctctatgttccagaggatttcgtacactctgcctttcctgcacaactgggtgggaaaatctaccattcctagagcccatttccactggtcctactaattaaaacatctgatccaccagaaccattttccccatgtggttagtggcattggtttcagccttcaccctcctgaatattctggctctagcattccactgtggtctctcacctcgctttcccaggtacactctcacttgcaggatcccggcagccttttccctggaaaacctggcaggaatttgaaagcgcaggcaaaaagaaggaaaaaaaccactgaagtccaagcatcattgtttaactgggctatgatattttctggctattctgtatgttctgtctgttctacatctttttactggactcctttcagttattgtgtttactgtattgaattttctcacctaggcagcttcggctggcaagcaaagccccacaagaacccctcactttgctcctctgtcttcttagaaggaggaaagaatgcaaaataaggcagccacctgtgccttttcattaacactaagagaggaaggtgccagatgacctggagatagcttgactgtggccacaggccatgtcaggcagcccttgtggtggtttctgtgagcttgcttctgcaaagactccctgctccactggggctgaggtaggggtggaagacctggaagagccagtgaattagtgctagtggagctatggggcttcaaggacctgttggcttccctgatcactcatgtaggtgtttagaccattccctagacagactccagatgatttttcatgactccagtaacattcctgtactataagctccttggaatcttataagcctagatcagggttccagtaggaagcaggtggaacactggaaagggtgattggagaggacttaatcaagggacaatttaccaagccatgtgcaggtgtctcaatcaatgttatactgctgtaaaagaatacctgagactgggtaatttataaagaatagagatttatttcttacagttgtggaagctcagaagtctgatatcaagaagacggcatcttgtgagggccttcttgctgaattatcccatggcaaaggagagagagactgtgagccaaactcacttttataacaaatctgttcttgtgataatagacctattcccatgacaatgacaataatctatcgtgaccataatgacctaatcacctcttaaaggtcccatttcccaacactgttacataggggattaagttttcaacacatgaaacttgagggacatattcaaatcattgcagcagggttagaggaaccaatggggactggcaaaagcaataattgtttcaattcttcgatccaaagatcaaagtggaagaactacagacttggataaggggctcccttggctttggggagagcaatgagacaagcctgagggacataggggataaccactcaatctcccttctcttccttctcttgtcagtgtccctcattgaccaagacagcaagggagcccagataatgtagtctgtagagtcagcctcccaagccacagagcatagcaaagtgtctggaagggatctggtggggcaaagagataaaatcaaccacctctaaattctctctttctaatgaaggaccatttggtgtcccccagacttacagcagtattccagcactttcattgaagtctgccttctgtgcctttccacaaatgacccctagcactcctggccacatcctcgtgttaccagtggccttttgaatactgcactaaggtagggatggggatccatgtcaaccatacacaccaaggaggcagttggttcctttgtgcaggtcacttaaacttcccaagtctccatttattcatctgtgagttggaaacagtaatactcacatcagcaggtggttgaggtgagaacacgcttataatgcccttagccagtgtccagcacatactcagtgcccaacatatagcagtattaataagaagcgacagcaataactatttcttgagtgcttcctctgtgccggccatgtggtgtgtacttcaggactacctgaaatctcttcagtaagatttccttctcactggtgaaggaggtgctattaccatcacaatcttaccagtgcaggacctgagggtaagtggggttaggcagctgtccataatcatgcagagagtaatgatagagctgactcaggctctatgcttgcaaccattaccttccattacctctcaatactgattacatcgccatcctcatccttattaggtgttcatttttgattttcaaccagcaaacagtaagtatgaagaaggcagtgcttaaaccgctaagtaaatctagtggagctgcgggccctactgcacctcccctggcacccgcgtggctgccagagccaccagagccttggctgctccaattgacttcaccccactgctattcccacagatgctgctctcagatcctccctcctacctgggccttcactgaatatcacagttaggcctgccagagtccccaaaacttcagatctgttgaaataagaaacagatcaagggataacgtgtacttatcccaactaacgggttgcttttaaacttaattatgtatatcttaattccttagtcctgctcttagcttcattactcctgtctgtgttgttgggcaggtattctttcttctctgggtctcagtttgttcatctgtagaatgggagattagactgtgttttctgcaatccctttcagttcaaattctcttatagtaagctggaggtatagacaggaacatggggcagagaggtcctacggtatagaggataagcacatagattccaaagtaaggttcttggtttaggtcctggcttcaacttctacctgctctgtgatgttggacaattatttcaccactctgtgcctcaggttcctcatctgtaaagtggggatagagtatttaccttatagagttgtcccgagaattcagtaattgatacatgtaaagtgcctagaacgataccaataatagatgtatcatgtaaatataagtcattaatattattatgagtaataatgctgttattattgagcctggagtaatacagggcgggtgtagtagcctcacgctgtcaggctgggcaaattccttaatcactttgggtcctcatttcctcttgtgtagtcagagttagatctcactgattgtcaagaagattaaatgggatgatacttgtaaactcctggcccctagcaggcctcaggaagtgttgttaccttcctcccttgatgctgtttccccaaggcttgtttcctggttgatttaggcggtgctactaaactgagcggtagttgccgggaagatgaagcactgcctgaagtttcagtggtaaaaccatcatttactcagcagaggcagccaagcctggtgctgtctactcacaaataggattccccagcagcttggctgtgcagtgcattaaagaaccacaattaactggaggtctgccaggtctgggtgaagatcccatcctttgtgctgcaggccagcaagcaccattttccagatgagaagacagaggatccatgggaacttcccaaggctcctgagagagcagccatgccaggaatggatggagcccaggttccagagttcagagctctgcctcagacccatacagcttctttagtccttgctgattttcccagccatgttttctggtggccagagccaactgaagccagaagctatgtggcttagtcaggtgtacttgggtctttttcctgccaagttaagcttgcttctttctatgagtctgatcaaacccttatctgctgctagaactcttgaagataggtcagacataggctcaggctttagatggtacagatggatgagtacaaagtcatttccatgctcatactctgcaggagggggtggggggagaggcttggtagtatcataattattaaatttatttaaaagtgcatatccaatgacctcataattcgtaagtcagcatatactttcaggttttcttttccagagaaactccaagtaaaattggtttaaatgacactgaagttcactttcctttcctgcaaaagcgaaatgatttgggatcacaccccttccctttaaggtacaacctggaagtttttcacctttctgcccatgttctgtcaatcagaacccagtgtcatgcatatagctgtgagggaggcttggaaatggagttgctcttctggctgtcacactggaagtgggtgcatgggatgctgtggtgcctcacccaggtcccctcttaaggactgataggcctatcccccagctgctgagagcactgatgactgatagtacataactctgtccctttctgattattcctcagagccacaaagaattgtctcacccaagattatacttgcccgaagtttcaagcttcccggaggagaccatttttgccaagaattgccttatgctgacataaaaggttatgacctccttggctgaatttgagacaactctgaagggtcgttctagctccaggggtcctcatcaggtccgctggggcctgcaggcccactattccttctttttagtcctggacatttccttacacatagccctctctagagcactgtcccataaactggtcttcattgctctgtgccagaaataatttcagggaacccaaactaagaaattggggttctagcctatggaagaagtagaagggtatgagaaccagcagtcctttttgcctgcagccatcccacttctcatgtcagctctgaagaaatacttgtaaatgtgtccaaagaagcaatgcaaggccagcccagtggcatcgtttgtgagagtgaaaacaatgagacgctaaatgaaccatagtgaggctgtattttggggcatgttagaaagactgagaaagttcttgatctgctgcattctgtattctccaaatgttgactgtaataaggaaagtgtgaaagatgtgtacactatgatacaattttattagaaagcatcaaacaatacacgtatgtgtagccatagaaaatgtatggtttataaacaggaaacaaaagaaggctactgtgggcgctgatgctagcagctgcctttggagaggacaggagagcatgtgaggcttttaagtgtagcaatggagtgaaggagtggatgagggtgatctatagagctgcaagccttatctgtaatgctgtataaaaacaatatattcatggattatttgcacagttaaaaaatctatattaaaaaagaaaaatagaaatccattattgctcacaggactaaaaatcaaagtcatctccagagaaccgatgaaaaaagccagctttgctgtccaaagagaatcctttatttttatttccaggaggtcttgagacctcaggcaaatcactctgcctctctacacctcagtttccccatctgtgaagtggcagtcacaagccccgtctcatctgctgcaaggctgagacgcggtaagctttacaaagctgccagcctggtgcccagtactccattagtggtggtgggtggtggggaatgagttggtcaaatgaacaactgtctcattcaggatgcccagccagctgcttagacaactttccactgggccttgggtcagcagccacagagaaggggaggtctctccactccctggtcacagcctgcatctggggaaagccggaaggctaaggacagatgattccggaccattccaggtgttctgggattgagtctctctttctgatatatgagcaacggcgtgtgtagctgctgggcatgttttgtgttacgtcaaaggatttgggtggtttttctgtcctcttgtttctcagaatgaagaggacaaagcctttcttttcagtgaagcccagcagaccagaaaggctttgaaatcatgaaatgcaaatactgctgcctttgagccacatggaaggcggagctgctgaattaaattaacatggcccataaatagagagtttaaaaaaatgggaggccaagtgttcagaggcttttgtccaggggagaaataatcacaggacaatggtctattttgtttggattacaggctggtatcacattagctcaaacctggcaatatttatgttgaacactgctgtttgtggagccgctgctgtcccaatttatctctctggggaatccctggaggcaaagcaaactaggaagggaatctccacctcctgctgacctgcctggttctgcctaccactgccagagagtgcctagtgcttggccatccatggagaggaaaatgtcccacagagaaaatgaggacgtgcagataaaagtcagcctgaaaaaaatagttgttcaggagatgtgccataaaaatcggtctgtcctgcctttcttgagaaatcagaagaaccaacaacttttgtcgtgcatgttcatatggtaagagccacgaagtggctgccccttggctccaggcattcctgttagcctcagtcttcaccatgacctttctgcctgaagtcgagtgtcagttgcccttaagagcatgccattctttttttttgagacagagtcttactctactcactaggctggagtgcagcggcgggatcttggctcactgtaacctccgcctcctgggttcaagcagttctcctgcctcagcctcccgagtagctgggactacaggcacgcgccaccatgtccagctaatttttgtatttttagtagagacggggtttcaccatgttggccaggatggtctcgatctcttgaccttgtgatccacctgcctcggcctcccaaagtgctgggattacaggcgtgagccactgcacccggcccattcttacactattgtttctcttacagtcaaaaatagttctctaaacccccaacattattaagatgtaagataatgcaagctagaccatcaagagacttttttttttcccctatagccagcctgccttactcctatgggtatttgtattgccaaccactgggctactgctagaacctctaggcctggatcctgatttcagttttttaccaactgatctgatcctaagcagccattcctgcactctcttccactttgatgccactaccctcacatgtaaaaaaaggtggggggcagtttttccccctgaactatgttctgagtaacattagctctgtggaacatgataggatccatgatccaatacaccgggaagcacatgttagacagaacaagtcaatcgctgtgtgcaggactttccaagctgatgtgcatctgtttcccaaatgaatttactaggaaagcctatttcatggagcctcttgggacactagtgttctcttgcttagacttggggaatcaaaaggtgatgtccaaattcctgccagcatgaaagctcagtgcccaggatggtcctcccggtacttagccctgggtcagggcatcttgccctggaccagcagccccagtttctaccaccttcctatgtggtttccttctcccaccctccactctccctctcctcttcatggccccctcaggtgtcaggtgggaggcttaaaggagaggggttatcacagccccaccctccatcatattgcattcccaaggggtcctttgcccccacacctggtcacaaggagataaatatggccagtcttgggtcaagcgaaatgatttttttggataagactatccaaacccttcccaaggtaaagtcaggttctcaggcagctctctagcaaagctgacagataagcattgatgagggtattgctaagaaaaaaatgcaaaccctataaaacctgtcatatttatgggccttttatgtccaactctgctgttctctgttttctgcaatttttgccacttacattacaccaaaacctcctagaaggcagggagctgcactgattttgtttgcattatttattatattttgtgcattgaaacagtttatcagcaaggatttattgagtgggattactgccctctgaggtataagttcctaccttacagtcctacaagtaacaaaatccccagtgtgacagagtggagaattgtgaattttgcattcagacggaactgggtctatgtggtctatatggtcttggtcacattacttctttctgggtctcagttttctcatctctaaaatggagaccatattgggaaatttacaaccttcatgagggtccccagcatagagcctgacatacggcaagcagtccatgggaatttactgttattgtgatggctgaaggtttacctgagacttcctttcatgtacataatctcattttatcttcatggcctctccttgagctcagtgaggctaggattatgaacatcttttacagatgaggaaacaggagtttagagagattagggcattgcctgaagtttctcagccaaaaagtggggagccagaacttaaagtttgagcaggaattaaattctataccctgggtggccttcagaatatagcactagatcccaaaatacaatgctttgccaaatgcaatgtcattcaatacaaaggctaacttgctgctatcatggcaaattcagcaggtattgctataagcaaggatcttccctagaaagctatcctatagccttcaaaatgctcaaagagcccttatacgggtaataagctatatatgttaaaaaaatgtttcattgggcagaaaatggtcagggtcaattagagaaagtgggcaggtgccaggggagagatagtaggtcacaggaacaagacctccttttggcaggcatggtggaggtgagattcaaatatgggcagcagaagagaagggcggagaaaattgcacaagcaaagctctacatcagcaaagtgaaggggagtcccagtcactgagggtgactggacagggagacccggagcccggtgcctgcaaaaattgctgatggaaggttttaaatgtgagaggatgaggtgaggggagttggcaggagacgatatcaaagcaacggacagagcaggccagtttggagttcactgaaaagaaaaacagcaaggaccttgcagactaaagcagaaggaaaaacaagaaatggggaggatattagctaattaattaattcatcaaatattgtaatcagcccattaaaatttgtagagcacctacaatgtgtttgtgagttcttgcttctgcaaatacaaagataagtgcaacaaggagatagtgcccaatctaagccttgaccaaccaagacaaaagccttcatcttgcctgctatgctaacccctatgctgtgcatgtgtgcacgcacgcttctcagccccatctccactttctcctggcttccataaactttacccagcatctctctgctgtcccaaggcaagtccccttcacttgtcaggtgaaaaactctgatgcaaatacaatgtctattttagaaacgaggctttccccctaatgagttaattaaaaggaggctttgccaggcatccgaggaattatttttcattacacgagacaggtgcacatttttagcatagttcctagcttccagaggtctcccctgatgtcggcggtctgggcagattctacagaggtggggtagatattttcatggggttgccccagccagctgggtggggttgagtctggagggtcgctgtgagttgagctgcagttcatttggtggcccagtcactgtgtcgggtataattaaccaagctgaaaggaatctaaagaaacttctctgacagggaggtcagggaagatgaactctgatgggaaattaatgatgagagtctggaagctccacaaggggctttgccaccgtggctctctctggtggcatattaggagctagttttccccctcctcaactcgtaacagaattcaagcaccaaaagggaccttttcggagattgcttcttttgggtgtttaaataatgctccactgctggatagtaatgttaataataagctgtcatcggcaaccatgagcagttattgagtaccatgtgccagatgccgtgctaagtgctttatgtatatcctttccataaaccgtcctgttaattcccaccactcaggagggcaagtgctatatgccaggagctgtgacagagcttaagtcatttacccaaagattcagaatcactaaatggcagaactgggattcggaactaagctcctgcctctatgttagttggcctgtttgtaggtctttcatagaaaatatattagctaattaattaattcatcaaatactgtaatcagcccattaaaatttgttgagcacctacaatgtgtttgtgagttcttgcttctgcaaatatgaagtgcaacaaggagatagtgcccaatctaagccttgaccaaccaagacaaaagccttgattttgcctgctacgctaacccctacactgtgcatgtgcgcacacacacttctcagccccacctccagttgaaaaagaaggccgaggctagagggctcatgctgtagggcagattggcaaactgtggtccatctgcagattggcaaacttgttgtaaaaataattggggggaaaacatagtcactccctttcatatacatattgtctatgattgcttttatgctaggacagtagaactgagtagttacaagagactgtgtagcctgccaagcctaaaatatttactatctggccctggacagaaaaaaagcattgtcaattctcacttaaggaaacccagagttaaacaaaattaagcaggtttatttgctgcatgacttctcagagcccttaacctgctaatatgtactctgagagtcccagaggatgtagtgtatcctgatatactttaccaggcacccctttttcttgaagcatctttgaggcaagctttgggggacactacccatttatttgttcaaggaggaaacaggcttagagaggaaaagtggccctagggcatgtagcttgtgtggctgaccaggactggatttggattccagaagcttctcaaggtggtgctggactctgtttgccatttgccaacttcagtcagagggatggatgccccttctcctgagcggtggcggtggtgggagccggtgcagccttttctttattcagttgcctgtttacaatggtgttcagcaattctgtctttatggggcctgtttgttcttcaaatccaagaagagaagggaaaatcatcatactaatcatgaatgtcagttttaatcagcatcatctgacattatgagaattgaatttccacctttcacagcatacattaaatatggggctttatctcctcatgcagaattgatttgccataattctctcctttggcccttgtcatgtaaattgtggcatttcttccccattgactgcagaaaccaagattagaggtgagggtccaggctcccagaccagctgctgctgagcgctttgtctgtctgtctttcttttcccactcacgtgttccctctctgaactttctcttttgggactgcttactggctaatcatgccttctgcagatagagcctgaaggggaggaatagagggatgatgttgtggggctgagcagatggccttcgtgagacatcagccataaggatccgtagcacctgcagcccggacaggtgactgcttggtaggttttaggggacagatcttagggccatttgtaactcatgtccactactgaatcaaatcaccagtgtctacaagagtgacatacattcaaatactccccacaggaccctggagaatctctacctcctggtacctgtactggatggatagggacaatggtggcttctggttggtagaaaagccaagggcctgaggagcacctggccccaggcctgggcttatgaactgtggcctggaaaccagccccaaggactctgcagaaagaaagttcttggaagagctttcagtcactcagtgacaccccaggtgaggacatctataccaatgctctgtaaaagcccctgagcctcatttttgtcttgcaactattttctgctaaatatccaagcagtggttaagagatgacatgctgaaggcagaaagacttgggttcaagtactgactcttccacttattaattgggtgttgcagggcaaaatacttaagccctctaaacctctgctcttccatctgtaaaacaggataaatagtaatagctatgtccatgaggttgtttggaagattaaatgaaataatccatgtaatgcatctggggcagtgcccagcacatagtaaacagtctgtatgtagaggctgctcttcagattgttaaacattccatgctggctgtgccttgagatacacaaaaaatatactctgtagttgagtgtattgatatttcatgcataccaaggtgcttaaaggccactaaatatctacaatgtctcacagttggcccacaaaggtggggagggacaagatggaatctatcccttactgaacgcttgttggacctcaggcactttaatagtaaaaggtcagttaagatgactttcatactgtcatccacagcatgccccttcatgttactttcaaagacagaatcccaggcaaataaataggaggtctgactcaggtggaagattcttactgcttttaacaaagaaggataataactttatgtgtttgtaattttaaatttataatccatttattgaaagtctgctgtgggtaagcattatgcccagaactttacatttaatataatctaactaaattacattttcacaacaacccaagaaggcaagtaccatgattattgccattttatagatagtgaaactgaagcccatctacgttccctacaaaaaggaagacatcagctccaggatcaactgcaagatgaatttcctccatggacccttgctgctcctgtgttgagcctctagtaatgagaatatgctgctgaattagtctcctgttacctgagctctctacagtgaaactcaactgtcctggaccataatgaatgttctataggaccccggggttattgttgcctgtggaactggaaaaaggcagttttccacgagtcaagccggggctgactcaatgcttgaagacatatgtgaattcactgtaaatggagagggcatgttgctgttgatgactggggaagatagagtcttaggggagttagtgtgagctactctgaccacaccagcaccgccctccccaatagtctttgcaagtcaaggctgttgtcataggctgagcaaggtccagagaggctgagaagtcatctggagctggtcggatgggcagtggcatggaggagaatgcatatcaggaccacctgagcaacgcccaacataccttagtactgtttaagacatgggtaaatgggtattctctttaaggcagttgggatcaatttcagcctttccctaagtgccagtgtgctggagaggtatggggactccacagatacacacttgcatatgtgtatatgtgcatgcatgtatggattgtagggagttgttcatagggagagatgaggcaaggcagcagcttacattcccaccatgtctctcttggctgttgtgcaccattgcctttcccacatcccatgtcttaaaatgaataccaatttccatttattgagccaagcttgccacttgccagacacagtgttaagtcctttagtctgctctctaattaaacaagatcctcaaaacaatttgttgtaggcaagtaagtactattagtatatagtagccccccacttatccatggtttcagttacctgtggtcaaccacagtctgaaaatattaaatgaaaagttccagaaatgaacaatccttaagttttcaattgcatgtcattctgagtagtgtgatgaaattctgcccagaacatgaatcctccattttcccagtgtattttttctgtagatgccacccacccattggtcacttggtagctatcttagttatcacgttaactgtcatggtattgttgtgcttctgttcaagtaaccattattgcacttaatagtgaccccaaagcacaagggtagtgatgctggaaatttcgttgtgccaaagagaaggcttgaaatgctgtgctacctttaagtgaaaaggtgaaagttctcaacttaataagaaaagaaaaaaagtgatatgctgaggttgctaagaaggaggaaattgtgaagaaggaaaaaaatgcatactagttttgctgtcccaccttatactgtaaaagtaatggccacggtgcgtgataagtgcttcactaagatggaaaaggtattaagttttttggcagatgacataaacagaaacgtgttctgatgaacagccatcaggttctgtactatccacagtttcaggcaaccactgggggtctagaaatgcatcccgcaaggttaaggggggaccactgttcttgtctttcagaagacaagactggggcacacagaggtaaaatgacatgccccaggaagcagcagagccagaatgaaaacaaagtttcttgattctagaacccaaattttaactcaacgggccttatccatagggccccacccctctggagtgtcacagaccactgggaggtgtgctccgcgtgccttcttgctaattaaagtactgcctcttctgcgtcttgggttctgctacactgatctccatctcctccacgccctgcatgaccttggatttgtgactgatcacaaacacacacacacacacacacacacacacacaccccaagtctcagagctttccaagacccctaaggaatgagtatgttaattaaagcctggctctttcttctgcactgtgctgcttcctatcttgagaggttggaaggtactttggggtcggtgacctctgcagcatcctcagatactggttcaattgtttcttatacatctctgatgacagggaggtcacctcctccaagggagcttgttccactattccaaagctctggctgttagaaagcatctcttcttaggaatcatatattccctggaaaacagtccccaaaagagcagcttagccaactgacacttcctgtgcctagaggcagggacactttggctcttgacactgagaggcctttgcctagaccttgaggtccattctcctagaccttgggatgacagcatcctattctcagggttggatccctcttggagaaagttccaacttctggtattctttctttctcaggaggaggcagaaataggctttgtccatcttgacccagaccccttcctcatcagcctggccagcccctgagcccccagctctccacccgacatcctctccagccccacagcaacaggctgctggggtcaggcagagaaagtgttgatggatggacccacaggtgtaagggaaaactcttagttgcaatgctggctctggcacctggcatggggtctggctttaacctgcctgctttcctgccccagccagcacccatccagacagatctgagggaggaccctgtgtggtgaatgaatgtgcagttcctcagatgtagaacaatcctctatccatgggacagctgtggccccaagaccaggagaaattcctgtgtcttgggataccttcagtccttcctgtgcactagaggcccagaggcccaggctacagactcagttattccattccccaccttggccttgccctagaacatatcacaggcaactcctgtggacccctggaactatcatagtgcaaaggtccttatctaggggcctaagagctttactttgccataactgtgtccttaggcaagttgctttccctgcttggtgatgtctccttattcacaaagtgtaaatgtggatatgtggaggggtcaagatgtggtgttatccaaggctctgtctagccctgacttttcattcccaggacctttgacttgagatatccaactgggtttcaggtccaagtgggaggtgagagaatagagaatcagaaagagcaagttgcttcatctctaccctctcttctagcctgggaccagactagcaggaagttaccaacacacagggcttgactgagggacatttaaaggcccatccactcccaaatatcttcactgaccttattaattcaaaaactgcaatcactcctttggggagacatagtctccagaaatcaactgtgaatatttaaatatggcaccagggaaggcaattcaacaaactcattcccacccattaatgcccattaggttaaattttcttcccatggaaaagattcttgaaaggacagtaagaggtaggatgagtttttatatgggaggatctattaaggatttttttttttaaaaggaaagaaagagaccaagagctagtgtggggagaccaggggatggatccgagttacagggtagagtgtccaggggtgggatactatggaataaagatgccatggaacaaacatgacttgtttcccaattgtgccattgccaggcttgtgttattacagtatacagggaaagcttgaacctgattgcagggcaggagaaaagaggctgggcagaaatgaatgcaagagcctcctccaccatgcaccctccacctgatgccagcagacaagcttggcactgcccttgaggtttgttcctctcaatagggtgaggcagcccttcaggaatgagatacagcaaaagcatcaccccacagtagccctgaaaacaggtgcaaaacacccttcctctgatgtttgcccagtatagcctctggactacaaagccaaccaagcaaaggtgggtggtagcagagtagctgtgggtggaattgaggctggctgcccggaaacaggaaggtcttaggtgcatccatttatagtctcttcctgggaccctgtgcctctgaagccactaggtgatggccttcctcgtcattttttcaatccttcaggcctttggtctttctggtacttctgccttagccaatgatatggtttggctatgtccccacccaaatctcatcttgaacatattgaactgtagtttccataatccccaaatgtcatggagggacccattgggaggtaatcacgggggcggttactctcatgctgttctcgtgatagtaagtaagttctcacgagaactgatggttttataaggggcttttatcccttttgctcggcacttctctctcctgccaccatgtaaagaagtacgtgtttgcttctctttccaccatgattgtaaatttcctgaggcctccccaaacatgtggaactgtgagtcaattaaacctctttcctttataaattacctagtcttgggtagttctttatagcagtgtgagaatggactaataccgtcactctctctatctttcatccttcaagactcagctcaggcatcatcttctctctgaagccacccatgaattagtgaatgaaggaatgaatgggtagttcttcagatgtgaaacaatcttctatccattggaacaccttctgggatcgttgagtcagcaagaaaagagctcctgcaagccccacaggatgcctagggaaagttgcaaccaagtgttttctcctggacttaagaggatgataaggataggagtggactgcctctaccattagaggctctggggctaaagaccaaagaatagggctcaggcacattacctgggtaagtggctttccctcactgggcctctttatctagaaaatacctagagggcattgaggtcccttccagctgtcctgctctctgagcctgggtctgaagcagagagaggatgcagccagtagaactgacttaacaattttagaatgtaaagactcatcacttgcaaggtcaccttgaagtggatctgttgattcagtgctgaaaggcattcctgttaaaaatgttcctcataaggtaaagtaacagcttctcaaaatgggaaaaggagctgatactctgtaataagcaacatttgacacgtttccaatgatccctgcctccagtattcacccctcgggtaatcctctcccctattgacttgcttctaacttgcttccatatgaggaaggattgaaaaaatgatgaagaacatggtgacagagatgggatgtcacttccatattaggtttcaaaaggctgtgacttgcatcctgcggaactctttctatagccttcttggactgcttgctttggtgaagtcagaagccatgttacataggtccatgtggcaagaactgagagcaacctctggccaacagccagtgagaaactaagacccttagtgcaacagcctgcaaggaactgattcatgccaacaaccatgcaagtgagctgggaagtgaatttttcccattaaactttgacagggtttagatgcatccacttataatctccctctgggaccctgtacctcagaagccatgactgtagccccagccagtaccttgatttcagcctgtaagagaccccaaagtacaaagtagaggacccagttgaactgtctttggatttactgacagacacaaactgttgttgctccaagccacaaagtttagggataatttgttgcacatcaagagatagctaatgcatgcttctagagtttaggggagtcatggatgtaaaaagccagagacatcctaaaaattaggaagtacgttccccacctcctccagcttcaggaaagcaagataaatatcacatgctgtcactaagtgatcccagacatggcagtgcccctctttctcccacaatttctccatgtgtaaaataaaggggttgggttggtgaatcagaactgcaaggtttctgggaccactgccctcctccaccttagtaattttgctttttgtatccgttgattgaaaagatgcaaaatgaaaagaagctactctaaatacagtgatgttataactagctttattagtcgcaataacacttcagtgcatttgagactgtcatcctttatactcactcaatgtgcaggcattgctaaacaggaatggctatggatagagagtattctcattgagaacaactaaagcagcgcattatgaattatgcttaatcacgtggcacaaatgtatagatggcaagataaaggtgagggagggaaagctggggtcagatggccttgggttagcatctcacttttgtccttcccagatgtgtaccctacagggagtgatttcataaatcatcagttgctttacctctaaattggggatcgtaatacttattccacagcattgttagaaatattaaattcaataatgcatagaaaattagcagctagttattgctcaatagtgacacctaataataacaaataataaattccacctttgcattattattgacataattatatacaaatacctgtacaaatacaaataatgtacaaatgaatgaccaggtgtggccatttattgagtacttactatgggcaaggcatgagtccaaactcttcatgcagtatttcacatgcctactgacaggtcttccagtctagagggtgaccctgtctgtcctgctttctttggggtaaagcagacagttttctcccccaggatgctttgagtcacttggacagacagtgactcaaaggacattgggaatctgctctcaggagtctaccattcagtcaatcctggcctgggcccagaactcagcatctcttctactgtctgagggtctgtttctccatggacagagaaagaagtatccagaaggttccctttaccccacagaagaggtgatgagactgtctcagctgagggggggtctctgatactgtgaagatacaaggtcccagtgtccctttcccaagggtctacaccttaattgaagccgcatctgcaaataattcaaaccctgagacccaacattgttgtcttaagcttctatgggagagagaggggaagaagaagggcaatgtgaaaattgtgatgtctttctacctctgctgtcacttctaatgatacatttcttagaaaataaaggaacactgtgtactatgatgtgggaaggcagagactatagtttcatacagagtagtgcttaattccagttttactactcacaggcagatttgagtaacttttatcacttcctacatctcagttcttcatccattaaatgagggtcacagtctctgacttacaggagcacatcttgtgaggcaaaacaacagcttggatgtcagaagttaaaataaattacacggagttggtgctcagcacatgctagagaatcacctgtgcctgattctcagctctctcactgtaagatcagagatgacatatgagaattgtcttgtggagtattgggatatactacgtactgagtccatctggctattgttataatatttctaacaaagatagatgcttctcccccaaactgtttcctgacttccactgctccatgagaggaacactgtcacgggatccacaggaggctgggatatacattcttctttattccacagtcccagaaccccaatatttagctggacacatattcccacccagttaaacactatacaggcatacattggagatatcgcgggttcagttccagaccagcgcaataaagtgagtcacatgaattttttatttttccagtacatatagaagttatatttatgctatattatagtctattaagatgcaatagcattatttctcgaaataatgtatataccttaattgtcaaatactttattgccaaaaagtgctaatgaccatctgagccttcagtgagtcacaatctttttgctagtggacggtcttgcctcaatgttgatggctgctgactgattagggtggcagtaactgaaagttggcatggctgtggcaatttcttaaaataagtcaacaatgaagtttgccacatcaatggactcttcctttcacaaaagatttctctgtagcatgtgatgctatttgatagcattttacccacagtagaaattatttcacattggactcagttctctcaaaccctgctgctgctttattaaataagcttatataatattctaaatcctttgttggaatttcagtaacgttctcagcatcttcaccaggaatagattctatcttaagaaaccattttctttgcacatccataagaagcaacttctcattcatttaagtttattgtgagattgcagcaattcagtcacatcttcaggatccacttctaattctagttctcttgctatttacaccacatctatagttacttcttccactgaggtcttgaacctctcaaagccatccatgaagattggaatcaacttcttccgaatttccattaatgttgatacttcggccttctcccatgaatcatgaatgttcttaatggcatctagaatagtgaaattttccagaaggttttcaatttactttgctcagctccatatgagaaatcataatccatggcagttatagccttttgaaatgtatttttgaaataataaggcttcaaagttgtaattattccttgatccctgggtagcagaatggatgctatgttaacaggcagaaaaatagcattaatatccttgtacacctccatcagagcttttgccaggtgcattgtcaatgagcaataatatctcgaaaagaatatttttttctgaggagtaggtctcaagagtgggcttaaaatatttagtaaaccatgctgtaaatgaatggggtctcatccaggctttgtcattccatttactgagcacaagcagtagatgtagtgtaatccttaagggccctaggattttcagggtagtaaatgggcattggcatcaacttcaagttaccagctatatgaactcttcacaagagagtcagctcgtcctttgaagatttgaagccagccattgagtctcctctctagctatgaaagtcctacatggcatcttcttccaatagaatgctgtttcatattcacggaaaatcagttgtttagtgtacccaccttcatcaatgatgttagctagaacttctggataacttattgcagcttccccatcagtacttgctgcttcaccttgtatttttatgttatggaggtggctgttttccttaaacttcatgaaccaacctctactagcttcagacttttcctctgcagcttcctcatctctctcaggcttcgtggaattgaagagatttaggtcgtgtctctaaattagactttggcttaagggaatgttgtggatgatttgatcttctgtccagacaattagaactttctccatatcagcaataaggctgttttgctttcttatcacttgtgtgttcactggaataacacttttaacttccttcaaaagctttttctttgcattcacaatttggctgttttgtgcaaaaagcctatcttttagcttatctgggctttcaacatgccttcctcactaagcttaatagtttctagcttttgatttaaagtgagagatgtgcgactcttcctttcacttgaacacttagaagccattgtagggttattaattggcctaattttagtattgttgtgtctcagggaatagggagactcaaagagagagagagagagagagagagagagagaaagagagatggggaaagagccattcaatggagaagtcaaaacatatataacatttattgattgattaagtttgccatctaatcttgggcacagtttgtggtacccaaaacaatagtaacatcacagatcactgatcattggtcaccataacagatacaataataatgaaaatgtttgaaatattatgagaattaccaaactgtgacacagaggcatgaagtgagcacatgctattggaaaaatggcaccagtggatttgctagacatagggttgccacaacctttcaatttgtttaaaaaaaaaaaaactcaatacctgtgaggcaaattaaaacaacccacaatgaaacaaggtatgccactatttctcagcttccctcgtagccaaatgtggatatgtccctaaatttactgtgttaaatatcagcatgtgtctgaaagagagggagcacactttcttcgtctcctcatccatctggctgcttgaaatttggatgtgatggctgtagttctagcagccatcttgtactatgaggataaaaaccgtattctagggaaatcagagggtaagctggaaggggccagcttccacttcatggggcacagtatcagctctgcccacctcccaacttcttatataaaaataaacatttgtctatttaaacaattgctattttgacttcctctgtcctatttagcaaaagcaaatcccaatagatataaaggctctcctttataaaaacttaaaaattttgtctttcaggattttatccaaaggctataataagacaaatgcttaaagtcacatggacaaagatattcaatactcgtattattacaaaagcaaatggatgcctatattttcaccgagggaggagaggttagatgtgacacggtacatcctaagtcagtggcttagagttccggaggtgaagcctggggctggaccagattctaagtctcacctcagctccttaatgtctctatcactggagcaccttctactttacctctctgagccacagttttcttatgtacaaagtaggctgataataatcgtccaggtcgataatgttgctatatgggtaaaattaaagaatgtacataaggcacttcacacagtgcccagctcaggttaatcactgggtggaggctagcaatccttctctactcccctgccccctcccctctctcctcctcctaattggttcttccctccccccattatccttctcctccaatagaatactatactggaattaaaggtatctgcaccactaccaccacaatgaaggtgattaaaggcacattagcggaaatttaaaatcatatcacatacatatttatacagcatgatctcataactatgtaggaatctattgaaaaacttaggagagagacacgccaatagcttttatctctaagaggtgaattttagtaattttcccttcttcttaaagcctctctgtaatgtctatggtatgtccatgagcatgaaatattgttaaaatttatgattaaacatgatttgtcattcctctattataaaaaagctcggcatccctgagctataccaatccctggagaggccagttctgcagggcatttgtgaacagaaagcacctcccctgccagctggctgacgaagtcccctgggactgccaccggatggagccttaagggtgaggcatgtggcaggtgggattggagagacagatatccctttagagctgcctgggacagttgctgcattctctgccatccctcctgaccattcccttctagcatcttctctgacctggaggaagtgctctgaacttaatgaatgccacccagagagtggagttcaattctctatttgcagtaagaaaaattattttccctccttaaaaagaaaggcccgaaagaaagcaatgtatcagaccaatagctgcctatgcttaatgtgctgtgtattttacaaatcctcttagcaggagaactgtttgatctccctctggctggatctgtagctgtggagatgactgacactggcctgatccctgcagaccagactgagctctgcagagcagtggcccctgggacacaggaccccaacagatgcacaagtgactgacccaggtgctgtggtgtgtgactctcctggagaaggaacagaccttcttggaacagaagacaaggcagctgaaagaagtggcaagagggccatggattgagccagttaggtcactgtgggtggagaaaacactggctgggggcttcctgtcataaataggtatgcatttaattgtctagggactcaggatctcttgggtcctctgaactcttggctcacaagtgacaacactttggcccataaatttttctttccccctaggccccaaatcattcttctttgagctgccacttactagtatttactacacactaatgaatatgtgctctttgttaggaaaggctgatatgccatttaatcctcccacttcccagtaaagttgtccccattttacagataaagaaactaagacacagaattaatgccacacatatcattgtagctgagccaggggtgaaacctatatgtgtgtggtgcaaaacttgtgatctaaatgtagacgttctcaacgcaggtcatgcatcagagtcatctgtggagcttattaattataaggatacaaagaccccaccccgggtttcctgagtctctggaagatgtaatactgatgtgaaacctggtggaaaaccactggatgacctagattcctgaacacttgccctgcatagcctgccctacaggaggaaggctgctgagtgtagaatgagagcctgcatggctggtctttggggctccactaccctcctctccccattctgggttagcctccagcagctgaccccccgggctgttgtggtgctgcaggcttctgattaggactagggcaactcattcttttctctgcccctggtgggactgacctctgtcctcagaggagaatcctggtgggcacaggtcaggaaccccctgacaggaaaactcattgctgcttgaagcaggcaggccttagggcctgggtctccagaggacccatggataacttgtggactggacagtttggaggggacacttatcagccccttaggtcacagcatgaactcagctgtcagctcagcctgtgacagctgagttcccttggaaaagctcttttcatttatgtatttgttctttccttatctcacattggtggtttccttcattcaattcagcaagcaagcaccaggctctccattaggaatgggacatccagaaatgaagtagtccctgcccctgccatccagatgcacagactctaaagggagtgacaggctataaacagaccactgtagtgtggtgtgtttcctgcaataagagagggaagcaaacctggctgtgagcagagagagccctcaattaagcctggtaaagggaaagctgcccagaggtggtgacactggctggtgacatacagcttacttaatacattgcctaacacctctaggttgcagaacttacagaaaatacttagaaatgagctgtcattcatttattctgttatccatccattcattcagcaagcatttattgagcatctcctgtgttccaggatttattctaggcacaggtatatctgctcttataaagcctaaatgcatggatgagagagggaatataaacaaaaaaattacatatatctaactttatattgcatgtaaatatacatatttttatgtgtaattttatatattatatatagtaataaaacttgtagaaaaaaataaatcagagaagaatagattgctaagggagaacaagtggcagatgttgctgtccacttctctgataaggtgatgtataagcagatgtgggggtcagtgacagcgggagaggagatggggaaaaaggacagaggatgcgggagcaggtctaagggaggctaatgttggatttggggatcacatcatcccacctcccttctgacacagtggatacagctgagacccaaagagtgcaggaggcttccagaaacgaagaagcagaaaagtaggcatctctctataaactaggggtaaagagagtgaaaatgggggctctagcattgggtgagattcagagtcacaaagtgactatttttctcaagatatttttctctgattaaaaagcctccccaaagattgaaaaatttatatgtaatgatttgttatatgttgctttgtaataaattaccctcaaaacttcatggcttaaaacaataaacatttattatctcaccatttctttgggtcaggaatccaggagcagcttagctgcgtggttccagctcaaggtctctcatgaggttgcattcaagatgttttctggggctgcattcatctggaggcttgactggggctggaggacctgtttctgagatgatttacccacatgcctggcaagttagtgctgattgcaagagaaggcctcagttccttgtcagggctgcttgagtgtgctaacaacatggtagctgacttcctccaaagcatgtgcttcaagaaagaacaaggcagatgccccagtgtattttatgatctagcctccaaagtcacactacacatcaggtcagcagcatcctgtttgttacacaggttagtcctgttcagggtgaacagtgctacacaagggcctgaatgttaggtggcaaggatcattgaggactgtcttagaggctggctgccataatgctatcgaatgaacaagctattttaaaatgacatgaaattagcattattccaaaaagtttacaatgtgatcactaaaaaacaaaaaacaaaaacagaaacaaaacaaaacaaacaaaaacagttttcttgactatttttgcttaaggccagcttggctctcaatgacaagggaatggcattgagttcatcgagacctggggttaccctggacttttaccatttgtgtgtggatacgttacctaatctttctatgccttggatccctcatctgtcaagtggagagtataatagccgccattgcatttgctcttagaattaaagatagtacccatcccagcaggtacccattccaaagtgcagaagttaaggggttaaatcctggtgttatcacatattggctgttttactttgagcaagtttcttcacctctctgtgcatctccttctacttctgtaaaatggcaataatgacagtctctgcctcacaggttgttatgaggattgaatgagttaatgtttggaaagtgcttagactgtgcccagaacattgtaagtgccgtataagaatttgtgaagtaaaacatagtctggtgtatagtaggtgctcagtaacgggtagctctctctccccttcatctgggatttggccccttgacagagatagaagatgccagaacatgatggaagaaatggttaattcccctggtgagtgggagtctttagaatgtgagtgtgggagcctccttagagtggtctagtgtgtttgctattccttggcttttcatggcctcgcattacccaggctctcttcctattttcagtatattgtccctactcatccatggttagacaaacagctgcaggccttggcctcagggtccacatggttctgagctttcaggaatcattaatcatgaggtgggagtgaataaattttgctaacctacaggtgagcccgccacctgaatttgtgaccctaaagccacagacagaaaatggaattcccttttggagtgtctcggttagcccagctctgtgcttccaagcacacatcaaccagcagaaagtcttctgctccatcactgtgttaagtcagggattgccagatttgggaatgcaaaatattaaaagtggcttggaacagcagactctaggaagaaggggctaatgcttattacttgcagattctgagccagacactatcagagctcattttgtgctcacagtaattctgaggtcgttttgtcatcgtcgtaatttcacacataaggaaactgatgcactgagaagttaagtgacttgcacgaggacatgcacttaggaagtgatagagtcaggattcagacacagcagcctggctccagactccaggctctgagcactctgcgtgctgccctgatggctccagtctctctgggctatccctattcaccatgtggctcctccagagaagaggacaacagatctaggcagcaccccctgatcttattacacgtgggccactgatgtggtcaaatcattctatttctccctgccttggtttcctcatctaccacaccaggaggttggtccccaaaagggggagggcacagtctttagaaaattggcagacttaggtttgaactgtggcttttttggccaggtcccctgaggaatctctctgagcctcagtatgcttttcttgaacagaagatgatgaaggcatctctggaaaggtgcagttagaactcagtgagaaaatatataaatgaagtgttgacatacagaaggtattcaagaaatgttttcttccttttcccatccacccccataactatcttgtaacttcattttttaaaactcacaaatccatttgtttattgaacaaacatttattcctacctgttcattcccatattttattctgttacattctttcgtctatccatctgcctgcccatcgatccatctgttcactcatccacatatttacttactcaaatatttattgagctactattgtctgctgtgttccaaagatggaaagcttaggtccttgctctgaagtagattcttctcaagaatctgggttccgcatgtgctgttggatgtcacatcataatcagatgtacaaagctttgttcagccaggtttaattcactaggttgacagctctgttataagcttttctcccaaggtttgtcctcactgagtagcaaagtactatggttaaatcattagtttaaacttctcaccatgttccagtctgtgttgttgaaattaagtccacggtcaacatctgtctatagctcattcatttcatgcaagccatacagcctagccaacctgttcatacgacctctgggctgttatatttcttaaaaggcagagccagtacaccaggcaggcacagctgcctttgccacctgtgtgggctgatttaccctgaaattctaacctcatctaattggcctaaatggcgagcaattaatgacgtggaacctctttgaaggtactataaataaaaggccaggaacctaagattgaagtgaaccaggggttacagtaatgatgataaattgttcctgctagagggttgttgttgttgtttttaaaggagttacttagcatctcttaaccatgctgaccccacacaggggtcaaggtgggaaagggcaggtattctgtttgcagttggtgaaatctgacagatagtcaaagggagaaatgttgtgagtcgtttctaaggagaggtgagcagtgcctggcacaggcacttaagtatgtgttgagtcagtgaaggaatgccttccagagtgtagcagaatgaatctggggtttggaatgagatagttgtatctctgtatcttgaacttgggcatgtagacagcttaaccttgctcagccttggtttccctgtctattaaatagggataagcataacacccatctttcagggttattgtgtagagtaaatgtgataatataaggttcacagctatatcctcagtgcctggcccaggcctggcaggttataagagcacatcaaatgttgttcttttgccccttaggcactcatctcagacactattagaatataaattccctgcatagggtagattatgtttatctcctatcccttagatgagttctagcatacagtaggcccttaataaattttaaataaagcaaatttcctttgcttttctctgtagtaaattgactctatcagtggccctgattctatatatatatacacacacacacaaccacacacacacacatccacacacacgcacacacacaccctctccatgcccttttgccacatcactttgcattttctttcactaaagaaccacttggttctgagtctggccaagtgatatgtcttagccaatggtattttcggagatatgtcatatgcagaggcttacaaagaccttggcacatttccactgttgctcctattccgtggccatgagaagctcctcaggctggtctgatggagggtgagaggcatgtgaagaaggaaccagtcacccaacagccatttgaccatgtcataagagtgagctgagccacagccagcagtgtccagccacactcacccaagatcacagagctagactcataagtgaaataaatacttcttgtttttagatacagacttttagggtagtttgttacatactgttagtgtggcaataaaaagctgatacacccattcctatccccaattactatccaggatagagcttgaaaagtgtcctgaagaaatgattaagcacctcttgtctttttttaaatttacttttatcacatctgaaaaatatttggtcaggaggaagatagtattagttgcttaaattacttttaagcattatgaactagaaaattccagccatccctcgtgggctatcccttgaacagagtataattgactggaataacaatactaatgatattaaaatcttatctctgcaatgcactttaagacttataaaactttcagatgctttatctaatttgctctgattccctgaggaatgctagttctgatgggtaaggttgctcaggctgggtcacacagctagtgagtggcaaagatcttttgatacaaagtatactaattttcaatggctgctgtaataaattactacaaacatagtggcttaaatcaacacaaacttgttattttacactttcataggttagaagtctgacagcgtctcactgggctaaaatcaaggcatcggaagggctgtgtttctttctgggtgctctgggggcaaaatctgtttccttgacatttccagctcctagggggtgcccacattcctttgttcatggctcctccttccatcttcaaagtcagcaaccttgcctctctctgaacattcatctgtaatcacatctctctctgactgtctacagtggggaaagtttctccacttttatggattcgcatgaatagattatgctcacctggataatacacaatattctcccccatctcaaggtccttaattttaattacatttgcacagtcccttttgcgtgtaatatattcacagattccagcaactagggtgtggttatctttgcaggaccactattctctctatatacatggagtcatctacatttccagtacctcatctaattaggattctgttggctaccgacctgcctacctttcttcttctttttctttctggttgatggtacagtagctataattccacaactccactggttgtaaaacctcagtgtttggccaagcaggaagaaatgctaaacacattcccaaaaacagatcttgaggcagagtcgcctttgagtatgttgagcccaaaacattttatattcttataaaatcacttattgctagctacagacatgtttctgattaaaatggtccaaagggtgtgttcttatagcacatattgcttactcatttctcttagtgtaaagatactagatactgtaggagaaatggatttattttatggtagggtagcagcagcagaaattacttcatgcaaatgaagcttggcagtgtgacttcatgaataagaaatgagccggcgtctcttctttccacaggcaatattgcgctctgggaaattaattgtggcattcgttgggtggccctggcttctctgttggagtttcaggcagacaaaaagatgctgcacccaactggatataaagcagttatatcctttttagctttgctccgcattgtaagtgaacagtcgatgggtctcaagtctcctaaaagcgtcttgagaccttttagaaattactcatggtggaagccatacgaggcactgagccacacatagtggccatgaattcagatcatctctattagaagagatctatctaataaatggaagagatctaagatactctaggtttttttattgagaatatgcctcagtagttaagcacatggtctcaggaacaaaaatatctgggttcaaatccctgctctgctcccctccaactatatgacctttggcaaattacttaatcattctgtgcctcagtttccctatttataatttagagattataattgcacttacctcataggcttgttctgaggattaaataagtaaatcgacataaagcacttagaatagagccaaagaactctactgacaccaggctacagaagtgccagataatgttaccttagttaaaattaaaggcaggtacgctttgctgatgacagctataggttttcatagtgcaattaagatgaagcagaaaaatggggctaagaataagaagtcttggagtccagcctcacttgttgcccagctatctaggcaagtcatttacctcgttatacctctgttttcccatttgttggatggggcaaaggttgtttcagttatctcttactgcataacaaatcaccccaaaatttagtagtttaagataacatcattttattatgatataactttgtgggtcagaaattcaggcaggctttcaagccatccctccagcaaagcaacttacatatgagttgtaactattggctagaacacctacatgcagccacattagcatggtggcttcagagtttgaagtccattgctcccagagacagtatttcaaatagcggagaatacaaactgccagcttcataagtcctggctctggaaactggcagtgtccacattgtgttagttgaagtaggcatggaacctatcagaattccaggagatgggacctggacttcgcctctggattggaagactgtcaggtaattttctttcttcagtttccaacatgattttggtcttatgatcatgatgtgtggacacaaagtactgtgtaaacatggtcttgattaaattgattaaattgagttatataatgcctttttgaatagacctctttttagagcaattttggatttacagtaaaatggagcagaagttaacagagatttcctatataccccttgccccccacacatacacagcctcctccattatcgatatctgtcaccaaagtagcacatttgttataattgattaacctacactggcacatcataatcactcaaagtccatagtttacattaggttcactcttgctgttgttccttgtatgggtttgggcaaatgtgtaatgataagtatccaccattatggtatcatacacagtagtttcactgccctaaaagtcctctgtgctctgcttattcatctctcccgccttcctactcccaggaaacactgatctttttacggtctccatagtttggccttctccagagcgtcatgtggctggaatcatacaatttgtagctttttcagattgtcttccttcacttagtaatatgtgttgagtttcctccatgtttttcatggcttgatagctcatttccttttagtgctgaacaatattccatagcctgaacgtaccacaatggatacagtcacctactgaaggatgtcttggttgcttacaagttctggcaattgtggataaagctgcaataaatatccatgtacaggtttttgtatggacataattttcaagtctttgaggtgaatgtcaaggaatataatggctggaaattaaaaatttctgctctgtgaaagacactgtcaagagaatgaaaagacaagctacagaagcggggaaaataattgcaaaagacaatctgatcgaggattgttatccaaaatatacaaataactcttaaaactcagcaataaggaaacaaacaacctgattaaaagtgggccaaagaccttaacagacacctcaccaagatatacggatggcaaaaacacatataaaaagatgttccacatcatatgtcatcaagcaaatgcaaattaaaatgacaatgggacagcaccatacatctattataatggccaaaatccagaacgctgagaacacgaaatgctggtgaggatgtggagaaacaggaactctcattcattgctggtggaaatgcaaaatgaaatatccactcgggaagacagtttggcagtttggtacaaaactaaacatactcctaccatatgatccatgtagtatctttttcaaagatctcttttaggctcatgatggtgacattaagatctttcaaggcttcaatcctactgtcatagaaatctggagtttccaatctgtcaaggactccaagcctgatggaagagggaaacttaaacctttattcatgtcagagttatgtaaaaatgtaatgcgctgctttggggagggagggaggttcctgttaggagacatattcaagtccaaactgagtgaccactctttaggattttcagagcagcccaatgtgaaaggtggagctatcctatctgagagatacgcttcagggatgaaagtttatgaatctctgatttctggggaaggcctctaggtcttgttttccccttccaaagtgctgggaatgaggacagtttatagtaaccaacagtgctttctgacccaacaaaatggggtctggggctgaagcaaagcctgcctttagagatagcccctccccctggcatgtaaggtaggaaaaagtaattcacatttttgagcagtttctgtgtgggggccctgtgctaagaatgttatttgtaaaactggtcccaattcgatcctcacatctgccttgaaacatagtgttattcctctaattttcagatgaggaacctcaggcacagagaggttaaatgacttgtccatggtccacagatagaaagtgatggagttcgagactgaaacccaggcctgttggagtccaaaacttagcctcttcccatcttcccattctctcaccccttgggggaatacactgtgctagctgtacttccgtctgtcacaaatggcaaaagcataattagaataggattaggccacaagggacatttaatggaggttactgcgtgagcacacagagcaactgaaccttggggagggtggaagagcagttgagctttggaatgcagaaagccacatacctgagactgccattaggacattctctgtagctcctgcctctgtttctctctgcatattggtggaattcttctctcatgctgcagattgacattacccacataacagaaaggatgtccactgaccactcccaggatttcttacttagagctgtagacactgcatatgtggttttggagagagtatgtagaaagaagcggagatggaatcacttagtcctgagtttaaaaatcccaacagagggagagattcattgggtcaacttgggccaggtgtcactaatgaacaattaaccatgccttgaggtggggtgggtcgggtcatgcagatggagtggggagagagagaagaaggaaggcctgtactggccagcaagctggaatggccattgcatctctcaggtgggggccattcctacagcagttggacagtagagaaccacaaatcacatttacagcaaagcaggtggccaattttcacatgcagcctaaatgaagttccaccacaccctgggctgagtgggaaggctgcccttcctatatgtatgttaggctagcttctctagaagatagagcctggggcaaaaattgaaagtgagatgtttcatttggaagatgcaaatccatggcagcaaaggtgagacacaaggaagcgaggcaaagaaggatgcaaagccacactaagtggtgtgtttccttgatggctattatgtcacaaacagccatggagacacccagaaggtcactgcacaagacctttcagcatgacacgtgggattcagctggatgagcggcaaggcagactgtcatgaagcagtccatggagagaggaagaaggaatgtatgtgtcctgctccctctcaactcctattttccactggtcaaagttttcctagtgggggttaactcttctgcacttcaggattgtatcacccagtcctaatggcagcctctcaggagaccagttcccaccccatgctggagagtgttttcatccaaatctggaagaggtaagaggagccagaaactataggcatggggctaggaagggcccatactccaggacttgtagccgatctgacccaagtggcagaactgcctgagctcaagtcaggcagggcagcagcctaggcagagtgagtggcagaatgttctggaagcaggtggcatcaagagcctttgagaaggctcatcagatttgtgtttgatgcactgtgtgaccttggacaagtcactgaatctctctgagcctcaatgtcctcaactgtgaaatggggctgatcatacctatctatctcccagatcagaaataatattggtcccagttgagtgttgtgcctggcacctagcaggcactcaatacagaggagccatatttgtagagttaggagttctgactcagttctggtggcattagcatagctggatttcctgaggaaaggccattgagttttggtcaggtagagctcttgagctagagtgtggggtgacttggtagctctgaaaggaaggagaaaagaaagagaaaatgccacccagaaaggagcttcatagtatctgtccattgctttgtcctcacacaaaactggctatataatttgaggggctcactgataaatggacatgtggagccccttgttcaaaaatcattaagaatttcaagatggggccagcagagtattgaatcaagcacagggccctcctgagcatgaggccctgtgtgattgcagaggtcacacacccacaatgcctgccttacacttacacgttgccagagtgcagtatttggcgccagagcttggcaatgttctattctccccagcaacctctctgcctaaatgtgcctggcttgatggtgtcttggaaacatccaaggaaggaaagggatgttggagctgattgaaaatacctctacctgaattccaagtggtgtcatgaacaagtacatacataatatagcagttaagtgcaaatttggaatctgtatgtatgtataaagttgctgttgacatggttctagtagttacaggagtgttgccatggtgactggcagggccagctgttgtttcatttcccccaaagaattgtatggtaataatagacccctggagagtcctcctgggacaaggaatgatgttaaaaatctgccaattaatgaacaggtagtataaactgacttcatcctcatttgttgtaattaacaggattttacaggattttgatgagaagtggctaatttggtatagaaatgtggagggtagactacttttggagcctgggtttgaatctgcactgtgtcactaaatagctgcatcacttaatttctctgagcctgtctccttatttagaaaatggggatcattaaaccaaagttggaggaacattgaaaataaaggatgtgaaatgcttagctcagtttctggagcattatagacagatactacatggtttctatgatgccgatgatattaatgaaatcatcatcattataatcatcataaagcttccatttattgaaggcttccacctatatgtccctatgttgtgtacattatctcatttaatctttataacaaccctatcagtgagtccattgttatcctcaagttatagatcaggacacggaggttcagagatttgcctgaggtcacacagctagtaaatgacaatgtcaggattcaaattcaggcagtctaactccagagcccaggcttttaacccttatacacagtgcccctgggatgaggattaataaatacgtgaagcctaagagacatgcatttctggatttcagttggctctgaaaggttggtccttgatgaaatggaaagtatgtttccttttatagcaagggcagtggtggggtgggatgaaggagggagattgttttaataagcacatgctgatgggggctgctctgtggaccagccttgctctgtctcaggggttcagccttctcttcctgaggctgtcctactgattcctctggagttgcagcaactcctaccctgacctgatccatgggtcagaatcagggtcaggatgagtcaaggctgactcattgactatccactctaatggcccttcctccccagggctctatggatgctgacctttgtcctcttccaaactaaagaaaaacaaataagcatacaagcacaaaaccagccccttggacttcctgctaatcctatttggttatttaagtgtggcaggtaccttctctcctcagggcctttgcatatgtttctactccttcctcctgggcttctcttcgcagttctcattctcagtcccatttactgttgggcgagttcctaatcacctttcatacctgcatgtaaatgttacctcttcagggaagccttccctgattatcctccactccagtctctaagttccccgtcctgtactccaacagccacctgtctgccttttgtatcacttaatcagaattttaattaaatgattatgagtataatgatttaagatttatctctctcaataaatgttttattcactattgaatccccaaatgcctgtaacagtggctgactctgaatttgttaaataaatgaactagcaagtaaaacctccgaaatctcaacatctgccctgggggaaaagcttatgctttgcaaggtgagcccttcataaatttcctagcttccttaatattgtggtcctactaagtgttcaggagaaagcaaacaaaacaaaattattacataactgggtagtttgagaaggaagagcagaaagtaaaattattaagcatctactacatttcagggcttgtgtttctcattgtatcctcaaataccctgcaatatagaagaaattatttgcatgtgacaaatgaggaaacagaaaaaggacagagcattaggacttgtcagtcccttactctggacttcagtgtcctcttctgtaaaatggggttggggatgagtgagcgaggcaacccttaaggtctgtgccaactcattcactttcctttggaggtttcgtcccctattgtttattagtgtgtttgtgtgtgtgggtgtgtgtgtctgtgtgtgcatgcgcatgcaagtgcacaaaatcatcttggacaggaactacgtcattagcatgagtgctggggccccaaaccctcaaaggaggcaccttggataattacattatggagtttgagcaagggtgtgtgtgtcctgtgcacccagggaaggctggaatgtcttgctcagcttttactgcattccatagaaaggattataaagggattagatgcaaatgcactgaagatttggctgatttgggcttgtattcccgcaccgatggttgggatatttattcaacccgatattgcaagatgcttttcctaggtgagagcaggcactgcgataaatgataatgcaatcagcagcagcaggcaagatgagaagataattgtttgccccaccttctctttgctggttctttagatttcatcaatgtttcccccctaaagccttagaatcactgcccctaaaactctaaggagaaaatgaaattttattctaatgcactgggcagttgagcccctgacatttgctagaattgctttaatctcacccaaaacatccaactggaaagaaataggaaaaaaaaaatgttatgagctgggtttagcaggcagggacccaccttcaaggatgggtctgaggtcttttctcattcctggggtcattcttttactgggcattagcatttttccaggaggatctatcaaatatttcagttctttgacttttgcaggtgcaaacagactgttcgatgagattggaaaactagaagctattatgcaagttggagaaataccagaagaaccttttaaatggaaaacagggaccaagagagattgtatagaggagaacgtgagaggaagaaacacaggagtggttgtggatctgtgaggggatgagggaaactgtcttaggagatccagtgataaatccatagctctctgttctaagcacattaagtgtgtgaagtcattaaccctcacagttacactatgagtttgctactatttttatgtctattttaaacatgaggaaactggggtccagagaggttgtggatgctgtcctgaaacctacatgagagccagttctccatactgatttcttgtctccttctctgataacagcagtaatcattacaaccatgacagcattaatcacagtggctgcaattcattgtttatcattagccaggctctgtgctgagcccttatgtcgggcgatcctagcagatgcctcacaagggtgtaaatatttttattccaaattgtacaggtgaggaaacaggtgagaggaggttaattacgttggcagagatggcataacagagccagcgctttacccaggactgccccagcccgaagtccgttggtcattgcatggtgcctgtgtattgtggcagggccagcacttttcgggcaacaggttacccagcccagggctgatcattttgtttttttcatctagggacactggactggaaagtagtcagctcttctcttcttgcttctcatggctgggtctcttgagttatccttggcagctgtgtagtaggcacacagaccaacgagcacagaggaatagaggcaaggaaggggaggacttagggttatgaggttttcacttttatttataaactcaaaaagggctggagttacacgatatttatttgcatacagcttcgtgatgtacaatgtgtgttcacatgctccatgttttttgatccccacgtaaggctgtgagatagacttgatttattagtcttggtttttaggctgaggaacaagtccaggaggttcaagggactcatcaggatcacacagccagaaaatagcaaagtctgttcctgactccaagtcagtaggttttgtcagtctgtgttgttgttggagagaacagtcgggagacacatggactaacacaaaaggaatggatgggagagcaggcaaaggtttggacctgccttgtcatcccacaggacaggtagccccagtggcaccatggctctggcaggcagacaaaccccaggatgcttaaactgggatccagggaggcttatgtgaaatgtccaaaatagaccagtttatggagacagagagtagattagtggttgcctaatgttggagaggggtggaaaggggaaagggagtgactgctaatgaatacagagttttctggggtcaggggtgattaactcttctaagactgatcatggtgatggttgcacaattctgtaaatatgcgaaaaaccatcaaaattgtagcagggagggctagtgcatgaggacctccaggctgggaagcaggagctatttcctgtgggctttctggtccgtaaagcctctggaagcagacgctgtttacttctcactgagcagtaattgctgtttctctgccagtctccgtcgcccttctttctgttctggcctggcaggtggtgctggagggagaagccagaatgagagaacctcttgttgcccgggcctgggttcccggtggtgactcccttcagcccgcaccactgctggaaccctgccaagctctgcagcctccccccagcctcaagccctgtgatccagcatggccaccagcctttccctcctgacccaggacacatcaagcccagcctgaaaaccaaacgcctgtccaaagactgcttgccaaataagaatggacatagccagtaacaacacattctgggggctgtggccagaattctgcacattgccctctgggtccctgcctaatgccttttgtaccccagcccagtctttgacattgctttgcatggacaggttccaaaggaaacagataaactctctgtttcccttcccatcaggaaaccacttcattccctggagagctctctacctaggaggctctgttgggactctgaggggtggaaagaggggagggtctgatcaactctgagagctgggggctgtaggaagggtggcagtttgtcttgagggacaacagccttgcatgggctgtaaagtgaaactcatagctggcagtttgctttcttgggaagattctgggtacagaggctagggcttaattagagacagagactaaaactggcctccatgagaggagactgagcaaggtgggcagtaatggtaaatgcctccgaggtgccaactaccaatggcccatgtgtctggggagaaccagagagggaggctagatgacggggagggaggcagggaaaaaattaaaaaggaagggtcccatcccctgctggtaggctaaaaccacaaggtaactgttctgcattcacattttattttaggatcttagagtgaaagctcaattaactagaatggggcaaaatgactaattggaattgctgaataactcgggaccaggtggaagccactttcctgtttcaccctttgccaggagaaaagaaaatgtttgaaaataacttggtctccttctccttgtcagtgctggagagggtttcccagcagtgtgttttcatactgacatgccacacagcccttcacaggcatgccaccagactatgcagatcagcacgatattgcattttgcaataactgaatatttgtgctgtgacactggcttggatgatgctgcaaagagagggatacaacctgtaaagaagtaaaatagtgaatccctttgattttcttgagatatgtgagaactttgctttggaaatatgtaggggagcccaagaaggacgatacgtaactctacctgcacagagacccaggctggggcaggggcggtgtggagggctgactagaagcttgtgatttctgcagttgcatttctagaccatgtgtgacaagtgtgatgaccgggcatttttatagaaagggtgagacttgcttctgctgcagcaatggtgatgttattcttgctgacttgtttggtggtgtttcacgtttctttatctcttccagtgtgtcatccacagtttttgcattcaaaggggtgttattctcaaccagaaaaagttgagacccacaggtgttgaaaagcaagtagaatgtcgaatgaccccaatctttgcagtggttatttgcatggaaaactgtagagtagggctactttgggaagccctgctggttacacagtcagatcccagggtgatggcaccctgatgtggctgccacactcctttcattgtgcatcagcagcagggcatctctgtggaggggacagagtggtgtcctgggccagggtgtggcctaaggggatctagtggtgtagacagtcatgggccctgtccccatgaagcacaggcatgcttggcacactatgtaaatctctcccttttgatgctcccattattttcgtttcttttgtgggccaactattatgggttgacttggatcctccaaaaacctatgttgaagtcctaacccctaattcctcagaatgtgaccttatttggaaataaagtcatcacagatgtaattagttaaaatgaggttattggagtggcgtgagcccttaatccaatatgactggtttgagaataggagagagacacacatgggatgggcaactctgtgcaatgaagaggcagagatgggagtgatgcagctgtacacaaaggatgccaaggcttgatggccactaccagaagctaggaagatgcaaggaagaattctaccctgagctccagagggagcatggcgctgctcacaccttgattctggacttctagcctccagaaatgtgagacaataaatgtctgttcctttaagccacccagtttgtggcagccccaggagactaatatgccagtctctaccctgccccaccatttcagcctaatctgtatattttcttttacaatgctaagatttgcaccaaagttggcacctaggtctgcaggctgggggctattctgcctcatcatgatgcttttgtgcagctcttctctagggtgttttgtgtttgtcttggagggtgcctctagcaggaaaatcttaatgtactcattttcaagcttggagggagactgttgtcctcagtactagaacaacaattctgttcacccagggtttatgtaacattctctcaccagatcctctcaacacacattctgcagctctttaacattgcggtttttctgaccttatttttaccgacattttaggtgaaaatatttatcaactcctcaacccaattctcccctttaggccacaggattctccacacagcctggaagctgcggaaatgaccagagtacactttctccgcatctcagagagaccaactcactaactgtttttatccctgacattttatttgaaggtgtgtttgacatttaaccttaggggatggtccctaaatccattatgcatttactgcctcggtggggctcacaaaggagagaattctgggtggaaggccaggctctgggagaaacttccaacgccaggccagtctccaacactgatttacttcatgttctctggaagtctcctgcccgcagcagctgctccttcaaagagggaaaagctttggactcatgagttgaaccagaagagatggctgcagcccaggcaggcccaggctgtgctctgggctgaagcaggggcatgaggaggagtttttggggcctctgagctgtttaattctaatcatccacccttcgtttcaaaatggtgcaaggtgactgggagtttggaaatctaggttctccttcccagctgaatgtctgactttggaaagtaggaaaacagtgatagttaagagcatgacctttggggtttgggtaccggctctgaatatgactagccatgtgattttgggcaaattatataacttgtataagcatcagtctcctcatctgtagaatggatggagtggtagagggagatattcttaacctcatatagccagtgtggagaatacaaattttcatatttataaagcacatagcacaatgtctggtacacaggagtaaatgaaagcaggcattatttttctgggcaactcactgtgtatctctggacctctctttttccatctataaaatgggggttcacagcacttacagctcaaatattatattccatgcctgagagggaacttgcagcctctctgtcctctacatcaaccatgtattttctctacttctgtcttttacttttccatcattttatttttaattgtattttttccaaatcatgaacacaattttttaagtgtaaaaagaaatttaaaattctacaatttcagaaccagagagcattttccaatataactttccagtttctacatatccttttttcactttgtaatttcatgtgaacatcttcccagatgctaattgctcttcagcagcatcttaaatagtttgacaacccagagtacaaaagccttgaaaattaagagataaaatatatattatggatactagaatagtttccagttttcccttgatacaaataactctgtaaggcagttactgcgattcaggaagtgatgctggaggcttggaccaggtggaagcagggtggggtgggaagtgctaggactgtggttgctttgaaggtagagctgggaggatttgttggttgatgggatgaggcatgtgagtgacagaaaggaatcaaggttgattccaagtgtttcagcctgagcaactagaagaatgggcttgccattgactgagatgggaaaggctgcatgtgcagcaggtttgggagagaatagcaggaatttggttttaaagtgttactgtggagatttctttatatgtgcaagtggagaagtcaaataggcagctggagttatgagcatgtaattcaggaagatgtcctggctggagatataaattaggatgtcatcaatgtgtagagatggacttaaagacttgagatcaaatgagatctctaagggactccaagagctgcagaactcagaacagcttctaccacatgatggggatcttttgtctttttgctgcaagtaaaaggtgacataggcccctctttctcctaagccaatggtgtagtattgaagtttgagccccacaataccgaatgaactgccacctttcctaacaactcccacccccaaagtccagaactgccacccttactaacaacaccgtgggcgggaaatcacagaaggctttctcagctgaggataaaagaggcttaagttgtgaacacttttaaggctgatttatttacaacctataggattgtgctaatttatgcaccttggttaattcttcaccacaactcatctctttgttacaagcaaaatgagccatgtctactttccctgttttgttttcctttggctgatgttgtgggacaggagcatgagggttcgggggagatgatagaatgcacttgcaattttggctagctctattttggtccctctgactgttcaacaatctctgcagacagagagtaggagaaatgaggacggcaataaagccaagggacttcctgctgggctggtgtttccacctggatgaggacctgagtttccagaggctgggcaacagaccaaggtcaccatatacaacatacccaagtattcatgtcagcagtggggttttatgaaatttcagtgaacaaacaagaaagacacaatggtagatgaagttattaacagaattaaaaagatgaaatttcacctgggcatggtggctcacacctattatcccagcactttgggaggctgaggtgggaggagcaactgaacccaggagttcatgaccagaccaggcaacatagcaagaccctctctctccaaaaaaaaaaaataataatacgatgaaatgggttttgcagaagagaaaggatgtggattggtgagaaagtagtagaaggaatcactgctaactcccttctcctggcctgcgcagtccactttcttggtttctcatgcctgttacatgatccctttagagccaaagtttgcaaaaactcacagccaccctagtgaaagcctggaggttctgcatgtgagcgtgccctggcatggtgttcctcctttggggcatttatctccctggtttaagtctttctgcttctgattctgaactctcacacatccttgagtggaatcaccaaacctctagagttttgatttcttccacttttaaatgagaataatgacacctccttgcagaacttttgggcggattaagtaaaactgcccccaaattgcccatctgtacctggcacttaattcagtatcatgcaccccaaactgacaccagtcatgcctgtcaggaagtggccaagttattttcagccctgcaaagaggaggtggttgagcatcaaaggttcagaagtcattccagaatttcaggataagcccccagaagcagactaggctcttggccaggcttatccagatattgcaccatgcaccagtggtacaccaaacagccagaggaggctcctaaaggagtggttctcagtcagggttctgtggttcccaccctggtgtcccctaagaccctttgcaggtaagaaagcccactaggatcaatgggtaaaaataatcttgttatagctgaggatttctactgatagagacatggctgcaaaaccaagcatggactgagccctagcattggggaacaactttgcattaagatggaggtgtagaatggcgtccagcctgtgccatagaaagatactatgtttgctgggaacaacaaaactgtgctttgtaaaaatacaagagggcatagctgggacagcaaacaattcctctcaaacagcagcacagagctaaagagggacagagaagtagggtgaatagagtgggctattgacttcttccttctgggcttcaatttcttcatttgggcttggaaagattaatggatgttcaactttcctggataacagactcctaggggaatttcatcaaagcttcattcattcagtcattcagccatccattcattcaacacattttgttatgcatctgtgatgttccagacccatgctaaatgttgagattcacaggaagtaaaggggaaacagcctacccttgccttggctcaattgacttcaattctgttatttaacattcagcccaggaagctctcctgacccaccccttctctgtggttagatcaggtacctctatcccatgctgagtgcagctgcacacctgccatctctctgtgcccagactggacattactccacctccaaccagatgtagagttgttctccccgctgcactgccgtccgtggtctgctttacagcttggctgtgtcagtagacatcctcagttagaacaaagtaccctgccttttgttgggcttttccttcacagctgtaattaaataatcatgtaattagttcattcgcttgatcattcagcaaacatttattagttgtttaacattcctctcatctgataaatgaaagcagagatcacatctgacttattcattcctgtgttcctggcatgacgtgtaagagcttacagagtataacggtaataattgccctggacggggtgtttgcgcccctactcaaaattcctatgctgaaatcttaaccctcagtgtgatgggattaggaggcggggcctttgagaggtaattagatcataagggtggaaccctcatgaatgggatccacatccttataaaagggaccccatagagctccctcaccttttctgctgtgtaaggaaacgaaacaatgagatgagagtctgccacccagaagagggccctcaccagaacctggccatgctggcaccctgatctgagacttccagcttctagaactgtgaaaaataaatatctgttgtttataagccacccagtctatggtattttgttatagcagcctgaagtaagcaatattaacaacaataataataataacaagaacaaccactcaacttcattaattcataattcgttcccaaaatctttgtggaacacctgccttctaccaccaaataccaactgggcctctcagggcaggcttcccaggtgcctggataaaatgatgaacaaggcaggtgcacagttctgccttcatgcagcatgggctctcgtaaggtgcttattgtgtgctaggggctgtcctaactctttatgccttatttaatcttcacgtttccttttaacatgtgtgctttcattatcaccattttatgggtggagcaactgaggcacaaagcagtaagtcccttgctcaaggccacagagctcggagacggtagagccagggtttgaaccctgatgatgtagctctagctccctctgccacctaacagagagtgcgtgctctgtaactagttgctgaatgaaagaaggaatgacagaatcccccttttccaggtttgacattcaggaaggctgcccctgccttggtttgagattcagcccagcatgtcaatgcaccatgttacccctcccatctcatttaagcagaccctccaggctggggctggctggctggagcactgacctggaggagaatgtcctttagcaaagagctccatggagaaagtgaggcaaactgcgtgatcaccagaggagtgatgattccacaaacaccaactgggcctctcagggagatcctgggccttctctgggaatgctgaggctggaatctgtgaagcgcgtttgagaattcagctgcagcatgaacctgctaattaggggttgtgtttattttgtgctacataaagcagattagattaactaagcaagacggaagcatttggagggataactctttctctctggcccaggctttctttaactttactcttagggcctgagggcactgaggtcctttctttgctggaccaaaggagacagagtgtttcctggcagggtgcccagagctccactctcctccacgctcaggcagccactgaccacagggacccctggaaggatatggctgcctctaatccttttattgcgatgcactcataaacaaacactcatgggcattttactagacaacagcccaggagctgacaccagctcattttcaggcacgcacggccagctacagatgaattttaaaatgctgctgaaaactagaaaagtattaaatgacttgccagggcagaagggaagaagccatgggatgccctgccaaccctgaggcaaaatccgccccgtggcctgtggggcccacctgattgtctctgcctccctgtcccatacctcagtgtacctgactgtctttgcctcccaatcctgtacctcactgtgtgtttcagccacgctgcctgctttccattcagtgacagctccttcctgccccaagctctatgcaaatgctgttccccctttccctccttcctcctttcccatcctctagggccccctcccctattttaccctatctttggagaccctaagctaaggcctctcatagaggacatgagctccccaggaatatcaaagacagctcagatttcaggaagggggaacaggaagatgcactttgccaagcgagggcccagtggtgtgtctccaggtacctctgggtaccaggtgctctgctggtctcagtcccaagctggcactcacaggaggcaggggcgtgggccttgggagagcagaggccactgctggctgccattaccatttcattactcatctgctaattgtggcaaatggggattttacagctcccctggccctcgctgtgggctgaggcagcggtttgatggaaagggaatggaagaacagccttggaatcttttaagaaggcccatgcgcctgcctatctggtttatttggaccctgcaagcctgcatttgggtccaacagccatttggccatgaggcggggcgtggtgatgggccttggaacccaaacactccaagctgaaccctgcgtctccccatctggagagaactcttccacttgggtcattcatagtgggtggccagtggttgccactgggtttagaagagtgattgagtcacgtgctactgctgggcagaccctctgagaggagggtgagggggctgtgaggagacaccaggcttcctcttggagaccatggacccagaggccagtccccaagtcctaggtagctgtgatccacagcagcagagagccaagctttgaggagcacaggctttagaatccacggccaaatcggagctggctctctaagtgatgggacatttagtttctgagttttgggtaagatgaaattagataatgtacataagtgctcagcaataaaggatccagttatcggggaggcagaagaaaattctcacgccctgtgcagctcacagtttcattcttgacctatcttatgcgttagtggggatatttgaggagctccttaccctatctgccactctgtaataataaccaataattatatctgatatcagtgagcacttattgaagtccaagggcttcagtcttttgtgtctggtcttcacaaccaccctgcacataggccttctgagatccattttccagatgaggaagcaggaatcagagggaataagtaacgtgccaacggtcgctccagcagaaatgcaaacccaggactgtccctctgcatggctctggacccttcctttctctttggccactatcattcaatcacttttgtgaagaactgtagccaactactctctctcccaccctctgctctgagaggcagaatttggcaggggctaaaactggggttttagagtttaggcagatgggtttggatccagctcagtggcctactagctgcatggcttggacagtcatttgcccttttggggccacatttttgtttgtaaagtgaggataaggcctgctacatagagaggtcacaagacagtaaatgagctcaaggacttgttggtgcccgacatacgccagatcccacttgccttcctcaaggatggctgtgccgcttggaagccaccacacagcctccctcttctgcagaacagcaagaaggtgggagacaggctcaaaatgaagccacattgcacccctcacaaggcattcgcctccctccatcgtctccaagcccaccactggaggaggagcccactgccttattctttttgatagagagaggagtggtccagggagcatctgcttctgtgtttacaggagtgtggcctccagaggtttctgattttcagcgataaacagcttagaggatgaggccccacaccttcaagaggctcatagtgtcagcagtaaggggccagcaacagtgaccccgccttcttccctcctcaccagccgggggtatccagagtgcccctggcccctgctggaacccatgaggccctcctgagcctcctcaccactggagtgccactggtgtgtgtccagccttcagatggtcactgtcacccccactggcaccttgtggccagcatttgaagtgttgggcatgcctttcttcactgtgatacaatttttctgcataggagaaaaatcatgacacttctgaataagggagttgctgtgttattctgtagaagagaacatgctctgtccaagctgttatttcacgtctgttcttaagaattgtcactttaattccccaatgtcaacagaatcctgatggcatggctgcctagagctcagcgtcctccatataccagccccaacctacctccggggtcttacttgcagttattattattgggaataatgatggctgttgattaaaatgatcatatcatccacagttgaggactcacaaggcatgaggccatctcctaagcactcgactcattatctcactgggttctcattggagaattcatccagaggaagcaggtgttaggtcccattttgcagtgagaagtctgcagccaggagagggtacctcacttgtccctgggctcctagacttcaaagctgaagcttgtgctgctctgttgaccatcactccacacccaaggcccccatctcctccacacgaactcccttctccagtgaaaaccgcctcctgcccggtcctcctgtgtgcctttcacatgccttccccatgcttgtcaggctgttcccttgaccaggaaagccttggggagcagcaaggtgaaatggatggggcacaggctctggagtcaggaacagtgcatccctcctgttccacttcccagctcccaaactatttaagctttctgggcctcagtttccctacctggaaaatgggaagatgtcatgtcatcattgatttggtgaggcaacatacacaaaacatctgggtggtggcactggctcacctgttgaagttctgcctgaagctggaggcccagttctgcttcctctagagcgaggccttctctgactaactcagtctggtgacatttcttcttcttccgagccactcttcttctttctcctctaggaagtccatgtgccatgagggcaagggcccccacattgacttaatgccatcgtttgcacattgcaagagcttgatcaaggtttgcaaagcaattgctcttcaggactcgtcaccatctgcaccccaccttcttctccagcatcctcactctctataccccagtgtcttcactcttcacctcccatcgcccactctgagcctcctgtatctgactccctgtgtccccagacactgaagttctctcttacctcctggcctctctgtttataatgccttccttcacttctttccctgggtagcttctggtcttcctttaagatttagcccaggtgttttctcctccttcaggaagtcttccagatactccaggctggttagatactcctcctctctgttcccacagcctctgacttctctcttagcacttgtcaacctgtatttgtcctgtttgttcacctctctatctcccctggtaggatatgatcccctgagggtagggaccctgttgttgtcatctctggagccctggcatttgacatggtggccacgaccaagccagtatttgttgagtagatggatgactggaggaatgagcacctagctgaaaaattctgcacatctgccacttggagtatctgctggttgggttatgcaacgtctgtgtgtgtgatgtcacttggccacctttacctttgcatccaagagactgtgctagcttgtcagggaatgggacacagtactacagagctgtgtgtaaatctgcatgtgcgtttcgtgcctccagttcaaaccttgttcattagcacagcaattaacagcagagcctaatgacagatggcccggctctgcacctgaacccctggctccttggcaggcttggagcagggcaggcacgtctggcatggttgatgttttcattgatctagtgagttcagctcccagggctgccggctatggagacagtgagctgacgtcagtactggctttggtggggggctgggcctaaaagggccaggcttgtaacagactcttggaaagcttgcagaagtttggggactttattgtttttatctttttttaagatattaatttcacattgggaagtcccagcaccccactctcaaattttcctaagctctaaggacttccctaggagatggtgtctctttcctgctaattctttacaagcttctaggctttctacaattgttatttaggattgtgatatccaggccctttgacttcagctaacagacacagcttcgtgtttagagtggcatataagatcagtgttgtgtaaacacaattatatttagcaagtttggagatgtggggtttttttcttcctgttaatcccgggtttgaaatggcttcctagttattaccctgtgaatgtcattcatttctccataaaagaaatatcaaatttgtgttcaaatagttgtctgggtcataaattcaagctaaagtgcagtgtgtcctaagccatagcagatttcacagaactggagttcattagagctagaaaggatcttactgtccaacctgtgtcattgacagatggggaaactgggccccagagaggtgcactgatttgcccaaggacacatggcaagtaggtggcagagctgaagccacgtgttggtctccagtggcccctttcctacaccatgtttcagatcatcagaaatgctcaggctttgctgtgtgccaatcccaaaccactctagaatgaatttcttaagtggtgttggatatgcttccttgagcctgccaccaaacttggtctgagtgaaatagaagagggggtgcaggcagaggaagtgaggactgcggtctgtcgttagtgatgtggaaaccacgcatcttctttacgaaggtgttgacaagtctgtgtgcccagggagccacgcaggggaagaaggttagaaggctgggtagtccctgaggtaggaagcaacttcagcgagaacctgcccatctttgcaaagtgggcacttctctcagtgagggggttgcaggcaaaactgcggggatagtcttgttcccacagaagaagtggttggagaaatacctatcacatcgtggaacagtgccctcattctgcattttcttatctaggagacaaaaaatgcctcctggagataacctacctgccctcccttcctttgaggaagtttaacctttctccctcattgatatggaatcccaggtatttatctgatgacctgctgagattggtagttcagaaaaaccagtcttcaggcttaggggaagctggacgtgtatcctagggtggaggcccaggtctcggggacaggtcccacctctcctgataatgttccccgcctccctgtcaggaggtgcaaaggtttgggtgggcattgtgaaatgttgccccagaagaaggtttccttctctttcagcatcatgctgagaggtccacacatggccctactgccacagtgtcacgaaggcagacctgtcctttctgccttgtctttttaaaaaaatcaccccagggccattacagctcctcctggttcctgattcactgtgttttaatcaagcataactcttagaatgagcagaacatgacttcatttttgtctctcagtgttttcttctcccctgcagtgaaaactcaaagaggccccacaatgttttcgtcctctgttaggtaatatcttgcataacttgaagtcacaaaacacagcctcagttctgtaattggaattcccagtcctgtgtgctaattccaactctgcatttgaattggagatcaatcttctccccttctctttctaaagtcagcttcagagtcagccttgtctcgggggaatgaatatgattggcctcttatctctttctctgttcttttttcacccattgtttactcactgcacactccaggattggatgaagaagaaggggaaaagagggaaagacagttcttacttgcctggtgtgcttgtgcttattggcagacatttaaaacccactctgcagtagaggtctttcccactttctcagagtccccaggatggctggggaagctctcctacagtcccctgacctggctgattgcacttgatcatgaggccaccactggcttggcaaccccttaggaaatctgaagttcattccagctttctgctgaggtccattacttccctgggccaactttctgttacacaaagtccatatctggaaaataccatttttgtacccacagaccttgggagtaaggtagtggtaattcttcttcatcccagctttccttctcaggccaacattcctgaggacatcctaggtccctggggttcatggctccttggctgctgctggggagggagagttggtttatttctccatgctatggcatctttctccaaccctcccacccccaccatctctattgtttatctctcttgatatggtttggctgtgtccccatccaaatctcgtcttgaattgtagctctcataattcccacgtgttgtgggagggaccttgtgggagataactgaatcatgagggcagtttcccccatactgttctcatggtaatgaataagtctcacgagatctgatggttttataaagggtttccccttttgcgtgactctcattctctgtagtctgctgccatgtaagatgtaccttttgccttctgtcacgattatgaggcctccccagccatgtggaaatgtgagtccattaaacccctttttctttataaattacccagtctcaggtgtgtctttgtcagcagcatgaaaattgactaattcattgctctttctctctctccatctttcattatctcccagccgatagccacactcccttgcctttaactttcccaagtctgtatcaggcaccagtccaatgagcttcaactttccagtggacagacatcaggctctccagcccattgaaactgcttttcctagcctggacatggtagcaccagccccacccccaccccgtccactcagcaactctctccgcatccagcactctcttgaatttatcagatgccaatcatgaacttctgcagcttgatctctcacagtattttgcaaagtatatgatgtctttttgtctgtcttagggtccacacacttggaatgcactctgacttaggctcttgatttgcatctggggtggtcccttctgactggtcaagcccacctcccaccagcactcctacagaggggaattctacagacctccctgccacttccctgtggggttgagggtgcagccaagtcacaaggagatagctccctgccctgacacacacacacacacacacacacacacacacacaatcctgggaatcaggctgcaattgtttctcttaacaaatggtagggacatggcagtggggaagttttcccagagctttgtgaaatcaagccacgttccctgctgtgtggtacatggcaggcatgaaggattaataatttttgtatcgaggaaacatagcacactcccagtgcttcttctcccaccccagtttcatgtttttaatctgggaggggaccatggagggacaaagggaaaagaaaaatggtagcagaaaaggaggtggtttgaggaagatcttttgcataaatctgctgtaaatcagccatcatggaccctgggcagttcttttcatgaccttctggtctttgccttccctcatccccagtaatttttagtgagaaggagcattttgcagtttagggacactgctgagagaacagtgcgccatgtctcttatttttcatcctttactgaaactgcaggtgagtccatttctcatacacactgtctgacttccaaagacctgaaaccccatcacctcactgccaaaacagggatggactccggcaggtgggcagaggcggctggaaggcatttgccagctcccttccaaaatgaagctagctttcctttagccttcaggctgccaagtaaaaagtctataaaacagtggttcccattttttaagaatgggaaggccgggcacggtggcttatgcctgtaatcccagcgctttgggaggctgagatgggcagatcacgaggtcaagagatcgaaaccatcctggccaatatggtgaaaccctgtctctactaaaaatacagaaattagcctggtgtgatgatgcacacttgtagtcccagctactcgggaggctgaggaaggagaatcacttgaactcgggaggtggagtttgcagttagctgagatcatgccactgcactccagcccggtgacagagtgagactccatctcaaaaaaaaaaaaaaaaaaaaagagtgagtagaaacttattttgccaagaaaaaacattaaagaaaaagaaacctaaaaagtgaacatccagcaccattattttatagaagaaagggcgttttggcacgtgcgtgcacacacacacacacactccaggtcggaaagaacttaatctcagaataaacactaaaaaaattagatttttgtataaaaactcccaatattgtctttatttttctcatgttattggtgccccatgaaaacttcactgtagtctgttccttggattagctcttggaaagcaggagctgaagttactgagttagtcataaagttaagaagcatttagatccacaaacagctacatctcattgcattgattaacatttaacacatacgcatggttgtctagttcttgctgggcagtagatttagtgctgggggtacagctgctccctgagagagtgtgtacttgtgtgaaaggacatggaagtgacacctcctctgggaggccccccaataccatcccaattacagtgtcagttgagacccgccccaccccatccccagtaattctctaacatgtcgcctttttctttttctttggagcccttacccgaatggaagttaccttgtttatgtctttatgtcctttggggcctgtctccccacctgggatataagtcccaggggtacgggaacttttctgccctagggaccactggagcaccagcacagaggtccagggttccccttggtggctgatgtggggtggaagttgctgagggaataggacagggcacccccttgtcctgagcccctcacacagtaacctcttcaaatcactcagtgaccggtgaagagaccagcgggcctcctgccctacataggtgttctaacttctgaattagttgggttccagtcagaaagataatttagagtggaacacaaagcgtcatttttctttacagaaggaaaacaaaacatcttttttactaccattgacctcctcctctaggggtgtgggaggttgctggaaggtcatgggatatttcgaatggaaaaatcagcatttgtctgtctcccttcccccagtggaaaccatcggcccaacaaagcacactggtggcagctggagggtcagaagtcccctgagcaagtcaccattgtcaccactggaagtggtgaggaagatcacttgcaggcaggaccatagcctggcattagcattctggtgaccccagcaaagaggcggtgtggggactgcctctgtgtggggtggggtgtgattgtttcttaggaggtagctgtagttacaggacagcctttgcaagctcctaccactgtgtgtatccacaggcaggcagggtggcatgaagctcaaagcagcaccctgggcatcacgaggcagggactgagctctgtcaggttagatggtaataatgcaaggtagcatttgcttagaattggctatgccctatgtgctttacacgcatatcatgcacaccagaagggctcacagcaattgtatgaaatagatgtggtcattatttcctcttcatgcctgagaacactgaagctcagaggggttaaatggcatgcccagggtcaccctgctgatggatggtatcacgtggacttgaatccaagtcttcccacccccaaagcatggacaccgctgtgcttctgtctgagttcacctgccacggaaatgtgctgtggttttgtgacaagctccagagctccgtggctaaatgtagaggttggaacaacagtaataaagtaataaacgataaaaaaccaagcacctgctatgtgtcatggactgtgcaggcactgtatgcacattaactcaaaacagccctgaaaggtcggcctaattcttccaattatacagattagaaacaggctgagagtttaaatgaatctgccaagtcccacagccacgaagtagtatattcagaatttgaactcaggttagtttgacttcaaagtcattgctcccttgaaagcattatcctgtgaaaactgattcactcaacaaatatttatatatacttcatttaccaactagtatttatttattaaatatcggtatgtatttcaacaaatatttataatattcatccaacaaagattactactatttctatgtatttatgtatttattgcctggcatagagtaggtattgaagaaatatatagactatgctagagagtagggattaggcactaaacatgacagataaaatctttgccttcatggggctcacattctggtaggggaaacagaagatagacatggaaagaaagaaatatatgtaatagcacctaattataagttactttaaaaatgaaccagagtaaggaggcagggagtgatttgggcagggagctaaggctgttttaatcacaggctcactctggctgctgctctgagccaagaccgtaggtagtcaaagaagcagggggccagttaggaggcaatggagataatctaggtaagaaacaagaagttcttgtctccagataatggtagcagattggtaggaaatgattggactcagaatttatttttaagtgagccagcaaaatttgttgacagattggatgcagattacaagagaaagaaaggagtctatggtaactccaagattttggcctgaacaactggagggatgggattgccagttgctgagacaggggagaatgaaaggttgggaattcaaatggactcatttgtgtttgagatgtctattactagtccaagggacatgttgaaaagccattgtgatttttgagtttggaattcaagggtgtgttctaggggtaaatatgtccaatatttaatcaaaccaaagaggccactgactataagaccattattttatttactaccaagaaaaagcactgtccattaagctaggatacactgcaacttcagagatattaaaatgtggaaaaaatgtgtggtttagagtcaatgggatttagtaagtttgggagtttccagtatatggatggtattaacagctgtgagagttgaggaaatcaccaagggagtgatagaggataaagagaaagaaaaaaaattaggttggtgcaaaagtaattgtggtgtttgccattaaaagcaatggaaactaatagaagtataaaggactgagcactagcatggcaaatttttgagcagggagattcatggcccatttcgagcccagtggaaagttgggcagtgaaagatcttttctggaataggagccactgtggagctgctctgcagggctttggtctggggactcaggactcacagatggccagaattgtaacacagggcatcacccagcactagctgtgtggcattgcccagaaaggccaagcttttcagctcgcctggttcactgctggactgttttctcatcagtaatatgcaagtataatgtctactctatcatctcaaaacccagaaaaaaagtccatctgtttctttctctgggcctcaacatctgcccctataaaatgaagagtctggacagggtgatttctaattcctcttccagctcaggcataacaatactactagctgcagtactttgaacatctactaggtgatttatattaatataatcactaatcatcataaacggccatgtattatgattcccatttcactaatgaggcaactgaggccaaaaagggagcaggctactcacggtggtggagccaggctgcagactagagtatttcaggccattggcttaaagccccctgcctccctgctgggattgatgcataattcttgagctaaacttagtagcatgtggctggagcccaagggcaaccccttcttatgacacgaggcaacttcaaagggttgtcccacatacaaggggaagatagtttgtctctggggaccctctactttcatgggaatggagtgttcctgcaaaaaggtcaacagaaaggaaggcaactgatgttggagtgtagaggtaactcatccccaatcctgtggactctcggtttagtgctctttgaccatattatttgctagtcaaggaccagtgtccacacatagtggtactgaatgggattcctttggtcaggttgttgtgagaacgtttcctgagctagaggtggaagaaggggaaaagtgggttggagtgagtttcagtgatgggagaaagcttgttgtcagtctaggactaatcaaggagctgagtagagtcagatgcatcaacatttcaaccaggaatatagtgtagaccggggtttcttaacctcagcacaattgacgtttggagctagatatatctttgtgatggaggactgtcctgggtattgtgggctatttagcagcatcctcggcctctacctactagatgccattagcgacaactccccatccccagctgagatgaccaaaaatatctgcagtcattgtgaaatgttcttggggtcaaaattatatccacccccttcttcaaggctgacaaacattggtgtaaacaattctctctccctcctacaaaggccatcagctgaccatgtccacacatgtcctgggcatgtgtgttcctgggcattttcctccctctggcatcctcctgcagggctgggtgaaaccccaatgaaaccaggttctccctgtcttttcagtcattgtcctcctggaaatatcacatactgaaaccttctctgagacgtgcactttctctacccccaccccctctgtttctgtctgtctgtctctctctctctcccctctgggaactatcttttttttttttttttttgagacggagtctcgctctgtcgcccaggctggagtgcagtggcgggatctcggctcactgcaagctccgcctcccgggttcacgccattctcctgcctcagcctcccaagtagctgggactacaggcgcccgccactacgcccggctaattttttgtatttttagtagagacggggtttcaccgttttagccgggatggtctcgatctcctgacctcgtgatccgcccgcctcggcctcccaaagtgctgggattacaggcgtgagccaccgcgcccggcctctgggaactatcttatccacagacacactgaattgttttatctcaggacatttgcacttgtcaccccatgccacccttgtggctcctcttcatttgggtctccatttttacagccccatgtcataggccaccttgcttatcattccagttactccttactgcatctctctgcttagtgcctgcagagtgttggccaacccctggtagcatcgtgtttatttgcttatttgtttattgcttgtctcccccattagactgtgggatctcagagggcacggacctgatctagtgggacctgatccagtttgtcccctgctgtacccacagtgcagacttcagtgcatggttgtaatcatgggtccaacagctttggtgaacacatgttgagcacctactcaacagcaccaggctctgtgctaggagctgagttgaatagcacagtctctgcttcctacgagctcagtgtctcatggaaggagagcaataaaagaggtgagagagagagaagtgaaggagcacagagaaaggaacaagtgaacctgtcttgcagatgaggaaagatcttcagtttgaggaaaggaggatcacacagtatctgcagatgcaagaagatacaggggatcatggatggctcccagggagcagggaaggagcaatggcatggaacttggagcagcagggctccctgtgcaatgtttgaagcagcagaaaatgagggaggtggagtagaggaggaaaactgagagaccttgcattccatgccaggaaacagaccctaacctatagcaaacaggacccaagaggcaatgtagactagtagttaagatgtaagctttgaagttaatttcagaccttggttcaaatcttcactctgccacttgtgcactgcatgactggccagcaatttcacatctcttaacttcagttttatcattttggaaatgtggttaatatttccattgtagggctgttttgagtgcaaaataagtccttagcacagtgcctgggacataataagtgcttaataaatcattgctattcctgttgatgtggttaacaaggagccagtagagattttccaagcaaatgaaggacatgatagatttgcattttagcaagattgtgcaggcagggctgtggagagtggcttggcagtggctctgaggagatcaggtgagacaggaaccagggaaaacaggaagctgctggaatggaaagagaggcagagaagggggtttgaatcctgggacttggagcagctactgtgggaaccttggtagcaggagatgcactcatactttgccctctgagtaaggctgcaggggagtagaagaggagtccccaggcccaacaagtaatagcctagaggaggcccaggtggggaactacagctcagcctgacctgggttcactcaccagctcacagcctttgcacctgggaagatgcagccagctttgcatttcaggccatcctcatggtgagaaggggtggcttgccatttgtaccgggtgatatacttttaattaaaatggtaattatttgagcattccttaaaggtttactttgggaatttgccgtcttgaaagctctgccttaattagtattctatttatcccttattaataaattatctctcagcggtttcttccacctcctttgatcacagggtctcatcattcctgagctgaactccattccctgttggccttatgggttcagtgggcccaatcaagcctgattcaggggtttgagaattaaagttctcaattaacgcccaacagcgtggggatccatcttcttgtggtccaaatgagccccaggaaagcacacaataaatgtgcctcccagggttgagtatggggaccttctgggtgtagatcttttgctgaagcttctagaacagagcagactgggccaaggcagtggccacagatacattaggacccagtatcataactaggaaaacagaagcagaagagccaatgggtcagctcataggcttcaacccaggctcagagggggttaagttacttgattagagtcacaaagccaggtagtggaagattagaaagctacaatttacttggcaatgttacgtgccaagtcttatgttgaatgctttacgtacatggtccctgttaatcttccaagccatctaatgaggtgtaagcagttttgtctccagtttccagaagagaaagccaagccttagtgaagtaaatcaactttcctagagctatccagctagtcagaggcccagctgacattttggtcaagctctgttgatttcaaagatctctctctgtcgactgcactatgctggctggattaggactgaagtgtccccacttgaacaccactgtacttttttctaagccccgtatggaaggtgcattagatccttgctactgattgtggtccagggaccagctgtaccagctcactgaagtacatgttaaaaatgcagaatctcaggccccaccccacaccgtgaatcacaatctgcactttgacaagactccccaccatgtgccaatacccattaaagtttggaaaacaaactggagctttgatatttgttcagcacttactactaatgcttacaagccttccaagatcaatgttattcctattgaattgataaggagaagttaagtgacttgtcccaggtcatatacccaactggtgggcagactccaaatgtggtatctctcctccctgacctggagttctagaagccgaagtctaagattatccactagttccaggtttgtgtccttcacaaccttcaggaaatgataatgggggctgggagccattcttaccattcccaaaagcccagctggtatattctacttgatcatagtcagactagagggacatgaacttgggcacaaacatcttttccattgacaagaattatagtagaccagcatggtaactggttatttactgaagagcaggagttcagattggcaattatatatgcttttgattaataaaaaatagagacattaattagttgcctttcaaaaattcaacttgtttaagagacaatgtccttgtgaggtctatggtgggaaggaaattataaaaagggtccctggggatctaacaattcttcacttgtgttgaaaaagaaatcgaggagaactgcaagagaatgttgatgtaggcactactatatgtgatattttatttaattgtataataataataacttttctagagctatccagctctaggtcaataacaacaactaataacaataataataataacaacacccaccatgaataaactgcccagtgtgctaggtagtgttctaagccaacctcacaacaacctcacgaggaaagtctaatattattatctccattttacagctgaggaaactgggactcagagaaatcaagtaactttcccaaagcgtactacaaaataaatgatgaagcctggattcaaacccaagtctaccaagacccctttcttttctcagtaccaagcccttcctgctgcatggatttgatttgctgtgcagtggaagctgacagtcagtttcagtttattatttcagtgacaggctttagaattggctcagcagccaccaagtggactgtgttcttttgcttctgctcttaagtgtattctagatatggtcgcctttactatccacttccagactggctttccttagttctagacacaatctcacaggtatatctgatctagtctaagtgctttttaaataaaatagaactggattccagtccctgctctgctactttattgtgacttgggcaagttatttaatgtttttaagtctcagtttgtttatcagtaaaatggaaataataatagcacctgcctcataggatatcatgaggattaagaggtgaaatatttgtgaaggactggcctaggtgatgcattttgcagggaaagcacctgagtcccaaagaaatgagtaacttaccaaggtcacatgactgttatgagaaggagagtccagaactcagacctgggttccttactcacagtttcttctgcagcacctatgctctgcagcatgtctgataagaaaatgccagacagaaagcagctcagtccaatagactctcttggtttgttttttctggttcctatatcttcaaatgtcattgatattggaaggatcctggtgaggtccaataacgcagccaagctgtgacacatctctagagtggcctggcccaggtggctattgtcatcattgagcttgacctttgcctcttccctgagctgtgaatctgtggaagctcactgttctattctagcacactcctctgtttcctttttcttttctttttttgagacagggtcttgctctttcacccatgctggagtacagtggggcagtcatgactcactgcagcctggacctcgtaggttcacgcaatccttctacctcagcctcccgtgtagctgggactacaggtgcacaccaccacacctggctaacttttgtttttgttttttttttttctgctaagatgggagtctcactgtgttttcctggctgatcttgaattcctgggctcaagcaatcctcccacctcaggctcccaaagtgctgagattacaggcgttagctgccaggcccagacttatttttcaattataactttcttttttttttatgctttagtgtcatagtctatgtgtttgtgttttatttatgtatctttttaaattgaactttttaaatcttgaaataattgtggattcacatactattgtaagaaataatatggagagattttgtgtaccctttacccagtttgctccaatgggtaacatcttgcaaaactttagtgcaatatcacaaccaggataatgacattttatatatatatatatatctttccactataatttaaaggccacaaatcatggactttgtcttgttcaatacaatatttccaatacttagaacagagcctggcatataataggtacttggtaaatgtttgctaacagtatggctaaaaatgtaatgcaagagccctctgtcatttctcatccctctccccttcccctgaactgtaaatggttctgtgatgcccaggcagccttgcctctgcaacgtcacagttttctctaattctacgtactgagcctcattacgatcagttagatcaatggtcttcaaactgggggtagatgaagattttccaaggggtgtgcaggcatgaatagttgaagggaatctatttccagatctcaacttgtttgtctactcgttttcaaaattgatctatccaagaagaagatctgtccaagaaggtttcacagaggcccttctcccacttgataaaaagtagatccctcctccatcccaaaccttgtggtgtgctttatccaattagggtagctcaggcttgtgtttttttctaatcacattgtgaaatacttattctaattatatttaatattaatcttatttcattgtaagaatgtatacaatttttcactccctgttaacacaaagtaaacttaggtacatacatcatggtaagttttagagagtcgtttaacaatgtgcaaaagagtccaaatgtttttcaacattctttttcttaggggatgggagcaaaaagattgaaggccactgagacaacacagccatttggaaagccattatcagctgccattttgattcaagatcgaatgtcatggacattttgaagccttttcattgcatactgaatttgatgcaatcagtcctactctctgaaaagttatcaagaagcaggcaggctacaaatgctcagggttgaatagttctcttgaaagaggcctcactgtgttcagctgataatcaaacgaatggctgcattgagataggtcgtggagggggacccactgcttccccatctcttattcaagcttgggctctgtttctgtcccgataggagcacataatcccatcagtgccaatgggagttatgtgcctgctttactggagacaataggctgactgagagggacaattgttcccagcaactgagggggtaaacacgattgaatattcctagccaccatccctgaagggccagactgagccccaaaagccctttctttgttagcttgcagagccagggggccccgcctgccttcatctcctgcagtggctgccaccacccaccttcagtggcaacttgtccctgagctgctcctaatgtcccaccaagactggttgccgtcaaggtcttctagctcctctcctccttgctcctcactctttctaaagacaagcccaagggcccttctctatttcattcttcacaacaaaattatcacaacatcagcaagaataattgcatccatttattctccacttactatttcctaggcactaaacattttatatacatttgtgcatgtaactacaagtactcatggtgattctgcaaggtaactataatcattcccattcccattaaatgcagcaaaatgcagcctaaagtaagtcacacacctggtaagttgcagaacccagatttaaccctccaaccctccccatcccctgcaggggctattagctccaaagtccatgctccaagttctgctattttcccaaagtgtgtttccttcaagacactctgagacaaagcttggaaaatgctgtagctgctccccctgacccaatccctttcttggagattcccaatgcactttagtttattttttaaaagctctggccaggcgtggtggttcatgactgtaattacagctctttgggaggccaaggtggaaggatcacaaggtgggaggcaaggttgaaatgagctgtgattgtgcctctgcactccagccagggttgcagagcaaaaccctgtttcttaaaagaaagacaagaaaagaagagaagggaaaaggagggaagggaagagaagacaagacaagagaagagaatacaagagaaaagaaaagaaaacaattctgagaaatcctgcaggaaagaatcctgttaatgttgcttaacttggtacttctcaagtatttgtctttttaaatgtttgcataaaacacattagactttgttaaatgctaaactatattattatgaggaggagagatgctacctagaggaagttatacatgtaattggttcttgcattcactgctactggaaccagaagtggaggcagatgagttgaccattgctctggatttggggtggtggcaagggaatcatagcaacagcacatggctccatcttccggcatctactatcccaccctttctaccaaaaatgtgacctgctttcccatggcagggagaagacaaattgttctagaagacaggaaaggagagacagaatggctgtgttgaaatgattgtcctgggatggagcgaaatttaggaagtgagagttttaatatagatgaaggcgttgggccatgtggcccatctttgggaactgccagccgatggttggcaaatgacaacccatgtgactctggctgtctctggggccttctacaggagcaggctgaggccaggactcctccactgtgcctgtggtctcctcctcccacacaggggatgtactcacagctgaggccccttatctttttgacccacttgagagaagggacagggcctcgggcatcaggcagagcataggcccaggctgatgtgggacatgccacatgccaaaatgacatgtcatggggatttgtgggcctcgctggagccatttcctccagggggtcattttatttagttccaattggaccctgtgattggtctcagccctgggccacctggtgtcctggctccatatggcaatgactaggaagatgccatttttcaattgaaatatgccttgccttactgtggatcagtctgtaattgcctttggctggaaaggggctttgatttttaaaactaagctagaaagtaatttttccacttttgatttgctgcactgatgagtcagtgtcttctctactaattcacactgagagtcacagcacggaaaagacagttagagtcttagaggtcggcaaagcccaccattgacctcatatgggaatcccttccacccacccttaacagatggtcttttagcctctggcccagcacagccacagacggggagctcactctctcactgtgcagacctgactgctgttgtccaattcttggcaagtttgatcccatatggagctaataatgggtaccctttaaggaacactcaccacctgccagacactatgctaggcatcttccatgcctatcttatttaatcttcataataaccctctagggtagatactataatacgattatccccatttctcagaatgagtgaaacaagtcatagagggtttaaggaatttgttcatggccccaaggcagtaaatgatggagtcagtgaattgaggaaggatcactccagagcccgagctcttaagcactttgctccgctgcccagagtaagaatagctaacatttgtggagtatttactaggggtcaggttctatactgaggggttccatatatactgtctcacttcattgtaacaagtcatgaagtagattttattatgctcattttagagatgaggaccccaaatgtccagaggttttaattcatcgaaggtcataagcagagctgttactctaatccaggtcattttgaccctaaacacatactcaattaatatctctaagtgctgcctataaaatattctacaggtgagaaaactgagattcaggaaacatggaagtttgtcaaaggtcttgagctagaaggcaagagccaggaggtccgcctgactcagactgtgagcaccaccttgctctccccttcacctgaaaccctccccttcctgggtacctctcctgccaccaggaccacagaggagaaggcaggttccctgatcagggatgaagcccgtttccctttaataaggtttccatgtcactggttgagcatgggtccaatcacctaagtgtgagaactgcctgattagagaaagtttattatcttttccaaattctgagattctaagagttccttcacccatccttggtcatctttaagatagggccataaaaagcaatataaatttgaaggtcagaaagccctgggttcaaatccctgctctgccatttccgatatgggtgacttaaagcaaattgattaacctcgtagaagctcagtttccttgtctataaagtagagataaaaatgactgcctggtatggtagtcagtcttcctcttttggaagtttgggcttcctgctgaaagtcctttcaaaatatatctatgaagttccaggaactagggcttgaactgccgatgatgcatgctgtcaaccaacgtaacagtaatcattgctatcatcagtgaaatgtcactgggctttttgtgtttgtttgcgtggtcctgtatctattctttttcttttatcgcaccaaatctcaccttatctcactgacacagcctctcctcctcatcttcctcttttgggaaaggttcagaatggcatagggattaaaaaacgttcaatttggagtcagatattttgccatttttgactgtgtaactttatccaagatagctaccctctatgagcttgccttcctttgtctataaaaaaggagtgaaaatacctacctcccttcataggatcattcagcgttaaatgagatactcatagcaggtgttcaaaagttacttctctttctcttccttgtcctctcttgtctcacttggctaactctgaggctgacctctcaactgcatcaaatactatttgtcacctcctcctcttcctcttatagctccccaagtatttctagagtggccatgctctcggtttgagctgaggataatccatcaattattacaatgaatgtgagtgtactctgtagccttgtgaaaagtattgttcaaatgtaaactacttattttgctcttcctggccaaagcttgtgaatatatacttactacaacatgatttgcactgtattcattcaaataatattattgagcatcttatgggtttgtggttctcaatactgtgcctggcacatagtaagtgctcaatacatcttggattgctaaaaaattattgagtgtatgaatgaatatttctttgaaatagcaattatgttggcagagttgatttccatcaaaaccgagtgattgaaggagaatgagaacgagatggactttggtcctagactctcttgactctaatctcgagttcttttcactatcagtctttccaataccagcagaatgggatccgtgctgtaagacagacacaggtttcaagggtgacagtgtagactgaggccaccataaagatcaggttcagatctcacatccccaaggcttactggtcagtaccccagttagtagagtttggcatctagagatctgagtaggcatcaaggcctgagcttctgcctcctggattctgcctccctggagtccatattccacacatgggaaattaaagtcaggcagggattagctgggccacattccacccttgaacacctgtctatgttgacagcttggagtggggtacagaattcatcctctggaagaaacagggtgtactgtgcagcctcttcccagttcctcaccccctggctgcttacctggccaccttatcctgctagacacagtgcacagaaagcatggaaagtaagaagggaattagggacataaaagaacgagccccagctttggagccagctagggctggaggtgagcctgcccctgccacttcctagctgttaagattgctggcaaatcttccaaactgtctgtcagcctaatttccttgagagagagtaaagcaaaggaatgagaatcgtagtacctgcctcaccaaaatgttgctagggtgtctgtgtcttggctccacacatgtggaacacctagcagatggttgggccaaagtaaatgtcccactctccacctctctaccctgctttcagccccagagacagcaaagcaaatgtacattggagttgagcagttgccttaatcaaagaccctttccctcccatgaagtcgttctggccttgcagttctcattcatttcttgtgtacctgctgcacaccacagccctccacgccagtgtgggcatttattattgggcgctcacaggagggtcaagctgctacccagacctaactggcaactgctgtaagcttcataaggtgggcagatttgtgtctccatactgcctccaggggagcttggtttgggccgggcagccaactgaattattcatgacatgtgtgctctctgtcttttttcctccaagcctctttggtttagagactgatatttgtctgcatgtggcctctaaggacggctcccttcctgtgggaagactgccaggtggatggtgaaaggaagaaggtatggggcagtggtgtccctttgaggtggaaagcttgcctggaagcctcattcacttaaagggctggcatggcgcaaatgggagtcagtttctcatcagacaatgtagcttggagtgagtagactgaatcaggaaagtggtagtgcattttatttcctagagggtactaaacacttggtgaaatagtaagaaaactaagcactagggaaatctcctaagacgagcttgtccaacccgcggcccagggtggctttaaatgcagcccaacacaaattcttaaactttctgaaaacactttgggattttttttgcaggtttttttttagctcatcagctattgttagtgttagtgtattttatgtgtggcccaagacaatgcttcttcttccaatgtggcccagggaagccaaaagattggacaaccctgacctaagaatcttcagccttttaagcagaactttttggtatttgtattgtattgtagtttgtattatatgcagttataattgcagagtctataatctaatctaaatgaaagcagaactgttccaagtaggttggggtagggggtctcttcctccactgatgaaatttccctcagatgcttccagggaaccctagaatttcatggagctcaattttaaaaccaagcagagtcattctccaggaaaccacaccaaactgtgctcaaacaggcataggagacaagtatgtagatattttcttgaaaagacatctcctccccatgagggcttgatgtggggtctcgagcaaggcctgatggatttctgaagagcagatggcagaggagacttgaaccccagctcagagattccctctctcaaccctggctgccttgtaactgagatcttgctgagggcgagacagactggtgggggttcagtggtggctgtgaccaatggaggccccatgctggggccctgggtgtggggcccagatggcagaggctgagctgctgcgggaaggtaggaaacagcctggcagctgggcagtgcggccacctccactgcccctttgcagaatcctcagctttccaaagccacctgcagggtggggcggcttcatgaagaatggagggctgtgtacagaaggaaggactggtcaccacggcaaccaccctctgatgtccaaactccactgtgaatcaccctaggctttttgggggtgttttctattatttaaactgccttggggaatgtaagaagagattttatttcccaggttttgagtacactatctcttaactttccctaaaagtaaatgtaaccgttttagtgtttttactttccacttttctcctttttctccatctctctcctcttgagatgtgaagcttcattcctaatacacagcactttctaaccccagctgcaaacattttctcacatacaaaataaggaagctctaggattcttccagcaagacaacttctgtctcattttttacatcagggtctgggagatgatcagttggagtttaggtcactattgatacctggattctggaagctcagatgtagcctctttactgctcttcagaatggcaggcatagaatcagagtgggtgcaccggaactgtgtcctgctgcctttgaatattgacatgggggtggtccctgcctacccacatccaacagcagcctctcctgccctgcacatggcaacactgctgccccagacattgatggccccactggaactctggaggccagctctccaggcgatggaaagcagttgttcgttgaagtagccagggctgctgtgaagcaatctgcagagcccagcggagggccaggagcacacccagcagatgacagctttaaagatgctggaaacacttgggttcctcttacccacccccaaatgtaatgccaaatcaaagcaggatttaactatgaaacacaaaactgctgacaccaaaatagctttcttctggtttttctaattgcaaactctggatcacctcattgaagctgattttttccctttcttccctttcccaccactgctcttttccatccccccttggctgcaggagcctgaagtacatcctcacgctgcacactgtgtaatcaggcagagagggagctgctggcttccaactgcaggtttgatcttctctacctcttgttttggtctctctagtttttctttcattttcttttttcttgggaccccttactaatggaagggagtgggggctgagagcccgggggacaagtaggaccccctctcttccattctcctgagctctaagacttgtactttcagggaagtcataataatgacaatgatagtggtagaatagtggtaataataataataaaggatctgagaactcacttttactataagaaatgggctggatttttaagatgtttctgggttccaattccatactaattaaaacaaagcaattgcagtctggatagtaaatgtttcaatgtctggaacttggcggacccacagaaatgtttgaaggatgggtaaaggtgatttacagatggggaatcccagcctgcaagaggttaaataaccagccacacatcacctagctggtgagtaacagggttgaattcagactcagggggcctgactctgcagctgccatctttcctccttaaatatcttagttcgtaggataggtttagcaatgatgtctcctgcatgacaatttcatggctgtcggtaatgggtatctccaaagagcagttcacagacaaacataaaagaaagaaacttaaagaaagggcataacaatgaaagcaaaaccctgaaacagcaaagatgtgagtagtcaaaggaaaatcagacgaagagagaattcggttattacccttcacttggcaaacatttccacagcccttacagtgtgtcaggccttattctaagagacctgtgcctatataccctaggagggcgagcctgtgcttacctccatttcgcagatgcagtagctgaggcagaaagatgtcaagtcatttgcccaaggtctcactgatggttactggaaaggggggagtttatgaaccatgtgatccagcccacaaccaaagcgtgtgcccttgaccaatgtcctgccatccacgagtaatagtaaatttaaaaacactcttggccagcagcggtggctcacacctgtaatcccagcactttgggaggccgaggtgggcggatcatgaggtcaggagatcgagaccatcctggctaacatggtgaaaccccgtctctactaaagatacaaaaaaaaaaaaaaaattagccaggcttggtggcaggtgcctgtagtcccagctactcgggaggttgaggcaggagaatggcgtgaacccggaaggcggagcttgcagtgagccaagatcatgccacagcactccagcctgggtgacacatcaggctccgtctcaaaaaaaaaaaaaaaaaaaacaccctcaaggtgagtgtttaaacttgtaaacttttcaaagctattaagtagaggtgatggattctcttcattcccttctttttgtctgacctggggttacagataagaaaggtaagagtgaatgtcttccagattattgcttctcagagggagaggggcttgaagatcatctagaccctaaacaggtgaatgtctcagctttggggactgtaacatgatgttaagaaggacatttcttattgtcttggaatgtggctgaggttccaaagctgaagccaagtgtccacacattctaaaaataggggctaggccattctcatcagactggctaagaggtgaccaagagcagccctggggctcctacctctagagtgaagaaaggaaacctgggatggttaaaaaaggtgatcctcctggagccactcgggaggctgccttcacgaagagaggttggcgtcctattcccaactggtggcttaattgtccctgtgggaactcagagtgcccctcccccaccttgtgctttctcttgggggatggaaggacaagtatcctcaggagcttgagggttcacccgatgcagagagacactggccggaaggagatagtagatgcccctgactacagaggaaggagggcaggtaccgtgagagagcacaacccccctcctaccaatcgtatggcaaatggacagctaatgggagccaggctaagccatctcaaaaggaccccagctcagaaggctgcctgcctgccagggtgagggggctcctgcagcagaattccacgggagtggtgtgctgcagggcagctcacaggaggtgtctgagaggtctcaatcgtgatacagcgtagaggccccagtggacatcacccaagaaaccaagctgcaccatgagcattaggtcatctgccccaccaagggcaccatagaccagatgacaagaacgttagtctggtaagaatctgctttttcctgatagccacttcccatgccctgccctcggctctggaggggcccattaacaggagagcaaaagaaggggagatggagcagggaaagcaaaataggggggccagcctcccccggcttctgctggcctagagtcctgcagtttgcgcctcagccagggagggaggacatatgtggaggtggatgggaaattcaagttttgatttagattgccctggactttttattgcctgaaaatgagattgttctaatacccggaggcagccagaaaaactctgggacctgtttgagatattgtctagaaacgaaaaagggaaatttgacaaaacaatatctaaaggaggagaataaagctatttctgaagctcatttaataaaatggccatatgaagaaaatcagctgagaaactccacatttccttccagagctccccaatgccccatcttctaaggaataagaagttaaagggaatgcacgtttattaagcacatactgtgtacaggactctgttagaacccgaatacttgaaacttcacgaaatctccccaataattccataagtctgggattgacaatttccatttcgtagatgaggcaactgaggcccacagaggtcaaggggcttgcttaaaggcagatcgatacagggtggattctggagcagagattggagctcaatagtctgcaagcagcattgcaagcagcattgtacaaggaaagggactgtgtacgtgcactcactgccacctcttcagatgctcaatgaatgtttgctaatagatgcccacaatgctgtggcttcctacgtgggccctgtgatattgcccactccccttgaggtaggaggcaggactcaactcctgagatggggctcggacactggaccaaattgaggactagctaaaacagagatggggtggaagcagctttccataaaacacgcccaccagtgtgccatgtcagtttaccattgctatggcaacactcaagagttactgcccctttccatggcaatgtcccaacaacccaaaagttaccaccccttccctagaaatttctgcataaaccaccccgtaatctacatataatgagaagtaggtataaagatgactgcaaaactgctctgatgggctactctcagcacactgcctatgcagtagccctgctctgcaggagctggcgctgactgctggagctgtggcactgccacttcaaatgagctgtcttcttctaccccagcactggctcgcccttgcatgctgtcctgggggaagccaagaacccttgcaagctaagccccactttggggtttgcctgccctgcagcaccatcactttctttactacaatttatgcaagaacatgtgcaggttggcaggctcacttgtcattgagatcaagttccatgtctacgcaaacaagaccataagtacagaggggtcaggaccacgtattttcttcttaaagtccccccagtcatctctgtgaggaggggatctgcagatcaggctgagcctcagagaggtcaagggacatcccctgggttccacggcaagtcctcattgctgagttgtggacccagacggctgctccccagcctgagcctgccagtgtgcctgtccctgatccacttgcacccctccctcctggcctcacagcccaccaggtgtgtgccctgtcagctccctccctgttatgttgcagaacattggaactggcaaagctgatggaggttatacaccgcgtggttcagaatagtagcttaagcagatgtcttgtcaaaacagaataagaaactgtgaagaaatagtctgtgaaacccagccacgtcctgcttcctctcatttctacagtaaaatagtggtgggggaaaaaatggttagttctttcagaatagtgcatttcacgtgtggagcataccaacttccagaatggttatcctggatgggatttatttgccttccttttcctagcctttctttcctctttactctgctccttcccctccttctcctctcctctcctcttctctctctctctctctctctctctttctccacatctcctctcctttcaagaggacattagctccctgactgcaaccctggggtcttggggcttctgaggcctgcaggctcccttccctttgtctgaggaggacgggggaggcagtgaattattgatgaggcctgtgctctatggatgcccagggctgagactggggtggcctgggcccctggagaaggcagcaagactggtcagtttgggagacaggacagagcctcttggggtgtaggtggcagggaggggcgggggaaagggctcattgccttttggctttcatttgcctctttgcggtgcctggggctgggaagagcaagagctggagtcactgggaatccgtggacagatggagacaccagaggggaggcgtgtgaggcgtctgcagggaattcacagtttacagtcattgagtgttcagcctccccactctgcctctctacacttctctgaatcaattcccagaaacccaggggttgttccatcggggctcaggggcatggagcccagggcctgtcctgctgggccctgtggccacgggcacaggagccaccctctcccctcctcctcacttttctcccatcccacccagaccgagcagaagctccccagcctgaatcccatttgggtcaaagaacacaagaaaaactccatttgtcacaaggccatggaacaacattaagcggaaccactctgtgacatgaaggacggtaggaccataaattattcagcctcacagacattataggcattttggagagaaagtgaaaaaaagattatttcagcgctgtagtgtaaaagagctgaacagcattcattggccagcgtgctgtgaggattttctgccttaaagtagctctctccgaggggctgtttcctgggcagcagttccacccaccaaggaatttgcttacttctttagcgttaacattgcattgtgagagagtgtgtgtgagtgtgtgtgggggggaagggggggagctggatgggagtgctgagaccatccttctcaaggcagggaaaggaacgcgtaagctgaaattctttttcttgtcctctgcaattgcggagtgaaaaggaaggcaggttttgcagccttgcctccagtctcagcatggctgtgtaacatgctctccatggatacatttgtgcaggaaaatgtcccttggtgaggagaggcattcctgttcccttgcaagagccgggctcagaaggactcttgggagggcagcattctttcaatgcatagccccatctccagcccagatggaccttcaagccagaacctttgtctagaaagccccaaaattcctggaaatctagagacagagatacaggaggtcaacagccccacccctaatcttgggcttctcacttgttaatttcatcgtcttgagcagggctctctgaagtcaggggaaatgtgcggattctgttcctggggttcttcccagctcattttggaaggagtaagagagatatgggggcctacccctgctttagttcatcctccctcttggggatacccacccaggcctcagagccttcatctgagcaccaatatacagtaatgcagaccacacacacacacctctctcccctccccatcaccccaggatgagccagggaaggcactgaccagctgattttcaatgcctaggaaatgggagcttgggctgcgggtggcctcaggctggtttgcatcttcacctctgggaaggattgtttgtaacaaactgatgtatttaacagaagagcacatgcaaatatgccttggcattgccgagattgaatccagcctttgctgctgcagagcaggtctggccattccctttctggggagacacaccacagctgccagggctccagggacccagactgaggagaggtacagaggcagcaccagcctctctgtgccagccgggtagtcatcagatggtggaggcccagaatgggtggcaaacccctcgtgggcttttagcagaattgtgctgccctctgctggcgagtttgggtggactcaaagggcttcacgcccagtagaaaaagaggctgctttctgttcccctagcaatcagagaaggggacagagcatttcatactgaaaagttgtgggagctctctctccttttttgtttttgaaattctgcgctctaagccaggaggcaacacaaaataaaggtggccagagggaactaatgctgggttagagtcttctaagggcctgaaatcgtgctatgacatctacgtgcaggcatttactttattcagaaagcaactctgataattagaatttagaattttaatttgagaaatgaggagagtgtggctcagagaggtaaatcaactgtgctaaggccacacagctagccaatagcagagccaggattgagtttgggctgtctgatgccaatgcccacactaggccaaccttacagtttgtgatttgtctctggatgttagagagcaggaagtgtctaaccctctgggggagacaccaggctccattgcccagctcctccccactcatggggtaggcttttgttagaaaatgcgttgccctgaacccaaagctagtagaggcgcctcaaggaatggaaacactgctggtctggctttgtgttctagctctgctgtttgtgggctttgtgactttcaggccacttgtcctccagggttctgtttctcgtctataaaatgagggagtaggtaaggatgaattagatggttgtttatggtggtggtgtttttgccagcaaggacatttcttaaaaatggttttctatccactttgggaggccgaggcgggcagatcacctgaggtcgggagttcgagaccagcctgaccaacatggagaaaccccgtctctactaaaaatacaaaattagccaggcgtggtggctactcgggaggctgaggcaggagaatcacttgaacccgggaggaggaggttgcagtgagctgagatcgcgtcattgcacttcagcctgggcaacaagagcgaaactccgaaaaaaaaaattaaagataaataaattttttaaaaatggggtttctatctcatacataccatgttttgcaaaaaaaaaaaaaaaatcttatctacccatgtatgtatgttgtaataatttattccttttcagttttgagtaaacaagatatgtgactatcttagattgggttccccgataaacagattctgagacagggatcaatgtacaggaaattggggcatgtcctggtaatgccatcaatgaggtggggaagcagaagctggcagagggagaggtggaaccatgaaacatgcacgacaaaggcctcagctggtccccaggtaggtctggggctgggaagagctgcagagtgatccccactggggaaagcaggccaggtctgtgcactcccacatgaatcaggcaaggtctatcaccttgggcaaggcagctctttcatccagtgcaattcctggggacgaactagccataaaccaacagcagccaacactcccagacctggggggggctctgggcagctcaccacagcatccactccaatcactgtgtactcataagaaacaacaagcagcagtgaactccaacccgtatgagttttacatggggaggccttattgaaggtcaatgttcaagttttattagctgttttggaagtaaacattgctcacatttttgccttcccagatttttgccttcccaggtactaaaggttcggggactctaggttgaaaatgtgactccttctttctagcattctctgagggtgtggggtttgtatgtcctgaagaccccaagaagatgccaccaccaaggaacaatagtgaatttctcagcaatagtgaattcctctgctcccatggtgcctggaagaagatgtaccttcctcgagcccacccagccccagccccagccccagccccagcctgagtgcacagcttggtagcagagcctgactagagttcagcctgtgcttatcacctggctggacacccttgagtgggtcacagcctgtgcacctgtccctacagaccctgccctcccatttatctttctcctcctcagcctcccttccctcctcctttcaaagccttcactcttcttcaatcctccatgtgctgattccatgtgcttgcagctccccggggaccaggaagggtgtcagcgacttgaaaatgttcactctaccactgctgggaatcttgcctaaggaaataatctaaaatacaggagatcctttatgagagaagacactcatcctaatgtcatttgtaaaagtgacaggttcaagccattgtaaatggtaaaccacaggggaatgtgaattatggtgcatcaacaaagtggaatatcatgccaccattaaaaattatgtgtgtaagaagcaatgtgaaaacatgtttatggttagcaacacaggctacaaaattatactatgcaacctgactgcaacaatatgaacgaagtaaacagttaaagagtggcaggaaaatctgaactgctcatgggcttggctggaggaaccacagcagggatctcttaaccctttttgtgccacagacacctttggcagcttgatgagcctatgggcttaccagcatgtttttaaatgcctgaaatataaaccatagaatttcaaagaaaaccaataatattgaaatacagatatcaaaatgttaaaataatttttcaatatatgtgcttctttttaataccttaagtaacacgatctagcagaagatcaaataattactatacctataaggtagtgatgaattcaagtaatattttaaattacatgcaatagctaaaatgtggtataaaaatgtctaagtttctgtcagtgacaaagttgtctatatagctaaaactactgttatttgaagccaaaattcataataaatgaccatgctgtattttggttagatcatgaaataaaaacgtcatttttcctatccaagttcatgtactctctgaaattcttactagtcttctaggggatttatggaccttgattttaaaaatctctgtatcagagttttttacttctttctctttattctctctaattccaaaattttacataatagacatgcattgcttctatcatgtaaaataaccaaggaattttaaaattaaataagcaaatgaacaaagaaaatataattcaggcttattagatcactggatgataaggcagtaagtgctctcagatgccatatcatttaacccgcaggttaaattccacaagagacatggtattaatgtagccgtttggcaagtgaagacattgatgccagcggaggttaagagacttgtccaaggtcacacagtcagcaaatgatggaaccagagtttgaaccgaggtgtatcattcaaacccagactcttacctgttagatccactgagcctggcaatctacggcttacgatgagtaaactgaatgttttgtttgtagaattgatttattttagccactgtgaagtaatctcttcacatgaatgtttctcctgctgaagtacatctgcccttgattaaatgttgtctatgcaattcatggacaatcgatggtactctaggctctgaatgagaaaactggaacttctggttgccacaagtctgctgatggcttaggcagggacattctgtctcccaggggccctatcagtgctcatgtggtcacgtagacacacttcaacttgagcttcaggtgggatgcttccctataagcagtgaacgcgaaaagccttggctaaaatgggatccacaccgaacacagaacagaactggggctgcacttccaggtgagaagcatagggtgggatcaagaggtggctgaagggatggcagattctcaagctgcattcctgcagtcaggatgtgtccaaacggaaggcttggacagtcagtggccacgtgggggcagcatcgagccagaatgacagagggcacttcgtctggtgaatatcatgtgagtccatgtggagcctcctctttggaagatggggtgctcttgtgggatgaacgttggggagggacaatctctttaataactctgagaggtactgctctttttatgaaggggcagtataacgtggtgcttataaacgtgggctctggatagttagcctatttgtatttaaaacctgctgttatttattagataacttacttaagttttctgtgcctcagtttctccatggggttgatatgaggactaaatgaatacacattaggcactttttcagttatctattgctgcgaaacaaaccaagccgaaacaactacgtatttgctcacgattctgcaattagggcagggctcagtgggacagcaactcgcttcctcatgtgatgttggctgggcacttccagtagggctggatgagccaagagggcttcctcaaatgcatggcacctcagctaaaggctggcagggcctctctctccagcacgagagtcagaatggttttacatggcattgtgccaaacccctactcacctcaatagggaagtcatcaggttcaagaggttgaaaaagagacccagagccaacaaacaagacatgggttttgactaggggcttatgtacaggggagagaatccagtggcagcggactggacagtcaaaccaccttcctatggcccaatggcagcaggctaggcagaaaagccacagctgcttgtgaacagcatgcaatttatagagcattttcacttaacaccctccctgaatgacctgaacctggcaacattcacttaacccaaaacctggggcttcaatcccctgtacagcctgtgttccatgggacaggctgggggctcggatgttttctcatagacaaggaatgaatgtctgtgttggccatccctggattccctgtctcggaacacacattcaagtcccacacaggtgccatacagggccattctcagggtatgtttatgttattgctgtcaagtgtgtttgccctatacatggtggcgcaggactccaagagaactaaaggccgttcccagcctcttaccgccttgcctgggagctggcacagcagtcacttctaccatattccataagtcaaagcaagttacaaagccagcccagatttaaggaagagagacacaggcctctcctcttgatgagatgagtgacttgcacatgcaagaatgggaggaattattagtggccatcttgcaaaccacctaccacaggtacttatagtagtgcctggcacacagaaagtcctccatacatggaagccaccttcacagctgaggagactgaggtgcctcggctacagagattgttcccaagatcacatgtcaggtaaggacagagctagaattgaagcccaggtctttctgaattaaaagcccattctcctatggcaccattgttgtaagctctgtgcccttggccaagtcatttaacccccgagccttgttttccttgtgtgatgtcaggtggatatagtaaagacaaccaccaaatagaattatggcacagactaaataaggaaatgcccaagaaagcatcttatcacctataaagcattatgggagcatgaattattttgagattttaatttgaacttcatttgttcagaatgtgtctactgctggtagaatctgtattcatgcttcctttccttggcactagggtggctgagggtggatggcaggaggggtcacatgcttatccccacaggcaatagccattttcaagtcttcaagaagcgtctattgatgtgaatgttaatgacaagccattctcatctgtgcagtaaggaaactcccaggaaccttgttacaggaaaggagcctggggatgggaagtgctttcttcggaagcttctggcactctccctttcccagggccagtctggttttcatggtctgcccctggtgagtgtctccagagcccccttctcagtaagctgcctgagcccttctccccctgggggcggatagatggacagcctggagtgctgcctggtgtacctggaatcccgatttctctagctgagtctgccttagccattcccctcacgtgcctgcttcgctctagctgcaggaaccagaagctgtgcttttattaaatttgatcctcatcagaattgcatttggtggttttccaagttatgactttctaattagctttttgttgaagctgtttttcattgctttgctcagaatcggtggtaaaagagactattttcttgatgttgtggcctcctttggtgatttctccacttaaaaagagaaaaaaaagagtaaggatgtgcttcctgagaaatctgataactaatcacaagctttagacaaaccctgagattcccaggttatcagctattgagacatctgcttcctgcctgcgagaaaacaagttctcactggggtgcggggcactggggatggctttggaatcaaactttctggattcaagtcttggctctgctacttgccagctgtgtgaccttgggcactttaattggagtctctgagcctcagtgtcttcgcctttataacgagcaatgtgcctcagatgtctgctgtgaagcgccactgaggtcatacctgtaaaagccctgatgtggagtatgccttcaacaacattgcagctcttatcacatttgataaacaacatgctgtgaatataagtttatagaaaactctaaagcactgtacaaatatgagctttattgctatacaaatattggtttatgactattaagaataattagctatatggccttaggtaagctactccatctttctgagtgtctggtctagataatgggttgcacattcaggtgacttcaggaactacagctatactgggaatgaatagagtagaccagatagaagaaatgctcatgtcagtacacactaagtgggcaagaggaaagtgcatcaacagcaaggtcccaaagataaataagtttgagaaactctgggttaaacaaaattgaacaggcttctttcttcaggactcttccaagagttttaagtgcctggctgcatagtgaatttcaaagggcaggaaaggatatatgtgcaatgttttccaaacttccctgacctcagaccctctttttccgttaagaccagtgttcttctgaatacacctggcaaattctggatggatgacctcaaccatcccttccgattctaaatttcagcttgggtctctaaggtcagaaagaggcatttctgatagaagataaaagacagaatgtgtgttgggtcttcttcctttgattgttcactttcatcaaaatgatgactaattctgttcacatgacggtactgctcagtgtggtcagctgtgagtgaagccggatatctgggtgcagcgtctcctaaccagtcacggagagtcgggcgggaaaccagggaagggggacactgctgggcccacctgttattttgggaaaatcaggaaattgtctggcccttgtgtttgctagcctcaaccttcacatacatatatgaaattcagaaatccaaggcttatagcaaaggccacttgaacttgaccttgctttcatcagctatttagtacaatatattcagtaaatttctcttgttaatcagtgaacattgtgtaagcacctattattactagatatcagtaagttaattatcttcatcactctgtttaatttagatatgtgtttggggactccctgagatctaagttaaattgccacggatcccaaattccatagcctgtggctatctgaagcccttcctaagatttctgcttcttataccacttggcattgaattccttgaatgggacctctgccttgcactctgttttaacccccttgaggctcagggaggttaagtgacttggccaaggctccacagcctgcaagtctggctcagttacggttgccactgggccttggctaagaagagatcctgccccactgccccaggctaccatccctggggatgatgaagggggctcctggagatgagggctgaggtctccaacatttttctacttcaggcttttcttctctcctgccattgatgggcctgggtgtcaccccatccagagatgcaggcactaagcctctgggggtgagggcctcgtgcctccacactgcattcatttaatcttccaaccatttccctggcagtggtaatatacccattttacagatacccttataaggattaactagtaaaaataacaaaaaccatcacaacaatccacagttacagaactctgactgtgccaagtgttatctatattttctcatttagtctcgcaacatccatatatagaaagacggcacctgcctgtgaggtggatcatgacagaatcaagttattatgcctgaccaccaaccctttggggcaaatccgctctcagagggtggaaagtcttgttgacaagcagagtagcccctggggcctcaagcttttggggcatctctgggggctccgggcatcctttagggcaggataagatacttacaataaactctctctttgagacatggattgggtcttcacttaatgtttttgactcttcatatttttttttcagtttcaagttttgacagccctggagcttaggcactaaatcagcaacagaataggattctaagatgtttgattagggattagacctctgacacatggcttgcccagagctggctgatctaatacatctcagaatccaggaagaaagggaccatgtaccacaaagcctaatgcctcattgtgaagagaaaaatgaaggccctgtgctggtgtggatttacgcagcactaaagcaatagttctcaggtcagagcccaggttttatgtctcctagtctatagatctgcatcagtagcacctacaagacagggttgcttcataaccaagttccattcagagccaatcatatgtattaatggtgtggtcagtaagatgtcaaggaatctctgtctatccatctaatctcatgagttttctctgggtcctaaaataatgtcaccttcaaaacatggagtaggccctgccaagacacctcacctacctagagaaggtattaaatacattaccagcagagacccaattaacatctggacctatcagaaagcagaagctgggacactggatagctcagtttgattgctatgagagctctcaggaaaacaaaagaaatacaaaagtttggattgtgggcagatagaattttcaaaatttagagaagatccgaaatcttttcattgcttagatggacaaaccaagaccagggaaaagaagtgaatttcccacgcctgcccaatagtcaggacaacaccttccctaccagctctccatcacttccccagtctctcttcccaaacacagctctaccagtaatacagagttgggtgccaggactcaggagtcggaaccccattacacttaggctagatctttgtgaatattgaggctaagagtggaatttagtcatggtctccttttgacacagagggacctttatagaccagagtcgatttttgtctgtaacaactgtaaagtaaaatgaacaccttggttgctacttgagcccttggatcgggatgcacctggtgggctgcagtaaatcttgaagtagcatccattaatcagctacaccagaattcaccaatgtgcttgttaaaatgctgagtcctgggctttatttacccaagacccattgaatcccgggtctatggggcattttaatatgtatcccaagcgattcacatgcccccaaaagttggagaaccgccactacaatggaagatctggagttaagcttgcctgggttcaaatctgggctctgccagttaccagatgtatgaacttcagcatgcctgagcttcagactcctcctgtaacatgaagagaatagtaataactacctcacagggttattgagagagttaagggaggtaaagcaggaaaaatgcttagcattgggcttggcaccttgcaaataaatattaagcaaatcaattaaagcaaagcaaatatatttaataaattaaatattgaacaaataaatattagctgctactgtaatgtcgttctttagatacattccctgtcttcacctgttcacatggaggccagctgcagcctctgcaatcaggagcccgtccccacctgaacccccgacccctacccctccagggaagatgagcggctgtgagaagcctggcctacccattctgtggcgggggctttggggagtgcagtgacaagagccaccagcagggggaagcataaacacatttcagggcatagcgctggtgatccttgagggtggggcgctctctgggggaatgggctgaggctgggatcagcgtttcttctcgaattttccccccactgtggacaggaatatctggtgatgctcacaagacagaatcctgcttttcctctaattgctcaaaaagtgagaccctgcgctggctgacactggctcttccctgaagcctcaggaagcggctcattagctgttaattttattttcaccacccagtcgggctctggcaggccctcggcagagtgctggctgccgggcctttctaaggagactcttggcagagctctgatctgggcgtcgtgttctttttccatttggaggagcaactgcgtgaggtgcctcaccagacttagcgagaggggctgaggggcggggcggggcctgagtgtccagacctgccctctagttcccttcctgccgtcccctagaaatcagggggccgggaggtccgccgccgcttgagtgcccaccgtgtgctattctgtacctcccaccgggctccccaggagcatgtcacagaggggaaggctgaggcccaaagaggtcgggtgacttgctcagagccacgcagccaatgagcagcaaaagtaataatgacactgggccgggcgtggtggctcacgcctgtaatcccagcactttgggaagcagaggctggcggatcacctgaggtcaggagttcaagaccagcctggtcaacatagtgaaaccctacctctactaaaaaatacaaagatagccaggagtgatggcagatgcctgtaatcccagctactcgggaggctgaggcaggagaatctcttgaacccaagaggcagatgttgcagtgagccgagatcacaccactgtactcagtctggatgacagagtgagaccctgcctgccccctctccagaaaaaggtaataatggcaccggccgcctagtgtgtgcccagtatgttgccgggatccatcgctgtccttttacatatgtttactcctacatcaatcaaatctgtaaagcccagtggctgaggttaaagcccatgcttttcttcctactccgcactgcctcgaaacccttggaagtactcttctcctatttccctaatctttcaaattattcaaattcccatttgttctccaattaaaggtcccctcctccctcttcatccaagagtcctttggtgagagcttcggtagtggcttgatcacattctgaatttgagatttgcttgtaattagcagtcttgaaaacaccagttctttgctaggctctgctcccaggaacccaggagtcaggacatctgaggaagggctacatgcatcactgatctctcccttaaccacccctttcataggtatctggaataagctcaaatttcattgattttcctatggtgataaattgacagcccgccttttttttccacagaaattaatgccagtaaaatgactactacagcccactccctgctttgaatacaccattaaaataaaccatgtctgtgtgcaaacatgtgtgcacccaatgagatgtgcttttcaaagacactgtcatgcaatgtacacaacactgtgcagacatttcaattttcctcctggctgtctcgccatctaaagacgaaatgctcgatgtggcctggcatccaatggcagctggaggaaaagaacttgcgacttcgtgtttctcctctggagctctgggcttgctctcatttgcactggtgaattgtaatgtcagcaacctatggatagaccgcaggacactgggctgcagcatgaagagctatccaaggagattttattttattttattttattttattttattttattttattttatttttttgtgaaacagggcttcgctctgtcacccaagctggagtgcagtggcaccatcacagctcactgcagcctcaacctctggggctcaagcaatcctcccacctttaagccttctgagtagctgggactacaggtgcacgccaacacacctggctaattttttttgttgttgctgttggtaagaacagggtttcaccatgttgcccaggctagtctcaaactcctggtctcaagcaattcacccacctcggcctcccaaagtgctgggattacaggcatgagccaccactcccagcccaaggtggtcattttaatgtgcagttgttacagacaagcaaatgatctccagtttgtaaagatctctctgagtcaaaaggagaccatgactaaattccacctttaacttcaaggtgatccataaacttgaggagttttgcaaacgccatttggctcagttactgagattctttgtgtcattttggcagccacccctgtgcctgagacagggagctcaggcagctggttggagctgcttgtggattcagatattccagaactgccggttatgtaggaagttcatgctatagagaggaagatgagtatgagacagagaatccatatttatgaaacaccagacattatcctgggcacactccatcctcacagccatgttgtgaagatacttacatatgctctgtccagcatccagggaaactaaggtctagaggggcatgataactggcccatggtcaccaaggatctgaaagacacacccacaaaggcctaactcaaatccatgtattttcaccattgcctgtgagaaagaatcttccatatattatgtttatttgtttgcatttatttgttttatgaaaaaggtctacactttctgcagctgtcacttttgcaggcaataaggatacctttctggaacgagaaatctacattagaccagagactggatgatggagggctgtttctgtaatatttatccctgcaaagtaaatatttctgtctccaccatgttccagaatttccctgctgacagcttcacagatacttctttttctcctctcttgaacatccagctattgccggggacaggatgaccgggtgcaactggttcttttcacttttgactgtggacttcttgcagccaaagaaagaaaggctggccagtgatccacactgggtgaggattggaggccagggctgtggaagggaagtgtagtttgcatcctaagtggtgatcccaggggacaaccgacccactagagagcaaaactgaggctttccatgcaatgttttggaccaatgtatatggttccctgaagtcatcttgcagatttatttctgtaatgttctcacatttattcccttctctcttttcccatcagcactgtccagagaggttgagtgatttgccccaggtcacacaactagtaagtggctgaacagggcattaattctaggctttctgcctccctggtttgtgagcttaaccattgcactgtagctctaagactcttggtgagccaggcccccctttgtccccagccttggccctcagacatctcactatggccctttaacctccagccctggagcttaattcagtccctctgatagaccacattcttccttgtctttaggtctttccataggctattctgcaatctggaactcatttcctcactttaccctctctttcaaaaagaaaatcctccaggaacctactcacagtcatgctcaggttaaagttcctccttccgaggggtctcccatcactgaccttctccccaggctgcatacaccctgcctcatgcccagtcaggggctctgtgtaccctcgcatcctaacaccgatcacactatagtgtaacttcatatttcatattctgtctccccctggctgtgcactctctgagggcaggtgcttgttcacagctgtgatcctgcagctgatgcagcgcctggctcacagtaggtgctcggtaaatgttgaatggatgaaacatgaatgagcaagtcagagaaccagtgcctgtgcccatttgcccctgttgttcccttggcctggcacattcttctctaggctttggcacaagccacagctcacattcttcctttgagtatcactctgtgaagcttaggaggccaccagggctgtctttgggggctcagagatctctaggctcaggcaaggatgcccagtaaaaatagtttttgtagaaatgagctccagtactgagaccctgagagaggctctagacgtgagagacttgggctgtggaatcaatgtgaagcctgggaggattcacactcgaggaaggacatggagcaggcagagttagaggtgagggtgtgtctggagcccagttctggattgtgattgtgagttctggatgtccaagctgtacagatggatctttacagtggcaaaagccaacttgacccagaagtccagagcataagaggctctctcctggagcactgtttgtgtcagaccctgctaagcacttcacagacttgatctcattgacttcttatgaaagcacctcccaggtaggtctagtcccggttctttagtcccccattgaaggaaggggagcaaagatggtgagcacttgcccaaggtcttagttacataaggctgagccaggtctcagaacccaagtctgtgctgctaacgtcacctccccattcacgttggccacactctgagaatgcaaaggtgaggtctctctaattctaatctaagtggatctgattaggagttattgggccaaagtcattaacttacatttcagatgtactgccctgggtctcctacgcatcttctatgtgacaggcagcattggaagaaagcaaggctctatctcacccagcatatgcttttcaggtgctgagcacagaatgcttgggcccagcacttcagagaagtcaaatggatccagcttctgcatggtcatgaaacttattatcctgggtgagggaatggtaaatgatttttcttcttgttctgtactttttaaatttataaaaataaagtgtttatagtcatggaaaaaagttttaaataataaagaaattagcaaatacacctgcaagatgtcaaggagctgtatccctccctgcccttgttcatgcatttctcttagtctggaatgtccttcccttccttgtcaatgcattaatgtcttactcattttgcagggctcagctcaaatgcagcctcttcttgatcccatctcaagctggttccttgtctattgtctctctttctcactggaatgtaaaccccatgagggcaaacgaccttgtctgtcttttcactgttttatcccaatatctaaaagagtgtctagcatgtaagaaaaacccataaaatttttttagtgaataaatgaatattcccacatttgattcctaatatccatctcggtctgtcccatcctgccttctgcctcaaactatggcagctgtttctctctctctctctattctctgctggcctacttgaaaaacttatttctgtggcccccatagcacagagcttggtacataatagacctcagtaaatgaacgtttgctgtcaacttcaaggcaaggaatcaggatgcaaagggctacatctcacccccttctctggggaatgagctgcgttgtcaggaactgattacaatgtgatgctccctggggagggagaactgcccctaaccaccctggatggggagttatgagatgaaatggctcatggaggttgtcccactgccccagagttgctgctttataaggaaggaaagtacaaaagcacaacaaagtctactaacgctaaattttgaaaggtaaagatgactttccccttgtattcaaccaggtggctgtctcacctgagccttcctcccaggcagcagaattactccttgtagctatcagggggaacatctgtatttcttccatccttcccttcaaattttggggccagcattttgtttgtggaatcactacctatcactacctacattattggagatgaggggataatgggcaacaggaggcagatctggagaggctgaatgataggcatcttgggctccggagctgaagacacagattcaaaccctgcctctgctctgcatggctgtgtgtcattaggcaggtaacttaaatgccctgacccttagtctctaagatgggaatggtgatgatgatggaattcacccagaggatgtcaagaagattagatgtaaaacacttaacacaaaacttgtaggataaaacctagaggtaaattttcatgaccttggatttggcaatggattgttagatacaacatcaaaaccatcagcaacagcaggtaaaatggataagttggactttatcaaaattaaaaacttttctacaccaaatgacagcttcagacttggagaaaatatttgcaaatcatatatctggtaagtctagtattcagaatatatcaaaagctcaatgttaaaaaagacctgattaaaataaataaaccaattaaaaagtgagcaaaggacttgaatagacatttctccaaagaagatatacaaatagcccagaagcacatggaaagatgctaacatcattagtcattagggacaaacaagtcaaaaccgccatgaaataccacttcacacacgctaggatggctacaatttttaaaaaattgaaaataacaagtgtttctgaggacatggggaaattagaaccttcctatagtgctggtgggaatgtaaaatggtgcagccactgcagaaaacagttgatggtatttcaaaaagttaaacatggaattaccatatgacccaggaattttacttctaggcgtacaccaaaaaagaattgagaacaagtgtttaaaaaatgtggtcatgaatgttcatagcagcagtgttcattatagccaaaaagtggaaacaacccaaatgtctatcaacagattaatagataaacaaagtatggtatatccatacaatggaatattattcagcaataaaaagaagtgaagtactgacaaatgccacaacatggatgaactctgaaaacattatgttaagtgaaagaagccaggcataaggtcatatattatatgatttcatttctatgaactatccagaataggcaaatccatgagagacaaaagtaggttagttgttgccaggggcaaaggagagggcaggaatggcaactgactccttaatggacacaggcttccttttgggatgatgaaaatgtcttggaaccacttagaagtgaaggctacgcagcattatgaaagtactaagtgtcactgaattgtacactttagaaaacttttcggctaggcacagtgccagcctgtaatcccagcactttggaggccaaggtgggtggatcacctgatgtcaggagttcaagaccagcctggccacatagtgaaaccccatctgtactaaaaatataagaattagccaggagtgttggcatgtgcctgaaatcccagctactcgggaggctgaggcaggagaactgcttgaacccaggaggtggaggttgcagtgagctgagattgcaccactgcactccagcctgggcaacaagagcgagactccatctcaaaaaagaaaaaaaaaaaagaaaagtttaattttatgttatgtcgattttactttcattaaaaagaaacgtgtagctcagaaaagcagtcagtaaatggtgcctttactattacttattatgactatatccccttcccactggaaatcagcttttcccaaaggctgaatgataagatatgttaggaagtcccaaaataggaagtgcagagatgggaggatgaagaaggagaggggagactgtggcaggtttggtctttcccaaccctctaagcactcactgtgttagggacatcctgtggatgagtagactggcaggtagaaccatctgccccctgctacctggggcaggaccacaggacaacactggcagacacaggggtgcagatgggaagatgctcttttggcccaagccatggacttaggtagtatggcctgctcctcccactgcctggcaacacagtcagcttgcccaggctgctgccttccggatgtcagttgaacactcctgacaatatgctccatggcttaggtcagggtccagggtccgtgtcgctgaactctaagatcagggactggaagaggccttaaagccctccgtcccttcttatttggcagacggggaaactgagacttggggatatggcatcagcttgccatattccttgctcagccacccttctctgcaatagagattggaattttgtcatccctttgctgtagtactctatctgcaacctttcggcttcaatattttatatcttgacaaaaggacttgacctggggcaaaagattaaacaggaagctctggagtgttcattttggggaaacagcatggcttttggggaagagcaagaaagcttggacagcccagggcaaccccgtcttgttagtaataataatgacttccatgtttttaaggtagttacatggtggtcagcacatagatgccagaaccagtctgtctgagtttgaactccaactctcccacttatgagctgcatgactttgattaaaaggcttaatctctctatgcctcattttcttcatctgtaaaatgggaatcataatggtgtatataaaagcttccagaattttgcccagcacatggtagggacttgataaatgacagggattataattcctattgctgatattaattagtataattacctggggaaacctatatgaatatgctgaagtttgccaaggaccgctttccagaaacaacaaaccgcagaaccaacagggtcaacagcatgccttttgaaaaactggccacaaattgcatttttacacaatctaattttctcattaacctcttgtttaggaaatgctttgtctttgaaatcatgtgaggactccgtcttggctcggcaggcactcctctggctttcaggcatgagcttgctgtttcctttgcctagaacattcttacctcccacctccacccagacatctgtgtggctaccttcatcacttcctgcacttcttttcccagaagtcatcttctcagtgagcccatccctgggcaccctgttcagaatctcagctaccctgcccctacacttcatacctatcttctcagctttgcctttttcttcttggcaccttgtctgacatactatcatatttgttttgttggttacccactccgaactggaaggtctttgaagtcagggattttgaccattttgttaatgatgttttctccagcgctcagcacacagccaagcacatagtatggactcaatgactgtggcatgcgtgagtatataggtgggaaggaggatttcctggcgggttctgattttagaatttacctggtacagctgagcttcactgagctgctaccctgtgccagccgcgggcagtgcctgacatctgccatttcacttcatcttcacagaagccttatggatgggaaagctaggtcttagagagattaagaaacttatctggtcaccagcttataggtaggtggtagagcctgaggactgtgctttcttctcctggacagaaagtgctgcctgagccctcccctgtacccagcctgtcagggaggcctccctgggtggtttctgagctggctgctttgcagggctagaaggcccatccctcctcacctgcctgtgtctgtgggaggctcttggcaagggtgctgtgtcaggcggcccaagtgctttcagcacttgggggtggcaggctaatttactggcctgctgagcagctggtggatgactggggattgtctgaagtctgcctagaaccatggcctggggcagggctccttccagcaacttccctggagagctggctgcaaggcagggccaaaccagccatcatgatagtgtgaagggcattttctgtcaaaagaggatgttggacaagagttggaaagacttgagttctgatcctggctttgccactagctagttgtataaaactgagcaagttactgagcattcctggttcccactgcttacaaaatgggagcagtaatcatgcttacctcccaaacttgttgggaaaatatatgcaatgtgattagcccaggtgcaaaaataaatgttagatattttatgtttattatgatttattattagctacagcccccctcatctgtaaaatgagaggtttcattcagtaaccacaggcctggcactattgagcagtaggtgctcaataaatgttaattcccttcctagtcccttattcttcctttagcatcagattcctggcctgtgttgtccctggggctccaacactcctggccctggcctataggttttccgtgggctcatgggtaatgagccatcttcccagggcagtggggctaagtgctttggtggacattttggagccattgtattagaaaccccctctttttccttctttacttccttccttccatcccgtttatttttgttgatcacctattaagtgccaaacatagtgaatacagctgtgagcaagacaaggttcctgctaccgtggagcataggtccagttagaattaggtagagagaaaggaaatgaacaaccatgcaagaaaataaactctttgaaaagtagaaaatagaatggtggaacagaaagtgatgagtgtggggagaatagcaaagccaccttagatggggagtcagggaagacatcacaaaggaaacaacatttgaagcaggacttgaaagatcagaacaggccaaccatactcaattgggcgaaggggtttcctgccgaggaaatagcacaggtgaaggccctgaggagggatggagtttagctggtgcccctatacttcctaatgggaagtgcccagtaaagacacagctttgcacttccagcccaggcaaagcaatcagcctgcatcttcaagggttggctgcacttaagatccggggtgctgccaggatgttctttttgcagttaatttgctgcaactggcagaggttaatcatgtccacattcctcaaggcccctgccaaagctggcccttctcacagatgctggtttaaattagaggggttcttagcagcagactagatttagcagtgattaaccccaaactggtcctattgccttgccctcctgatgggcaggtggaagcatgctgggcgaggctggcatctagcacaggcggtagatgcttgctcttgccattgcaatgagaaaggagcccatcagctctccttctaagcctgggctcctacagcagccagaatgccagtcagacccatccacggtgctccacgcctggccctagccttgctcttgcctcttccttgctgtgcacattcctgctccactccacacctttgcctgccttgtctctgtacccgcaggagaagctctactcatttttccagactgtgctcagattctacccccctatgcaagtacctcctcagacacccctggggaaattcaccttttcttccccattcttctagtttctctttgcacataagccctttaaggcattggtcatcatctatattgtgttggggagactgagttccaactaaagtgggagctcccgatggccagggatccatgtcgttcatctctgcagctacaggacctagcatgagctttggcatctcattcattcagcaaatgtgtattgaaggtcactgtaccaggcactatgagaggtaagggaatcacagctgtggacaaggtgtgttccctagttttaagttgtagcccattgtaacacagagggctgagcagattacggtgtggactctaatagatgcccagttgagcctgggtggttcaggatggcttttttaagtcatacagagtgaggaatctgaggctcaaaggagtgaaataactggcccaagatctcacatctagtgtatggcagaaaaagtgctcaaatccaggcctaagtgccctttgcacacagccatttgtggaatgggtcctcctctgtctacactctccattccaagctagcatactcctttctgatcctcagccacaaaataaacaggtaagggatcagacccacttggccagagactgggcagccttgccgcattctgatgcaaaaacctgttttcaagctacttcaaacttttgatggttcttgaagtcatagagaggctttcagctgaatccaaggcaagcgaacagatttcccatctgcagggtattttgaaaccactcgcttcttactcatgtttcatttgtttgtttttctattacaaaaataatgcatactaattgtagagaatttggggagaaatacaaatcacccataattccaccacccagaaataaccattgttactattttggtatattgagatagttatttggggatattacttagaaattgctataatatataattgctgtttattaatttatgcaaatacatgaatatgattaacttgtatatatttagcttgttgtaaaacttacacattccggtgcctggaaatttcaaagatctgctgctcccaaagagagctcttaaacctaattctgtatggtccttttcacgtgaataacatatatctgtttccctccctgtcttctctaccagtctgtgggcttcagaagggaaccctgagcctttctcatcattccctcttcagtacacagtgcatagcagacacacagcattggatggaatggatgtgtctgtggcctgggaaggtgtcctggggtccttccatctggctgtcttaggctgagtggtgctggttatatatttctaaggacagctcccccttctctactctaattccttgttcactaaggaattaaagtatcttacagcaggaatttgtcttttacttcaaggaatccctgggttccaggaagtgccttgcacaatgaaagccctcaatccatgtttgtaaaagcctgaatgaccggaataatgccactgtttggtaaatagtgtgcatggattatcaccacagccctatgacgtgggtctaagcatatctttatttatcacatgaggaaactgaggctcagagaagttaagcagcttgtccaacgtccgtgtgttgctaactggcgaaagccaaatgtgtggtcagcctccatcagcgttctatttgcttccttcatggggctgcttttcagatacctgtcctcagatacccacctggcgaaggaacctgttggctcgtgccccttcacttttctaaggctgggtgaaataccacaagggtagggccgctgacagggaagatctgccacgagggcgcagccatctgtgtgagccacctggcctctgggccctgaccccggctcctcctgggccccctagatgctcagtgtagccacttctccctctgtgtccttcaccacctatctttttcacagctctgtttcccctcttgtcagcagatctctcaacaaaatgttttccatcactgctgcctatttttagcccttttatcacagttatttcctttggtaaatagcttcctggcatggggtgagcagcctaactcgggagccagcaagcactgtgtggatgggggtgtgggttgggtgggcatctggggtgagagggaagaattgaggagccatggaccaggccccactattgggggctgctttctgttccaatggtggcagcagcagcaggagcaagatgctcattcattccatttcaatttgttaaaaccattctttgagaaggcagcatgtgcacaggcctcggaagcagacaatcagcgacaggcgcccaaaatagactcaaaatcagcagcattttgttttgctcaaggcttttcatgcctgcaaggggaggaaagaaaggatccagagcattttctgcttccaaacacacatctattttacaataagacaaatgactcgtattcctcctattaaatccagcagcgtcccctccccaccaccccttctctgaagccctcgccagcatttccttttgtggctgtaagagaagcaaatagcagttcatgcatctccagtgcagagtgcctctgcctcctccggctctgcctgcgagctgggcttttacaagctgagattttcataaattaacgctgcgcgtgctgctgtagctgctgtaatggctttccagaaggtgctgtgagccaggccctgctggagagaaatgagccagtgatttgctagtagaaggctcttggccacagtcagaggttaagccaggcagttgcagatgtcctgggctgctctctgagtgcagcctgatgtcattgagcctctagaagggacatcgacttgggagattcactggtgaccaaggaggccacacatgcagggggtgagtcccagtgggagaatgggatgcctggactccagttctggccctgctctgtggtgacattgtgacattgtccagccaccatgccctggaggtcagttcctcctagtatacactctgagtacactaatacctcccatttgtagtacttacaaaatgggaatttaacacttatttgtgcaatatgttgaccatctaggtcaggggtctgcatattttggcttgtgtgccaaatctggccatagcattgattatacattatctatggttgttttttgcactacagggcagggttgagcagttgtcatgcagagcggatgaccctaaagcctaaaatatctaccctctggctctcgacaggaaaggtttgctacctttggtctaagtggtgagtcccaggagagcagaaacccctctgagaggtttagggacatgttcacacacccaagattactcagctagtaagtggcctagatgtaaatgtgtgtgtgtgtaagtttcaacatccaggactatcagggaagtgatcagtgcaatgtgtacaagtagagccagaatttgacaaaaaaagaaatctctcccaagaataaaagccatatgatgtgtacgtaggtgggtaagctcagtgcctgacttaatgtttctgagcaaggagtctattcaggcagactgtccaccacttctgagccgtgtggccttgggaaagtttttaacctctctaagcctcagctgtctcaattgtcaaatggatataataagacttattttgcaggactattatgagaattcagcatgataatttaagtaaatgcttaacatggttcctggcaaatattaaggattctctcccaggcctggttcccttcattggttcccactgctagtgacaagcccttccttggtcttcgtctatctgcccttcataacacagctcaagcagctggacagagacggagaaagggccctgacagtcatgggtggcagctgattatagaggttgaagtgttttagaatcactagacctaagttcaaatcttgaccctactactcactgaatcagatcatcttgaatatgttgatttacctttccaagccttgctttcctcctctggaagataggaaggaaatagacacttcgttgtaaggcaataagaaagagtaaatgcaatgatatgtgttaggtatttagagcagaacctggaattcagtaagtgtacatagtaagcacccaataaatgttagttgttattcccctcctacatgacctggtctaggtagattctagcttttctggaattctcatgggaatgattggctttgagcatctctaggcccctcttggacaccaccttggagacaagaggctctgagaaggcctctgtcctgtctcacttaagtggaaagtactataaaacccagaggcccagcacgttaaaccagcccagctatgatcctggcatggggaccaaacagtctttgaaaatatgtgttttcctagataaaacctccaattggacaattgtatcttttggccttatgcagactttatgactttgaaagctgttaaacggaaagctctatgaatgggatatatttatttctgtggcactctgactggtgctgttgacccaaccggggggtggggcttccagggctcgctaatttctctttgccaggtggctgttactgtgcctgtaccctcggagagccacagccagttgtcaccgaaacccagatgaagggcttctggctgcctaaaagattgtcctgtagccagattgatttcccaggaaaagaacatggtgcttgggaatttctctgggaagtatcacatttttctttcttttttttttaatttatgaagaagacatttatattttacagttatgggggctgagaagtccaagatcaaggggccccatttggactctatgaaaagtccaaaggtagctcaaggcattacatggggagggcctgagtgtgcttgctcaggtctctcttcctcttcttgcaaagcaccagtcccactcccatgataacccattaatccatgaatctctcaatactgccacattgggggttaaatttcaacatgagttttgcagggaatgaatattcaaaccatagcagctaccatttattgagtgtttattgtgtaccaggcactatcttaggcaatttgatttattttcttgtcagtcagcatttcagctgtttccacttttttgctattatggggagtaccgcatagaccttcttgaacattgtcttcatgggcatgtgaacaagattttctcttgggaacacacttaggagtaaaactgctgagtagaaggtatgtgaatgttcaactttaccagcaatgcaaaattatttttcaaagtgactgtaataatttatcctcccacaagaatgtgtaagcctacttataggatactcatcctatcctacatttggttcttatttttcctaagctgatgaatacaaaatagcattttggctggatgtgtatttctctgattactaacaaggtggataatctcttcttatattaattggccacatgtgtctccttttctgtgagatgtctgttcatgtcttttacccagtttcccattgaattgtttgctttatcttgtcgatttgtaggagttccttatattttgtatactaatctgtaggttgttatataattgcaagtatcttcttcctgcatgtgacttggtttttttactttctttaaagtattcttagcataagttcttggttttaatggcgttgacttatcaatctcctctttaacgattagcactctttgtatcttgtttaacaaatttctctgaatctcctttaatttcttttgaaagtttaaatttaaggttttttttattattatactttaagttttagggtacatgagcacaacgtgcaggtttgttacatatgtatacatgtgccatgttggtgtgctgcacccgttaactcgtcatttaacattaggtacatctaatgctatccctcccctctcccccaccccacaacaggccccagtgtgtgatgttccccttcctgtgtccatgtgtctcattgttcaattcccacctatgagtgagaacatgcggtatttggttttttgtccttgtgatagtttgctgagaatgatggtttccagcttcatccatgtccctacaaaggacatgaactcatccttttttatggctgcatagtattccatggtgtatatgtgccacattttcttaatccagtctatcatcgttggacatttgggttggttccaagtctttgctattgtgaatagtgctgcaataaacatggtgtgcatgtgtctttatagcagcatgttttataatcctttgggtatatacccagtaatgggatggctgggtcaaatggtatttctagttctagatccatgaggaattgccacactgacttccacaatggttgaactagtttacagtcccaccaacagtgtaaaattgttcctatttctccacatcctctccagctcctgttgtttcctgactttttaatgattgccattctaactggtatgagatggtatctcattgtggttttgatttgcatttctctgatggccagttatgatgagcattttttcatgtgttttttggctgcataaatgtcttcttttgagaagtgtctgttcatatccttcgcccacttgttgatggggttgtttgtttttttcttgtaaatctgttggagttcattgtagattctggatattagcccttggtcagatgagtagatcgcaacaattttctcccattctgtaggttgcctgttcactctgatggtagtttcttttgctgtgcagaagctctttagtttaattagatcccatttgtcaattttgtcttttgttgccattgcttttggtgttttagacatgaagtccttgcccatgcttatgtcctgaatggtattgcctaggttttcttctagggtttttatggttttaggcctaacatttaagtctttaatccatcttgaattaatttttgtataaggtgtaaggaagggatccagtttcagctttctgcatatggctagccagttttcccagcaccatttattaaatagggaatccttttgccatttctagtttttttcaggtttgtcaaagatcagatagttgtagatatgtggcattatttctgagggctctgttctgttccattggtctatatctctgttttggtaccagtaccatgctgttttggttactgtagccttgtagtatagtttgaagtcaggtagtgtgatgtctccagctttgttcttttggcttaggattgacttaggattgacttggcaatgcgggctcttttttggttccatatgaactttaaagtagttttttccaattctgtgaagaaagtcattgatagcttgatggagatggcattgaatctataaattaccttaggcagtatggccattttcacgatattgattcttcctaaccatgagcatgaaatgttcttccatttgtgtgtatcctcttttatttcattgagcagtggtttgtagttctccttgaagaggtccttcacatcccttgtaagttagattcctaggtattttgttctctttgaagcaattgtgaataggagttcactcatgattttgctctctgtttctctgttattggtgtataagaatgcttgtgatttttgcacattgattttgtatcctgagactttgctgaagttgcttatcagcttaaggagattttgggctgagacgatggggttttctagatatacaatcatgtcatcttcaaacagggacaatatgacttcctcttttcctaattgaataccctttatttccttctcctgcctgattgccctggccagaacttccaacactatgttgaataggagtggtgagagagggcatccctgtcttgtgccagttttcaaagggaatgcttccagtttttgcccattcagtgtgatattggctgtgggtttgtcatagatagctcttattattttgagacatgtcccatcaatacctaatttattgagagtttttagcatgaagagttgttgaattttgttgaaggccttttctgcatctattgagataatcatgtggtttttgtcgttggttctgtttatatgctggattacgtttattgatttgcgtatgtggaaccagccttgcatcccagggatgaagcccacttgatcgtggtggataactttttgatgtgctgctggattcggtttgccagtattttactgaggatttttgcatcaatgttcatcagggatattggtctaaaattctctttttttgttgtgtctctgccaggctttggtatcaggatgatgctggcctcacaaaatgagttagggaggattccctctttttctgttgattggaatagtttcaaaagaaatggtaccagctcctccttgtacctctggtagaattcggctgtgaatccgtctggtcctggacttttttttggttggtaagctagtaattattgcctcaatttcagagcctgttattggtctattcagagattcaacttcttcctggtttagtcttaggagagtgtatgtattgaggaatttatccatttcttccagattttctagtttatttgcatagaggtgttcataatattctctgatggttttttgtatttctgtgggatcggtggtgatattccctttatcattttttattgggtctattcgattcttctctcttttcttctttattagtcttgctagcggtctatcgattttattgatctttgcaaaaaaccagctcctggattcattgattttttgaagggtcttttgtgtctctatttccttcagttctgctttgattttagttatttcttgccttctgctagcttttgaatgtgtttgctcttgcttctctagttcttttcattttgatgttaggttgtcaattttagatctttcctgttttctcttgtgggcatttagtgctataaatttccctctacatgctgctttgaatgtgtcccagagattctggtatgttgtgtctttgttctcattggtttcaaagaacatctttatttctgccttcatttcgttatgtacccagtagtcgttcaggagcaggttgttcagtttccatgtagttgagcagttttgagtgattttcttaatcttgagttctagtttgattgcactgtggtctgagagacagtttgttataatttctgttcttttacatttgctgaggagtgctttacttccaactatgtggtcaattttggaataggtgtgatgtggtgctgaaaagaatgtatattctgttgatttggggtggagagttctgtagatgtctattgggtccgcttggtgcagagctgagttcaattcctggatatcctttttaactttctgtctcatcgatctgtctaatgttgacagtggggtgttaaagtctcccattattattgtgtgggagtctaagtctctttgtaggtctctaaggacttgcttcatgaatctgggtgctcctatattgggtgcgtatatatttaggatagttagctcttcttgttgaattgatccctttaccattatgtaatggccttctttgtctcttttgatctttgttggtttaaagtctgttttatcagagactaggattgcaacccctgcctttttttcttttccatttgcttggtagatcttcctccatccctttgttttgagcctatgtgtgtctctacccgtgagatgggtttcctgaatacagcacactgatgggtcttgactctttatccaatttgccagtctctgtcttttaattggagcatttagcccatttacatttaagttaatattgttgtgtgtgaatttgatcctgtcattatgatattagctggttattttgctccttagtggatgcagtttcttcctagccttgatggtctttacaatttggcgtgtttttgcagtggctggtaccggttgttcctttccatgtttagtgcttccttcaggagctcttttagggcaggcctggtggtgacaaaatctctcaacatttgcttgtctgtaaaggattttatttctccttcacttatgaagcttagtttggttggatatgaaattctgggttgaaaattcttttctttaagaatgttgaataattggcccccactttcttcttgcttgtagagtttctactaagagatccgctgttagtctgatgggcttccctttgtgggtaacccaacctttctctctggctgcccgtaacattttttctttcatttcaactttggtgaacctgacaattatgtgtcttggggttgttcttctcgaggagtatgtttgtggcattctctgtatttcctgaatttgaatattggcctgccttgctagattggggaagttctcctggataatatcctgcagagtgttttccaactttgttccattctctccgtcagtttcaggtacaccaatcagatgtagatttggtgttttcacatagtcccatatttgttggaggctttattcgtttcttcttattcttttttctctaaacttctcttctcacttcatttcattcatttatcttccatcactgataccctttcttccagttgattgaatcagctactgcggcttgtgcattcgtcgcatagttcttgtgccatggttttcagctccatgaggtcctttaaggacttttctgcattggttattctagttagccatttttctaattttttttcaaggtttttaacttctttgccatgggttcgaacttcctcctttagctcagagtagtttgatcgtctgaagccttcttttctcaactcatcaaagtcattctccgtccagctttgttccgttgctggtgaggagctgcgttcctttgtaggaggagaggtgctctgatttttagagtttccagtttttctgctctgttttttccccatctttgtggttttatctacctttggtctttgatgatggtgacgtacatatggggttttgttgtggatgtcctttctgtttgttagttttccttctaacagtcaggaccctcagctgcaggtctgttggagtttgctggaggtccactccagaccctgtttgcctgggtatcagcagcagaggctgcagaacagcgaatattgcagaacagcaaatgttgctgcctgatcgttcctctggaagttttgtctcagaggagtacgcagccgtgtaagggtcagtctgcccctactggggggtgcctcccagttaggctacttgggggtcagggacccacttgaggaggcagtctgtctgttctcagatctccagctgcgtgctgtgggaaccactactctcttcaaagctgtcagtcggggacatttaagtctgcagaggtttctgctgccttttgtttggctatgccctgcccccagaggtggagtctacagaggcaggcaggcctccttgagctgaggtgggctccacccagttcgagcttcacggccgctttgtttacctactcaagcctcagcaatggtggacacccctcccccagccttgctgccgccttgcagtttgatctcagattgctgtgctagcaatgagcaaggctctgtgggcataggaccctccgagccaggtgcaggatataatttcttggtgtgccgtttgctaagaccattggaaaagcacagtattagggtgggagtgacccagttttccaggtgctgcctgtcacccctttctttgactaggaaagggaattccctgaccccttgcacatcccgggtgaggcgatgccttgccctgcttcagctcacgctcagtgagctgccccactgtcctgtacccagtgtctgacactcctcagtgagatgaacctggtacttcagttggaaacgcagaaatcacccatcttctgcgtcgctcatgctaggaactgtagactggagctgttcctattcagccaccttggctcccagctccacatttttctctaaaagattgagagttcattttatcagggctttttggtcctcatagaaaactcttatggtctgggttgaaagcatctgacttcaagggttaattcatggctgatgaacattttctttgggtacccaatcccaagagctcttctgaaagtaagcaatggagctacaaagacatttccagaccaaagtcacaatgagactgactgcacacagaaaatatgttaattaggataacacaagcttctataacaagaaggtaccacaatgtataaaggcaccaacacaatagaaatttagttctcatccacattttagtccaaggctaacatttctagccagtggatagctcttctccacccaatgattcaggaatccagccttgaggccataaaaaattaaatgtgatatgcaaatagagtgccattgggtctagtacctggtcaaccatgagggctgtcaccatctttgtctgcaaatctcttgcccttagatcagtgtctagcatgtaataggtgctcagtaaatgtttgtgaaagaaatgaatgaatgattatcctactagttctattcctttcttccctgacttgggtcacctgacagaaaagccaaattcctggtcaactatttcgggccagttcaaaggtacatctgttgaccccagagtccactggttagtcaaatgttcctcctcctgctcccacaaaatcctgaattagttactcatccattttacaaattgatttcattacagagaaatttaaaattatataaatttgggagtatccaaaacaatctggtgtatggatattttacccaaggatctctgattagagtttcccttagagggcatctaggcccatagctgcaaaaatgacccagcttgtgagccaacccacttgacagtggcttcctgaagatgaattctgacggcaagcatgctgtgattgattagtaatgtctgccataggcagagaaaaggaagatgataaacaaagtcctgtgtaacctgctagaccctatcaagtctaagatcctcatatttatagggctgaggttcaaacagaagaagtggtacacaactaccattggagacataggttggagggcctagaagatcactggaggcagaatgaaaaaggatagaaaatggtggaagacctgctggaaaattctcttagaaataaagaatttaagagagctaactgctaggaacaagccaacaatggtagctatctctaagaaaaaagaaaggagtcagagcatggggtgtgatgtggtttggaatcttgctgggcttggtcagcctcatttgtgccaggttagagggggaaaaagaagcctgctgtccttgcccatgtttctttctgcatatcataaggtagtttcatgaactcaatgggcaattggtagatggctggggttctcctaggcctctgggatgcctcccatggagatctgggcacagagggcaccgtccagcccctgagcaccatgactcaccatacctggtccttcctctgtgcctcctctgtgctggttcctgggtgtccagagacattgaatcacggccctcaacccaggtgagctcacagtctagagggagacagagaagtcctgtatttcttggatcctaagatgatatggttacaaaacagtttatcaatttaatgacagaatttcaggaagacaaaaaaacaaacaaaaaaccaaccaaccaatcaaacgaacaaacaaaaaaaacctcccagcttaaccagaggcagattgtaggagctatcctgactttaccaaaggaaaaatgggaccacctgcatgatttttaatcaaggaaataaattcaatcagtggttacaattcggagtgatctgtgctgtgatgtggagagtgctggggaaggtgtggttgattctgccttggaagggaggtcaggaaggtcagggccctggaaaaaggacatttgaggaggagtacgccaggctgacaaagcgggaaagggattcccagcagtgggaatggcatggtcaaaggaacagggcatatccatatccacaatagcaagagcatgtgtaggtgagcctggatagacagcatgcaaatggtgaagggcctctatgtatctagagcagcaggtgggaagtgaggctccagccaagagagagccacagcccctttcagaatgggggcctagaagccgatcagccatcacagctccatctccttcagctgctcccagcgtgggagcacagatgcttggtaaccaagggatggtctatttaaagccacctgtaagttggttccagaaggcacactgtagggtagagaaggagagagggaaggggaatgtcaggaggaagaagcatccaagagggcacaggaggcgggattccagcctaggctcagccctgagctcaccgtggggcctggggcaagttcctgcctctctctgtgcctcaacttcctcagtcttgtgtagtggtgaattgtgtaggctcaggaaccagctgtgtgggtcccaggctaggcttcctcgcttgtgatctgcgagcattggtcaaattacttaaccactgtgccgacgttttctcctctgtaaaactgagataataatagtacctagcttttagagctgctgcgaggattagatgaggtaatgcatgtaaagcatttataacggttcctggcacacactaaacactcaaaatcagctatttttaaaattatgatacgatgatggtgttggactagcttagggggttttaaaccttaaaccttggaatctttctcctaacagatttggaacttcagtgggtgaaaaaggtcacattgagctcttctggctggaaggtggagaccctgagccttgccactttagcatcccccttacccaggactgcctcccagctccccgcaccccaggcacctctgcagaacctttaagctccaggaaacccagattaaaagcaattgtcccagaggatctctgaggtccttttcggttgctccttttaatccaattcttgcttcagaagcttgagtttatatctggaaaagctgtcttttacagctcaaaatccattttccaaaagcatcaactgagccaggccctgggggacagtgtggtaaaggcaaaccagggcagatatggagaagtgaggaaggtatttgagcaacaatcctgactgcaaaagctcacaaacaaccaaataccaccattatggttttttctttaagtcaatacatttttatttaaggaattttacatgttgtcattcgttccactgcccatcagggtcatcttagttcctccaaatcttgagtcaagatttatcttcaagataggcctttctagagattcatgctgaatccacagtccttctgtccatcttagttgggcttcttttgtctccacttcaatacagacatactgatgaaatactttaaaaacttcctatacagaatctttagggtctaattcttcaaataattcactttagggccctagcagttgaattgtagaaagcatattgttattttggctaatgagcaaaaatgcattattctttaatatttttctaatgttgaggttgtgttgcatcccattttcactcgtgaccttagcagaaatgttacaggtctcattgtcaccactgcgatgtgtttgctgtgaatggaaacatagcttgtttctcaatgcagccccattaacaatctctggatcgcatgatcaacagtgcctattctctttgagaatggggcatcaccttcacagttcttaggataagctatgcatatgtgactgccttcatttgtcacggtccaggatagtttctcattcttttttgtctagatggtcaggcactgtcattgccctttgtgcagtgtgccatggttgtctcttctctacttaggaacagtcttatttcctcacctctaacctgagaatagcagatgaccaacaaatcaatattggatctatcaaagggatctgaatatgggcacctctatgtgaactgcttcaagctggattcagtgatgtcccaaacagatgtagatcctgaccatgcggatgttattgtctagggggaaagatcaattagtgtaagtgtgatagggatcaggacttgaaagataaaattccacggtccagaacaaccattgtgggaccctataacccacaaaaagtaggggtttgccttcagtatctgctagggcttagccttgggaggaccttgagaaactttatcttgaggtcctgaaatggaagatctctttgcttcctgggaccccaagacccacagcagagttctgcctggcttttcagcatatacagatggctggctgcttgttgtggacgctgtcataattgcacatgcactttagacattggccattcagcttccaaggcaggctatggaggccacaatgagcaaaagctaaggagacaagccccatctacagttaagtcctgacccctatcacacttattgatcttccctcccagaataacatctgcatggccagcatccacgtacgtttggatcatcattgaatctagcttgaagcaggccacatagaggcacccatattcatccctttgattgattcaatattgatttgttgctcattcagcgcctatcttcattgactatcctctgcttgtccttcatctgcatcttcctctggtcacataccagctgcttcagccaccttgggcttgttactgttgtttaagcactcccaccgcttaatgatcaggttctctctgcctggaataccctttcctgcatcactgccttctttccacacctactaatctactcaatcctcaaaacaattccaaatgccacctcttctaggaagccttcctagatcacctcagaattttttattcctccatttcctgtcctcccatagatcagtatgtgacattccacttgaatttgaattatatttttgtcattgcccccactatgttataaagcttgatgtgggcaaagatttttatcttactggtcttcatagttgaatgtttgggggaagtccatgaacttgggctttttaattcctaggtctctctgggtaagcaaacttagacaagttatctaatatgtctgagtttccctattcccacctgtaaaatagggatttttaaaaacttgtgataacaagtttattgttagcattaactaagatgacttgtatgaagtaacaatgaaaataaaataatagtaatgagagctgatattgactaagtgctcatttaggcactgctctaagctttttacaagtagttcatttaaaacatttttaaaaatgttgaaataatgatagatttgcaggaagttgcaaagatggtactgagagatcccatgtaaagatagaactgagaggtccctttcacctggttttctccaatgtttacacattatgtaattatagtacagtttcagaaccaggcaattgactgtgtgagtattgttctgtgtccttttctcacttgtgtaaaattgtgagaatcttacacaatcaccaccgcaatcaagatacagaactctcccctgtccacaaagatctcccttgtgcagccccttcagagtcatacccacccctctcccttccgccacccccagcccctggcaaccaaccattagtatgttttctatctgcaaaatgttgtcatttcaacaatgttatctaagtagaatggcaaagtatgtgaccttttaagcttggcttttgtttttttcccactcagcataatgtctttgagatccattcaggttgtctgtctatagttcattcctctgttcctggtgagttctgttccatggatatgccaccaatataccactgatacacaccgatataccactgatacatgactgactgacagaccatggtttaaccaggaaaagtatctgggttgtttccagtttttggctttgacgtataaagcagctataaatatttgtgtatagatttttatttcaaatataagtcttcatctcacagggataaatgcttgggggtgccattgttgagttacatggttagtatatgtttagtgttttaggaaggaagtcaaactctttccgagagtggctgtaccattttacattcccaccagcaatgtgtgagtgattcagtgtctctacatctttgctggaatttggtgttgccactattttaattttatctgctctaaaaggtatgtagtgacacctttcatggtctgactttccatctccctaatagctggtgatgttgaacattttttcactgcttatttgccatctgtatattcttttcagtaaactgtctctacatgtcatttacccatcttctggttggattgtttgttttttaatgtggagttttgagtattctttatatatgctagatatgggtcctttgccagctatgggatttgcacaattagctcagttaatcctcacgacaactcatgaagaagatactaggattatcccaatttaatagatgaggaagttagggcactgagaggttagcactctgtgtggcacacagcaggtttccagggaaacatcacagtgaatttcatgcagatggagctcagaccaaaggtacagtagctctaggtaccttggttgcatggtggggctgttggagataaggaagaggagctgaaagtgaaggccagcaatgagtagagggacttcgtaccaggtcatcggcccatttaccaggttgaggagttgaggctcaagcactagaacagatttctatctgtctgtgtcattaagtttctgtaagtttcactaagtctttgaaaattgtgtctcttttcaaccgcatcctacctttctcctgtgctgcaaggtttgatggtagctggctggtttctacttcggggacttttttttttttttttaaagaagggatttctcctgtgtcttctgtatccagggcacatagaacaggctgctgctgctgctgctgtcatggaaagcacagtaacgagtcaggatatgagttgtcggtcccaacatggtagtgaatagtgcaggaattgagtgcaaataatttccctgggctttccatctccatatctgtaaaatgggagtgaccacagtagctggctggcagagtgattgtatagattaaatagagaggagaggtggagaacaggggcattggtaacactcatgggttcagagtggaactctttcctttctagctatgtaaacctgagcagcgtgcttaactttgctaagcctcagttttcttatctgaaaaatggggacaatcacagttcctactttgtggacttggtgtgaggattaaatgagatattgcacataaagcacttgcaaagatcctctctcaagatgaacgtgattagtaataactaacatctatcaagcacttactttgtgtcagaatctgcttaagttcatcaaaattaagattagacaccaagacaaggacttaggtgcaagtttatatgggaggggatcccaggaagcgatgtgagagaacagggaagtgagatggggaggagtcattttggtgggcaatgggggctcagtcccactggacatcctcttagagactgagaaacacacctcagaatctccactgctgtgtttatccaccatcttccagtccttattggtggagggtcactcctggggcattcattccaccacacctttgacctgccctgtccttgggctaagcatgtaaccatgaccagggagcatcctcaggagaaagactcaggaaggcattggcacatacaaggaactgaactatctgtatggggctttgagattggctgaggggaaattgatgaatgctagcagtgtctgctacaccactttaagcactttataatattaactcatttacttcatgcaacaacactatgaaatgttctattattatccccattttatagatgaggaaactgagacacagaggggttttacaacttgatcaaggttctccagtcagtctgatttcagagcctgcattctttttttatttttattttttgagacaggatctcactctgttgcccaggctggagtgcaatggcacgatcatgactcactgtagcctcaaccacccaagctcaagtgattctcccacctcagagcctcccgagtagctgggaccacagacacaccaccatgaaggctaattaaaaaaaaaaaattttttttttagtgatggggtctcactatgttgcccaggctggtctcaaacatctggacttaagcagtccccctgccttggtctcccaaagtgctgggattacaggcataagccaccatgcctggccagagcctgcattctttcgagaagttttgaccataattctcagtaaaaaatgtattttatatcacaattccgctcccaaacacacttacactaaataaataaaagattcctaaaacaatactcatctgtaccacgtgcagtgcactctgaaattttctgttttttttattaatcacgttattttaaaaatggtattagtcacccactaaattgttttcataacccagtaatgggctgcaacccacggttttggaaaagacagtgctctaaaattctattttataggacaatgttgatgtcataaggctggcatggggaatgatatggggtaggtgcccagggaaggctggtttccttgtgtgccctttctggcaaaccagagcctatgagctgctaccttctaggcttgcatacagaggcctggctgaacctagcacatttcttaaatcctagacttgccctagtggaatctgctcagcctcctccctggggatgggcaccatcttgggctgtgaccttcaattcaccggctccccagaagccagctcctccttgggaggtgaggttataccctgtccccacaacgttgtcatttccttcccctgagtctctctgtgtgaggattgttcccctaatcaggatggagacgcagttcattacaagctggtgaggcaacggctctgtgctccaggcccgagacaggctgtctgggagcttggccagcctcccactgccccggacaccagggcagtggcctcagagcagaaccagctcgctgggtttgtctgcccccttcccaagggacacaggcagacagacactgtttgctgagacttccacagctttcattattacaaaacctctgccatgctcagacaatgagtttcagcaaatgatggcactacttccgagagcatctgtagagcacctagaataacaactggactttattgagtgtttaccatgcaccaagccctgggctaaacacttcatctgcaggctgttcgtctttacggcaaacccagtaggtaggtataactatccccactctgcagatgcagaaacggaggcacagaatgttttggtagctaaacaagctcaccaggaggctagaaggtggccacacctagctggcccccctgactccaccaactgcctccctttgctgtattgcatgcaagaatgtgactccaagtttttccttccttctggatccaactctggcttcactctgctcagcaaccaggtgagtttccataggtgactttgtctctctgagccaagtttccttatctgtaaaacagggcctagtggtacttccttcctcaggctgttaggaagagtaaatgaaataatgtatataaatgcatctcccagagctcctaacacataagaagtgctcaataaatctatttatgaaagagttgattcagctgttttcctactgacttgacagtatcccacagccatttcccagaggcatgatgtcaccatccagaggataatagcagccaatctagaaacctccatgtgttcctgggcttctcatatttatgccttgtcttgcctcgctgccccatcttactactgacttccctggggcagaaatctccaatatgactaatatctcttggagggctatgaagaagccatttatttcctccaacaacagtcccttccacccaggatgaggagaatagccatgtggtggctgcagagcctggtgcagaaattctcattagctgcagtttaattactgcctgccgtataggtttttaataacagtaagtcccaattagttgcttgttacttcagaaataattactgatagtggacctttgtctctgttttaattccagcttcatgcccaagctgcggaagtctaaacaagtgggcatttttagctgaaggaggtggggaggatcggggatgcgtgaggaatgtctgcacagaactgcgagtttcactggggtgcgtgtgtttgtctgagatgagtggaggaatggccgtggccatttctcacctctgtaaagaaaatcctgggcccctgtcttgagctaaggacagggatggggccctgctctcaagggcaggtgggtctgggacatagcattctctgcacagagagaccacggggcagctggcctccagttatgacccatgccaatggcatgcccttctgctgccctggggggccaggccccagccactgaccagctcagaggcagatgccgccgccccctgacagtgacaggcacagccagatggaagagcggcttttgggagcagggagaggggagggagtgtgccgtctcttctgcaagggcagtgccccagcctcagccacacttctgatctgcagtccaacagacctttctagcatgccaaagagaacctgggggtgccagggggtcctcagagctcacactgcacttgtggcacccacagcgagtagccatccgtgagccgaggaaactgtacacaggtaagacggtcactgtgctttgtttgaagtaaggtagtttcctagcttcagggaattctttttcagtctgacctgcttttatgctgctttgtctttttaacttttatcctattgtacctgggaagctattgtagtgctgatgagttattgtctgctgaagttatgtagtgatcagagctaacatgtgctgggcatgccagaccctcttctaggtgatgtatatgtatttattcatttaacctcagacaatgctctgaggttaatataattattactatcagccctcatttgcagatgaggaaatggaagcacacagaaagattaaggaatttgcccgaggtcacccagcccatatgtggcagagctagggagattctctcccagggagtttgactccaccaccaagcttttgaccagtaggttatccggcctcttatgggaaggacttgacccattagagaatgggatgcttcacaatgcaaatatcccccgtgatttttctttagttggctctgcataatacgttcttttatggcctgtgtgtgtgtgtgtgcatttggtgatccttgtgttgatttttggttccaactgtgttctctgaaagcttccccccatttgaaatgtctgggtccagtcaaatgcctctgttcttagtgtttgtgcagtttccatgatggatgaaatggcaggggcacttctgagcccagcctaggactgtggcccaggccacccacgtttggaggtgacaaagccctctgtgccatcatgctggccagcgttggtccttttcaatgtgtcctcatgcccaacttgtctttctctctttcctcatgcccaacttgtcaagggaagatgtcacactgctgagccagtaatttgctttttttctcaccatgttctttggtttctttccccctgagaatcctttccagtggaattgcaaatggtttggctggaaaaacctgctgaaaatccatcctttttcatgttttccttcttacctcctgttcatttcatccatccggccaacctgcgaggttgtcttattgttaataatctgggctactctgtgtttggaggttcatttggaaaattgtgtccagcaggcagaaatgctccacttcatctcagacacaaaggcgttctttgaaggtacaaagggtttagtattaaataagtaagcaaacaagcctggcctttgaggagagaagtgtggaaggggtagggagaaaacgaaaactgcctcatcaaactgtaccttggtttatttagacaaggggagcttatttgtgtttattttatgctcacatcctaaggtttcaaggaatgcttctgtaatctactccagaggcatcagggctcttgccagaatcccttgatggccaatctttttgaagtgtcaggtgaaatgtgggtgaaggggctattctgtttgagaaacagcatgagggagggctgatccatttttctagttactgggaacgtttcccttcactacgagggctgatgctcttctcctggcagtatctgcccagaaaaatctcaagcctcaatgggtatatctcttccttttctctctctccaaactgaattgcatccgtgtcttagtttggatcctccaacacagactgtgaagtaagtatttcagtacaagtagtttatttgggaagtgattccaggaagcactgtgagggagtggggagtgagacagcgaggagaaagccaataaaaggtgtgctaatgggtgggttactataatgggcagctgggctcaatcccacaggggccctctgaaggactatgttggacctacctcagaattgtcccatggaggaacaaagaagctggggtgtttatgcaccaactcatctgcctcattgggtgtggttttctcctgggatatgagaaccccagcacttctggcctgccctgtttgatgcacaagaatctctcagagacaggatgtccctaggtgagggacatgcctactgtctgtgaatgacctccaggctaagccaagggaacatgacaggttgtcaacagcatctgctaaagcaaccaactgctctaacattgtgtgcactggataaaattataacagttgccaatatttacctataacctctagccagttacatgtgtattaatcttactgatcccccaaaacttttgaggaggggctgctgtcatcatctacagtacagcattgtggctaagaacatggactctggagccagaataactgggttcaaatctcacctcttctgctgggtagttgtgtgatttgggcgggtttcttagcttccttgagcctcaatttctatagctgcgaaatggggataacaatagtaactactttgtagtattgtttttgaagatcaaataagttaatacacataaaagcaattataatagtaggcatatactaggtgttcaataaacactagctggtgttatcctacagatgaagaaattgaagctcaaggaggttcttagctgaaggttttatagccagcaaatggtagaggcaagatcttaactcaggctttctgcagcagcatcactttttctactataccatgtgactttgtaatcattaatacatgagaaagcactttctaaactgtaaagtgctccacagaagctttgtttatatactatttctcctccttggaacagcagatacagtcttgttctctcaagagcttcagcctggtctttgaattctgctatctgtcatctctgtacacctggcactgggcacagtgtctggatgggtgtcagctaggtggatgagttacccaaagcctaggactggcccagtgatcccttccttcagagctcctgcctgcaaacttctgctcaaagtcaggccctatctctatcacataccccaattgctgctgcttcctcctccctactgcccctacaccctacttggaacatcctcccttttccaccctgccttctgcctggtccagtgatcatctcccacaccccacttctacaatttctccttcccttgcctccgcagtggccctccggcctcccctcctggactcagagcagccctctacttggtcctttttggatggtgctcttgggtatgtgtgtcagtctgggcttcctaccctgaccataagtttcttgtgggcataactgagtggcattttttcctttattcatttatttatccattgtggtcccagacatggtaccccatctggtaatggggaaatgggaacaggcagaacaagattgattcttggttgaagagctcagtttgggggaaaactggcatgcaaacattgctatcggtgacagtgaatcttggtggggacacagagctgaggtgcccagagactaggatcttctctctccatgcgatggggtcagagatgaagtgacactaaagctcagttgttagcttagggatgatttggttgcaaggaaaataaacttgctcaagccaggttatggaaaagtgggagtgggaatcttttagaaacaaagagcaggaacttctcctctaggaactagaaaatcatcagggcatatgatgtctgtcctgctcctctctgcatggcttcctttctgcacacaatcctacactgcccagctctgagcctagatgacctgccccaccagggccccatggtcctgttgtcccagtttcgagtccctgtgacactctgattggcccagcttgggctaagtgttcatccccagtccaatcagctttggccaggaaatcggggacatcaagtatgaaaaggatgcacaatcccccagtaggggtgggaggcaaggagtgcatctctacaagtcttttttttttttttttttttttgagatggagtctcgctctgttgcccaggctggaatgcagcggcgtgacctcagctcaccacaacctccgcctcccgagttcaggctattttcctgcctcagcctcccgagtagctgagactgcaggtgcacaccaccatgcccggctaatttttgtatttttagtagagatggggtttcactatgttggccaggctggtcttgagctcctgacctcatgatcttcctgcttcggcctcccaaagtgctgggatgacaggcatgagctaccgcacccagccacttctctgcaagtcttgaagggagagtatattagtttcctggggctgccataacaagttaccacaaacttggtgacttaagacaacagaaatttattctctcacagttctggaggtcagaaatataaaaatcaaggcgtgggcagagccatgctttcttggcagactctagaggaaagtccttccttgcctcttccagctctggtggctccaggcgtctcgtggctgtgacagcatcactccaatctctgcctctgttttcgcctggccccctcctctgtatcttctccccttctcttctcttctgaggacatttgttattggatttaggggccaccctaatctaggataatctcatctataccattaactttatacctgcaaagatcctttttccaaatgtggttgtttctatggattccaggtggacatatcatttagcggaccaccattcgacccactacagtgagagtctgaaagatggagaaagggaggaagggcattctaagttgagggaacagcatgagcaaaggatcattactcagggagcaatgacacatttctgctccgtgggcagagggttcactgatggcaacagagagggctgaggttacgtaggaccagaccacaaaaggacttccatgtcacgtagtagctttgccttgtgggcagcagggaggtccactggtggttctcgagtgacagaggagcattatagaatttaaaatttgtattgtaagcagatccttctggctgcagcatggagctgtattagagggggacagaaatggagggagggagatattcacagttataaacacccactatgtgccaggcatgtttctagagactagaaatagagcaaaagagggccaggcacagtggcttatgtttgtaatcccagcactttgggaggccaaggcaggtggatcacgaggtcaggagattaagacaatcctggctaacacagtgaaatgccatctctactaaacttacaaaaaattaccctggcatggtggcatgcgcctgtagtcccagctacttgggaggcagaggcaggaggatcgcttggacccgggaggcggaggttgcagtgagccaagattgcgccactgcactgcactccagcctgggcaacagagccagactccatctcaaaaaaaaaaaaaaaaaagaaaaaagaaaagaaacagagcaaaagagaaaagggactgggctgctgctatattagagcagcatatctaaagcagggagagaggaaaaaaagcagaggaacaaagatgtataacattaactggtaataagaactcaaaaggaaaatcaagcaaagaaaggggtatagtgagtgatggaaggttttatataggaggttcaagacggcctttctgatgaagtgacatttgagtagagcctgaaggaagggagggagggagctataagggttctgagggaagagtgttctgggcagagggaatggcatgtgcaaaggccctgaggcagaagcatgctgggcatgttcaaggaacagcaaggaagagcgtgtggctgggggagagggagcaaggggaagagaagtaggcagtagcatcagagaggcagtgggctgtatcacataggactttctagggcccagtagaactttggcttttactgtgagtgagatagggggctttggagggttttaagcagaggagaaacatcgtgtgacttaaacgtttttaaagagttactctagaggctgtgagaagaagagattgtgggctggaggtgagggtaggaggaggctactgcaacagttaggatgaaagttgacagtggcttggactgggggggcatcggtggtgtgtttaaacgtggccaggtgctaaatatatgctcaaattagagttgataggatttattaatggatggtgtatagagtgtgaaaaagaggagtcaaaaatgactccaagcattggggtccgagcaacaggaaggatggagttgtcatttatggggttggggaactgcaagaggactgggctggagcagctaggattgagagtttggggacatattagatattggtggcttgggatgcattaaatcgttgaatcttgctttgtgccaggcaatgctctaactacctcatggctattaactcctgtgacacttgtagcagcctcatgagatgggcacttttatccctctattttacaggtgaagaaactaaggcactgaagttggttgatatggtttggctatgtccccatccaaatctcatcttgaattgtagctcctgcaattcccatgtgtcgtgagaggaacctggtctgggattgaattatgggggcgggtctttcctgcactttcttatgatagtgaatgaatctcatgagatctaatggttttaaaaatgggactttccctgcacaagctctctctttgcctgctgccatccatgtaagacatgacttgctcctccttgccttctgccatgattgtaaggcctccccagccatgtggaactgtaagtccattaaacccatttttcttccctgtcttgggtgtgtctttatcagcagcatgaaaatggactaatacattggttaacttacccaaggcctccagttggtgaattgcagagctaggattgagcccacacagcctttgtccagggctcatgttctaactactacattggactgctgcctgttttttgaaaggtccaggggaggagttggggcaagggatatttacttaggaaagaaaaaatacccacagctggttctgatgtgcctccatccagctgccccttcaaccctcaaactcatctagatcttttggttttgggggagaagcacttagttgtctggcccagcaccacttaagatcctctcccaaggagagtaaaggaagatggactcctctgcactgatcctaagtgtatttaccgtttcctcttgtctgtgaaatgcaagctttatttctatctattttaaaaacatatactgcaggaaaataatggcttagtggaaatgtttaagtttctgggccccaaacaatttctaaatattatttaaaaaaaaaaaaaaaagaaagtcatgaaaagctgcataagctctacttagctgagacctgtgcaagggagcatgtgaggatggaagggttagcggggaggagggtagacacaggcctccacaaagccttcctggcataggcagccgcactgcctcctggacctcatttgtttgcctagaaaggactctttctcaatgcagactttttctaagggcttctagcaagctccctgcaaaatgggtcatttcttttcatcagatttgggatttggaaggtcctggtattccaggccccagacaggatttgggcgtgggttgtgttgtttccctgggacatcctattaatatgcaaccaatgcaacccgctgctcatcgatgaggagatgaggagagagggatagtggattactccaagaaatccaggggcctgtggaatcataccgtttcagacggaggcaaagattaatcgggattagtgaggggtctgcattcaagactggttttgaactatataattttatctgtttgagttccacttaagtgctcagaattactcagaggcagttaagcagagatccctagggagagcttgctttattgcagttaggaataatctgtgactggcttcttggcagcaaaagccaaactcctttgtttggctgtgaagactctgcaaagcctgagcctacttactggtttgttatttcaaagtgtattggatattggatactattacatgccaggtaatttgctggatgctttcacatatgttgctttatttaaccttcaccctaatcctggggcttaaatgttacactactcatttatagataaagaaactgaggctcagaggtgtcagcttgccccaggtgttaaagctgatgagagtaagagctttgactcagtgtccagtgctcctcgctgacctcacttctccattttccacttttttctcccttaaccgtcctctcctcacctgcccctcccaactgcttcagctaaactctgcccagtcccagctccttgcctttcctcttgctgttgttccaagcaggcactcaatgttagtctcatccaaatctccaagccctgtcctattccctgttaattcttcaaagtgcccacagagggggacctcaaaggtcacttggaagtggaagcactctaaattacctctgccaagagatatgacacccagaacatcatggaagcagacagaagagtctcctacaagaccctcatcttgtttctgtattatcctttattttttattgttttagcctgttatcaagctaattgcaatcccaaaggcaggccaccagcatggccttacctgagatcttagaaatgcagaggctcaggccccaccccagatccattgactcacaatctgcattttaacaggatctccaagtgattctccaacactttgaagttggagatgcattgctccagctggcatgcaccttccacaccgtatgggccagctcccaggccagggaaggaaaagaagggtctgcttacagctgggctctaatcggacttgcagagcaggccggtaaccacactggttacagggccgctctcagtttgtgtccctggagagtttgaagaagttgcagtggagatggctcctaccatcctttccagttggatcttcagctcttactctgcataggcccatgggggtggctatcaccctcaatcctgacttctttctcagatcttccactgtctgcctttgaaacggggagccctcttggcccagaggaaagccaggatgattggtctctagctgccctgttcttgctctgctaggcctggggaccagctctgttccaccttgccatcatgagctctggggaaggcagcccactggtgagcagaagaggcactgcctttctaagtggagctaggatagctgtcatctgaggttgcagctggaagatgggccagttctacttaaatgttgtctgactgctacttaacccaacactgcaggcttcctgccacatcagctgattgtaccccttgccccaaaggaaggagtaagcagttacttcttgcacactgtctccactcatggctcagctcttttccttgtcagtcttggagtctctaatgaaagggtatggctggactgagaatacttttgagggacagggaagtaaacagactcatggagcaggatttgagatgggaactcagattacagacttcataatcacagcttggaagagaagcgtcgtgtgtaaagggaaccaagaagaaaaggtacatcatgtcctttcgaaacatttcagcaaagattcttcaaacaagataactgaccacagaaccctagtcttgcttctttattattcttactattatgctagatcaggaggctaaatgcaatcccaagagctactgtgtattgatggcttactttgatccagggactgtgctgtgcacatcaatgcattatctcagtgcaaaaccagaacctcccccaattctcccattttacagctgaagaaaaaacaataacaaccctggttacccatcaatagcaggcagttttcaaattcatctctggcctcaaagacttctctgcaccaccacgctctgcattccagcagagcaaatgagaggcttggggactgttcagagctctgttgttcaaataaacagaactcatgctttcactgcacgaacataggtgtgttcataagtggtaagatgttgttcagaccactgcctccttcctaggatgtcagatcccttcatctgccatcatgtcctctcttatgctatgtccagatgccagctgaagcccagcagatgccactatgaaaagaaagcacaagaaaagcaaatacactgccttgcagtgcttattagtgcatgaacacaatgatacccgtgatgtttttcagaggaaggggcttgcagcccaagtccacttcgggatgtgaacttatctccacacaaagtttcaattgaaatgacagtgtttatttattttgtggaaacttgtcctgtgtcaaccatgatctggaggagaaaagatagccatatgccatatgggcaagtcccacacactcacacacaagtactcccataaaacctagttgtactgacattaggaaacggaaatactcctgtaagaaacaggatttccttccctttcttttggagccagctctattggttccctgttgctactgtaacaaattaccactaactctgtggcttgaaacaatgcaaattaatgactttctggaggtccgagttgaaaatctaggtgtcagcagggctgcattcctcctggaggctctagagggagaatcaatttccttgtcttccccagtttctagaggctgcccacactgcttggctggcccccagctgcaatcactggcatcactgtgacctctgctttcatggtctcatttccttctctcattcttctgccttcttctcccatctttaaggtcccttgtgattacactgggcccacctgaataatccaagatcatctccctattttaagatccttaatttaatcacatctgcaaaattacttttgtcataaatgtacctattcacaggttgaggggattgggtcgcagacatctctagatggcacgattctgcctagtacaccagtacaggcatttttgaaagcagataacactgtgagctgtgttaattaaagataagctgcaggcatattttagccatttatcttactactaaaaggacagtaaccaattccaaatataaaaattgaaacaaaaattgaaattgagagttgcaaattgagaaagagaggaaagaggggagggagaaaaagagaatacaaaatatatcaagaatgagtctgtagaaacacaatgaacaccttctgcagaggggagagagagaggtagagagggaagaagagcaggtgaagggagggtgaaggtaaggaaaagtattacaggtgagggaatagcatgggcaaaggtctaaaggcaagatggagccatcaccagttcattcatcctggcgctgcagttggtggtttgtaggttagtctttcctggagacactaagtgccttgaagacaggaatcatgtgtaccccaagggctaagcagagactaaccactgcatgcctcacccagccttaactgcggagggagggggttattaccattaaatatctagaatcaattgaacaaatgattattggccatgcaagcctctgtgttctcaaaggttctactctacactcaaagcttgagaggaaggtagaaagagttgctcagtgggtccatattggctctagtgccaagactggacctctgtttaagtcatgcgtcactgaaatctaccagtaataacagctaactataactgagcccttactatatgcagaagtcaactaatcctctcaacagttttgcaggctaggaacaagtataatcccaattttacaatgagaacactaagctaggggctctccatcagatgcccaaaaccaggactgataggtgctaattgaagggctgccattcctcgagcagaaagaatgttagaaagagccatttgacagcaatcatatccccaggctcatgggtgggggtgacagagaatggttgaactctcagtttgggagctcagctcagttcctgaaataaatcccctccttatttcatctgcattagttcaattcaatcattttttttcttttatgtttcaacttgattccaaaaaaggatttgaggaggcttaaaatatataagttaacaaaagataataacctatatttggatgaggaagtcagaataaagaggaaaataaagggatggggaaatcagattttgcctaaggcagtgggtgccacgggctcattcatgctacatagatgtgggctacagttgcagctctgagctttctatacaatgaattccctttgaagtctcagaaatctcttactgctttataatgcaggtataagcagaaacaacttttcacaggtaacatgcatcagagcttgaagagctttgtcacagcctgttgatatccagttctcaaatgaccatcagtcttagggaggaagtctagaggtcaatcagcttcagagcagcagaatgtgggcacttgttccatttccagcaaatggatggatggataagtagatggatggatggatggatggataagtggatggatggatggatggatggatggagcagtgggtggatggataagtggatggacagatggatggatggatggggcagtggatggatggatggatggatggaggtggatgaattggtgggtgggtggatggatgcattcataagaccccaggcctacttgcctaaatgcctgtatgcttagcacctcctcgtctttctccaggctcagcccagccccttcctgggtgagagggactgtattagtctgttttcatgctgctgataaagacatacccaagactgggaagaaaaagaggtttaattggacttacagttccacatggctagggaagcctcagcatcatggtggaaggtgaaatgtgcttcttacatggtggcagcaagagagaatgaggaagaagcaaaagcagaaacccctgataaacccatcagatctcgtgagacttattcactatcatgagaatagcatgggaaagactggccccatgattcaattacctccccctgggtccctcccacaacacgtgggaattctgggagatacatttcaagttgagattttgatggggacacagccaaaccatatcattccacccctggccccttcaaatctcatgtcctcacatttcaagaaactaatcattccttcccgacagtcccccaaagtcttatttcagcattaacccaacagtccacaatccaacatctcatctgagacaaggcaagtcccttctgcctatgagcctgtaaaatcaaaagcaagctagtgacttcctagatacaatgggggtacaggtattgggtaaatacagtcattccaaatgggagaaattggccaaaattaaggggttacccatgcaagtccaaaatccagtggggcagtcaaattttaaagctccaaaatgatcttttctgactccaggtctcacatccaggtcactctgatgcaagaggtgggttcccatggtcttgggcagctccacccctgtggctttgcagagtacagcctccctcccagctgctttcacaggctgacgttgagtgtctgtggcttttctaggcacatgctgcaagctgtcagtcgatctaccattctggggtctggagaatggtggccctcttctcacagctacactaggcagtgccccagtaaggactctgtgtgggggatcccacccatattttccttctgtactgccctagcagaggttctccatgagggcactgcccctgcagcaaacttttgcctagacatccaggcatttccatacatcttctgaaatctagacggatgttcccaaacctcaattattgacttctatgcacccacaggctcaacactacatggaagctgccaaggcttggagcttccaccctctgaagccatggcccaagctctacattggcccctttcagccatggctggagcagctggaacacagggtgccaagtccctaggctgcacacagcacaggaaccctgggcctggcccatgagagcattttttcctcctgggcctctgggcctgtgatgggagggcctgcagtgaaagtctctgacatggcctggagacattttccccatggtcttggggattaacattagtctccttgctgcttatccaaatttctgcagccagcttgaatctctccccagacagtgggtttttcttttctatcacatagtcaggctgcaaattttccaaacttttatgctctgcttcccttataaaaaggaatgcctttaacagtacccaagtcacctcttgaatgctttgctgcttagaaatttcttccgccagataccctaaatcatctctctcaagttcaaagttccacgaatctctagggcaggggtaaaatgccaccagcctctttactaaaacataacaagagttgcctttacttcagttcccaacaagttcctcatctccatcttagaccacctcagcctggaccttattgtccatatggctatcagcattttgggcaaaaccattcaacaagtctctagaaggttccaaacttccccacattttcctgtcttctgagacctccaaactgtttgaacctctgcctgttaccaagttccaaagtcgcttccaccttatcaggtgtcttttcagcaacaccccattctactggtaccaatttactgtattagtctgttttcacattgctgataaagacatacctgaaactgggaagaaaaagaggtttaattggacttatagttccatatgggtggggaggcctcagaatcatcccggaaggcaaaaggtgcttcttaaatggcagtggcaagagagaatgaggaagaagcaaaagcagaaacccctgataaacccatcagatctcgtgagccttattcactgtcacaagaagagcatgggaaagaccggcccccatgatttcaattaccccgcccccgccgtgggtctctcccacaacacttgggaattctgggagatgcaattcaagtggagattttggtggggacacagccaaatcacaccagggacccagctggcaaatttccacaactgactagggtctaccctgtgtttgagctgaggatatggaggggatgtgaggcgttagggaaaaaaaaatcatgtttttgtcttgcttttattatcattctaaatatgctttcctgtttcctttccctaccaccaccactgcatcaggcaggccttgggtatggacagatctcccaggaggggctgtccttggcaccccaggctggaaaggtcctgtgtttgctaggtggttgaggaagcagccatctcatgccctaatcagactgttgaaatgatgtcttgatgatgttggagggggtctgagctgtttgggggatctgaacttggcttctatggccaatcctctccaggacttgcaggggttgctacaactctcccaacctaggtttcactgagtctaaaacaacttttcatcgtgggcaagaaccaagcggccagagttggaatccgcttttaactagctatatgaccttcggcaagttagtttacctgtctgtgccccagtttcatccataataatgttacttagctcaaaggtttcaaggaggattatatgacataattcatgtgaagtgcttactacaatgcctaaccaattgtaagcaactcagtaaatgtaaaatggataaaacctaaattgcctcatctacctcacaggtttgctgtaaaatgcatgtgagttatttattcatgcaataaataattttttagcactttctatatgcccaacctgataatagggctgaagggtgagcttccttccttcagggcccctttcatgaaaaagctttcagaactgcagggtgctgtacagataaagagggttgtggtcttacccttggtggagtctctggtgcagaaggccttaaaacaaggctggcagcacaactttcttaaaatgaagttgatgtggaagcccagtcgataaagcaaataaaatctggtgggggttgaagaggagatgaggcagggggctgggtcctgctggctgtgttcttctccactccagcctagttccgcgagacacctcctggaaaccccttggctgctcaggacagagataaaatcctcagatgcagtggtagcgtgtgcctttcttttggctccaccccaccctttctccctttctctctctctctctctttaattaataaattttattgtatagagtagttttaggtttacagcaaaattgagcagaagtacagagaattcccatgtagcccctggccctgcacatatagcatcctctgctatcaatatcgcaccagtgtgtggtgcagttgttacactcaatgaacctacattgacatatcatggttatcacccaatgtccatagttcacattagggatcactcttggtgtcctgctgtcttttcaacacacacatctggccactggaggacagagggacccagctctatgggccagtggcataggtcatgctggtggaggcgttttctctgtagctgtggttttcctgttctgctcagggcctctgtcaggaatttcccctagaactctatagagtgaatggtcatgccctccaggtcaccgtaaggattatgatgaggacttcctttctttaatccctatgtgccttctgttttctggatcttttccttaaagacctctctagccaccataaactttcatttttactacccaacatggtactcttctttgtgacttctgtcccacccccagtgctattacttcatgctcaaaattatgcccaagagaggggtcatgatggagtcaacagatggctgcctgccccaaactgaaggaagctcagaatgggtactttatacctattgcctgagagtctgggctcactagtgcctactcacctactcaggctgacttccaacaataacaaatatgtatattaaatatacagatgtatatataatatactaaaatatgtaaaaatatactgtatatatcatacatatgatatatatataatgaccagagtttttcacacttaaatggatttatgttcatattcaaactcctctatttactaatggtttgacttaaaacttgctgaactcctctgagcctctatttccttatttgtaaaatggggataataatagtatgtcctcatatggttgttgtaaaagccaagtaagttatacgtaatgtcttaggcaatgtctaacagagtgcctcaccactgttttgcgtttattattgttactaaaaatgcatttcgtatatgtatatatacatatacacccatatacacatatataaaatgcatttttagtaacaataataaatgcaaaacagtggctaggcgctcagtgctagacattcattatatacatatacacatatatgaaatgcatttttagtaataatatttctgagccataatgaatcagctctaaaaggggaagcattgaagatggcgatgaaatgattcatgtccccttattaccagaggaattgtgagcttaatcgtagcagcctccatttattgagagcgtgtgatgtgctagcaccctgctcctgcttcaaattctcattacactgaatcttagcaaagcaaccacatagggtaggcttgttttatttttcagaaaactgaagcagtaagcccatcagctccgtctgagtccactgttggggggatcctgacctgtagccagcccctacccctaaccctgtaagcagagcgctgcctccccatcatcatgctctcagagctgtttgttttcatgatgtccactttatctgacagcccacacacagccacacagctcaggggcattgctccagggtgcagaatttttacaagcagcacacagtggaaacattcacggggttttttttttctttccttttttccaaaatagagccccgtagactgtatgaatgtgtattcacatttaggcctacatgtccttcttggagtccagaagtccagggcacaccatgctgagtatttctgtgtttgtaatttaatgtgggcccacctctcattatcagtgttcagagataaccatttttgcttctgactgtgtgtgtgtgtgtgtgtgtgtgtgtgtgtgcgcgcgcatgatctgtggctctctgggctggcctcccctatgtgtgtgtattgcagcctgtttgtaagcctgggtatatgcccgcctttctcccaagggtgtccatagacacacataaactatccttcacttctgttgttgagactctcctaggacactttgctcccgcggagcagggagagttgggagagggaatgtttagtctggaaggcagtcaggcaggcagctggagactccctgtggagcacccaggctggcgagctggcccccagggttgctccacgtgccctgatgatggggaggacagggctgtcctgcatgccctgagaccaaggagcacaatgcttctgcttgggtgacactaggcctaggatggctcctctggcataagtggtgagagggctctcagcaaaccccagccctatcaagatgggttcctttttccttttcctggttcttttcagtcctcagaataggtttttatgctgaattgaggctgaggggttagcatagagatgtagaaagagcatgaggctttggtgtcaggcagacctaagatagaattctgcctttgccatgtactcatcatttaatactaagacagggaaaattacttaccctctgagccgcagtctcctcatctataacatgggtctcataacgttacattgcaggctcatttgggggcctaaatgataaaatctgtgtcaagtacctagcttgttctctccttttttcccctattttctccctagaagtctaggtaatacagatttctgactggagcagcagggcaacaccacatgtttcttttctttctaggaaaagggctatttatttctgatgacctagttgagaggcagcagggtcagggaaaggatgtatctttgaaaatggtttcttttagcttcctataacttgagggtaatttctcatgccctagttaggtgggtgttaggaggacatcttaggaggatgttggcagctggagtaggggtaggttggaattctgcagaaagcatacaccttccttcccaacaggtttataagccagtaatcagccctctgtgggtatatcagctattaactgtctggtaatggggggataacaggctgcttgctgctctgctttgaggattctgtactaaagaggacagacacaggcctgccttcaagggacttccactctcatggagagagacacatgaatcaagaaaatccacattagctaatttccaggcagtaagtgctatgaagaagattaaatatggtaggtgtgataagaagtgcatggtaaagtgtgagggtaccacttaggtaaggtggtcccaggaatggcctccctgaggagacagttttggttgaaacctgaatgaaaagaagcagtacaacaatgatctgggagggaggacttttcaccttctcctacccctgcattcagattacaaatccatgtccttatggtggctaagtccctacacaatctgacttcctctcctatcactcccctcaggccatgctgctccagtcacaatggcacacacccacttcagggcctttgcacttgccacttgcagaacccagaaccctcttcctacagatatccccatgactcactcactctctccttcaagacttgcctaaaactcccccatgggctctggattctccattactttacgctatttttcccttagtcatcatcttctcacatactccgtaatttacttacctactgtttgttgtctttcattcctccctagactataagacccataaggcagatatttttgtctgattttattctttgatgtaaataaatacctagaatggtgcctcaaacatagtaggtccttcaatatttgttgcatggatggatggatggatagatggatggatggatggattgctggctggctggctgggtggctggatggatcaatggatggattgctggctggatggattgctggatggatagatgaacagacggatggatggattgcttgatggattgctggatggatggatggatggatggatggatggatggatggatgaatagatggatggatggatggatggatggatggatggatggacggatgggtggatggatggatgggtagctgaatggctatatggctgtctggatagatggatggatggatggatggatggatggatggatggatggatggatgggtccctggtgactcaaggctcatccttgtcatcaggagaagcaatgggaacagtctgagtctctaccatgggcctagccctgtgctaagctgtggtggtggggagccatagatttgacatgcagatggggccagacaaagaaaaatcagctgaaaaatctagagtcaggttggggacgtgagggctctgaggggagatatatgggtgcttctaagaaccataggaaatctaagaaggaaagattggggagggggtacagggaaagagataagtggagtaagaaggaagatggcctctctgggacccagagaagagagacccactttggctagagctaaggggcagggatggcaggaaagagtaaacctccccccaccccatgacaggccctggtgtgtggtgttccccaccctgtgtccaagtgttctcattgttcaattcccacctatgagtgagaacatgcggtgtttggttttctgtccttgtgatagtttgctcagaatgatggtttcaatcttcatccatgtccctacaaaggacatgaactcatcctgtgttatggctgcatagtattccatggtatatatgtgccacattttcttaatccagtctatcattgatgggcatttgggttggttccaagtctttgctattgcgaatagtgctgcaataaacatacgtgtgcatgtgtctgtatagcagcatgatttataatcctttgggtatataacccagtaatgagaaagctgggtcaagtggtatttctagttctagatccttgaggaatcaccacactgacttccacaatggttgaactagtttacagtcccaccaacagtgtaaaagtgttcctatttctccacatcctctccagcacctgttgtttcctgactttttgatgatcaccattctaactggtgtgagatggtatctcattgtggttttgatttgcatttctctgatggccagtgatgatgagcattttttcacgtgtctgttggctgcataaatgtcttcttttaagaagtgtctgttcatatccttcgcccactttttgatggggttgtttgaatttttcttataaatctgtttgagttctttgtagattctggatattagtcctttgtcagatgggtatattgcaaaaatgttctcccattctgtaggttgcctgttcactctgatggtagtttcttttgctgtgcagaagctctttagtttaattagaccccatttgtcaattttgtcttttgttgccattgcttttggtgttttagtcatgaagtccttgcccacgcctatgtcctgaatggtattgcctaggttttcttctagggtttttatggttttaggtctaacatgtaagtctttaatccatcttaaattaatttttgtataaggtgtaaggaagggatccagtttcagctttctacatatggctagccagttttcccagcaccatttattaaatagggatcctttccccatttcttgtttttgtcaggtttgtcaaagatcagatagttgtagatgtgtgatattatttctgagggctctgttctgttccattgatctatatctctgttttggtaccagtaccatgctgttttggttactgtagccttgtagtatagtttgaagtcaggtagcatgatgcctccagctttgttcttttggcttaggattgacttggcaatgtgggctcttttttggttccatatgaactttaaagtagttttttccaattctgtgaaaaaagtcattggtagcttgatggggatggcattgaatctataaattaccttgggaagaatggccattttcatgatattgattcttcctatccgtgagcatggattgttcttccatttgtttgtgtcctcttttatttcattgagcagtggtttgtagttctccttgaagaggtccttcacatcccttgtaagttggattcctaggtattttattctctttgaagcaattgtgaatgggcattcactcatgatttggccctctgtttgtctgttgttggtgtataggaatgcttgtgatttttgcacattgattttgtatcctgagactttgctgaagttgcttatcagcttaacgagatttagggctgagatgactggattttctaaatatacaatcatgtcatctccaaacagggacaatttgacttcctcttttcctaattgaataccttttatttccttctcctgcctgattgccctggccagaacttccaacactatgttgaataggagtggtgagagagggcatccctgtcttgtgccagttttcaaagggaatgcttccagtttttgcccattcagtgtgatattggctgtgggtttgtcataaatagctcttattattttgagatacatcccattaatacctaatttattgagagtttttagcatgaagggttgttgaattttgttgaaggccttttctgcatctattgagataatcatgtggtttttgtctttgattctgtttatatgacggattaggtttattgatttgtgtatatggaaccagccttgcatcccaggaaagaagcccacttgatcatgatggataagcttttcgatgtgctgctggagtcagtttgccagtattttactgaggatttttgcatcgatgttcatcagggatattggtctaaaattctctttttttgttgtgtctctgccaggctttggtatcaggatgacactggcctcataattagggtggattccctctttttctattgattggaatagtttcagaaggaatggtaccagctcctccttatacctctggtagaattcggctgtgaatccgtctggtcctggactttttttggttggcaagctagtaattattgcctcaatttcggagcctgttattggtctattcagagattcaacttcttcctggcttagtcttgggagagtgtatgtatcgaggaatttatccatttcttccagattttctagtttatttgcatagaggtgttcgtaatattctctgatggtattttgtatttctgtgggatcggtggtgatattccctttatcattttttattgcgtctatttgattcttctctcattccttctttattagtcttgctagcggtctatcaattttgttgatcttttcaaaaaatcagctcctggattcattgattttttgaagtgttttttttgtctctatctccttcagttccgctctgatcttagttatttcttgccttctggtagcttttgaatttgtttgctcttgcttctctagttcttttcattgtgatggtagggtgtcaattttagatctttcctgctttctcctgtgggtatttagtgctataaatttccctgtaaacactgctttgaatgtgtcccagggattctggtatgttgtgtctttgttctcattggtttcaaagaacatctttatctctgccttcatttcgttatgtacccagtagtcgttcaggagcaggttgtttagtttccatgtagttgagtgcttttgagtgagtttcttaatcatgagttctagtttgatggcactgtggtctgagagacagtttgttataatttctgttcttttacatttgctgaggagtgctttacttccaactacgtggtcaattttgggataagtgtgatgtggtgctgagaagaatgtatattctgttgatttggggtggagagttctgtagatgtctattaggtctgcttggtgcagagctgagttcaattcctggatatcctttttaactttctatcttgttgatctgtctaatgttgacagtggggtgttaaagtctcccattattattgtgtgggagtctaagtctctttgtaggtctctaaggacctgctttatgaatctgggtgctcctgtattgggttggtatatatttaggatagttagctcttcttgttgaattgatccctttaccattatgtaatggccttccttgtctcttttgatctttgttggtttaaagtctgttttatcagagactaggattgcaacccctgcttttttttgtttgtttgttttccatttgcttggtagatcttcctccatccctttattttgagcctatgtgtgtctctgcacgtgagatgggtttcctgaatacagcacactgatgggtcttgactctttatgcaattttccagtctgtgtcttttaattggagcatttagcccatttacatttaaggttaatattgtcatgtatgaatttgatcctgtcattatgatgttagctgagtattttgctcgttagttgatgcagtttcttcctagcatcgatggtctttacaatttggcatgtttttgcagtggtgggtaccggttgttcctttccatgtttagtgcttccttcaggagctcttgtaagacaggcctggtggtgacaaaatctctcagcatttgcttgtctgtaaaggattttatttctccttcacttatgaagcttagtttggctggatatgaaattctgggttgaaaactcttttctttaagaatattgaatattggcccccactctcttctagcttatagagtttctgctgagagattcactgttagtctgatgggcttccctttgtgggcaatctgacctttctttctggctgcccttaacattttttccttcatttcaactttggtgaatctgacaattatgtgtcttggagttgctcttctagaggagtatctttgtggcattctctgtatttcctgaatttgaatgttggcctgccttgctaggttgaggaagttctgctggataatatcctgcagagtgttttccaacttggttccattctccccgtcactttcaggtacaccaatcagacgtagatttggtcttttcacatagtcccatatttcttggaggctttgttcccttctttttactcttttttctctaaacttctcttctcacttcatttcattcatttgatctttaatcactgataccctttcttccagttgatcgaatccgctactgaagcttgtgcatttgtcacatagttctcatgccatggttttcagctccatcaggtcatttgaggtcttctctacactggttattccagttagccattcgtctaatcttttttcaaggtttttagcttctttgcgatgggttcgaacatcctcctttagcttggagaaatttgattgtctgaaaccttcttctctcaactcgtcaaagtcattctctgtccagctttattccattgctggtgaggagctgtgttattcctttggaggagaagaggagctctgatgtttagaattttcagcttttctgctctggtttctccccatctttgtggttttatctacctttggtctttgatgatggtgatgtacagatggggttttggtgtggatgtcctttctgtttgttagttttccttctaacagtcaggaccctcagctgcaggtctgttggaatttgctggaggtccactccagaccctctttgcctgagtatcaccagcggaggctgcagaacagcgagtattgcagaataacaaatgttgctgcctgattgttcctctggaagcttcatctcagaggggcacctggccgtgtgaggtgtcagtcggaccctactgcgaggtgcctcccagttaggctactcgggggtcaggggcccactgaggaggcagtctgtccgttctcagatttcaaactccatgctgggagtaccactactctcttcaaagctgtcagacagggacatttaagtctgcagaagtttctgctgcctttttttcagctatgccctgcccccagaggtggagtctacagaggcaggcaggcctcctcgagctgctcagttcgagcttcctggccactttgtttacctactcaagcctcagcaatggcgggtgcccctcccccagcctcgctactgccttgcagttcgatctcagactgctctgctagcagtgagtgaggctgtgtgggcatgggaccctctgagccaggagtgggatataatctcctggtgtgccgtttgctgagactgttggaaaagcactgtattagggtgggagtgacccaattttcctggtgccatctgtcacagcttcccttggctaggaaagggaattccatgaccccttgtgcttcctgggtgaggcgattcctcgccctgcttcggctcacgcttggtgagctgcacccactgtcctgcacccactgtctgacaagccccagtgagatgaacccggtacctcagttggaaatgcagaaatcaccagtcttctgcatcactcatgctgggagctgtagactggagctctacctattcggccatcttggaaccagatctttcaaaatattttaacatttatttaaaaattttaattgacaaataataattgtacatactcatgaagtacatagtgatgttttgatacatataatgtatagtgatcacattgggctaattagcatattcatcatctcaaacatttatcatttccttgtgttgggaatgtttaagatcctcctcctagctaaccgaaactatataatacattattgttaactatagccatcccacagtggtatagaacactagactttatttttcttatttagctgtgattttgtattcttcaacaaatctctccctatctttcccttcctccaacccttcttagtctctagtatcctctgttctaatttttacttcaatgagaacaactttttttagtttctacatattagtgagaaaatgcagtgtttagcttgtttcacttgacatactgtcctccagttccatccatgttgctatgaatgacagaatttcatttcttttttatggctgaatagtattccatgttgtatatataccacattttctttattgattcatctcctgttgaactaggttgattccataacttagctatcatggactgtgctgcaataaacatggaggtgcagctatttattcaatatactaatttcctttctcttggtgaaatgcccagtagcaggattgctgaatcatatggttgttctatttgtagttttttgaggaacttccatactgttcatagcagctgtactagttttcgttcccaccaaaaatgtatgagttcccttttctctgtatctttgccaacatttgttcttctttttctttttgataatggccatcctaactggggtgagatgacaccccattgtggttttgatgtgcatttccctgattactagtgatgttgaacattttttttcatatatttcttggccatttgtgtatcttcttttgagaaatgtctgtccagatcatttgcctattttttttcctgtggagatgtttgagttccttgtatattctggatattgaccccttgtcagatgagtagttcgtgaccattttctcccattctataggttatatttttactttgttgattgtttcccttactgtgcagaagctttgctatttgatataatcccatatttgtttatttttgctttggttgcctgtgcttttgaggtcttattcataaaatcttctccaataccaacatcctgaagcatttcccttatattttctttgagtagttttatagttttgggtcttacgtttaggtatttggccattttgagttgattttagtataggatgagagatggaggtctgttttcattcttttacatatccagttttcccaacaccatttattgaagagggtgtcctttcctcagtgagtgttcttggcatctttgtcaaaaatcagttggctgtagatatgtgggttaatttctgggttctctattccgttccactgacctatatgtctgtatttatgccaatgccatgtggttttggttgctacagctctgtagtatattttgaagtttgatagtatgatgtctccagctttgttctttttgttcaggattactttggttatttggggtcttttgtggttccacacaaattttagaactttttttcccatttctgtgaagaatgtcattggtattttgatagggattgcattgaatctgtagactgctttgggtagtattgtcattttaagaatattaatgcttctgatccatgagtatgggatgtctttccagttgtttgcatcttcttaaatttctttcatcactgttttgtagttttccatagaagtcttttactgcttctgttaactttattcctaggtattttattttacatttttaataacataggttttagtgtcagatccaaattcaaattctggttccaacttttatgagctgtgtgtccctaggaaagtgacttaagcttctctgactctgttttcttaattataaaatgggaataacaccaacctcataatatagttatggagattagctgagaccgtaattagaaagtgcaatatgtacccaatatgacatgaaagcactgggcatatgatctggcacatagtttaccctcaggtgctaaagtggtgtttgaagaaggtgaggcaagctgaggtgtgtataatcagttgaaggtcaagagatccatgtgggccgggtgcggtgactcacgcctgtaatcctaacactttaggaggctgaggtgggtggatcgcctgaggtcaggagttcgagaccagcctagccaacatggcgaaaccccgtctgtattaaaaatacaaaaattagcagggcgtggtattgtgtgcctgtaatcccaggtactcaggaggctgaggcaggagaaattgcttgaacccaggaggcagagattgtggtgagccaagatcacaccactgcactccagcctggacaacagagcgagactctgtctcaaaaaaaaaaagagatccatgtgcctgttgggctggaccaaggggtctgttggctttggggttgtttaggccatggaagtgggaggtttttcatgcatgaaattctctggtcacagccagagaagctgcaattttgacctcatcagtcccagcaaagaggaccaatttgtgtaaagtctagtgtgccacagacctttaagtgagacctttaccaaattgggaaagttagtcacaattgtcatgtaggtcctttgccacagttacagtctgcccagctccagggcttcttaggggacatctcagagccgaaggaagcctggtaagagaacatgcccccttctggacctcagtctcccatctatgcactgacggtgatggatgagatgggagggttgggccccgcctgcaaagtgagaatattggctccagagacaggaaacctagttctaatccgacatatacctctccctgggtgtgccaccttggacaagttcctcaacctgagccttagtttccttgttttcaaaaaaaaaaaaaaaagaagaagaagaagaagaagagataatgataatatctggcagcccattccacaaggaggcataaacaaatatattcatgtgaaatgctctgtgttgggctggcatgtggcaaacacccaatagatgatggctactttaatcaccactggggagaatctcctgttgctgacactcttggagccagtatgtctccctcccactctggccccagggtttggctccctggatgctccccatccggtcaggaagtgcctcacagcctgaggcagcagaggagttggacttgtccggtgggagaggagccagtggacattatgttccttcccaggaatgggaaagggagaatgttcctgggtgaggagcaaggctctggggcaagcacacccaggaacatccactcccgcttccccactgcccagagccaagcgtagtgcagggccctgtgaggaggaagacaccagagcagaggtgccggcctgcctcaggctcctggcaatcagggcacactcgtacagagtatatgttctcacacattcacagatatccccacaccccgtacacacatggtgagtgacacagatatatattcgaaagcctctcagaaatgtactcatgcatccacgctcacgtggccatgcactcatctacattcaggtgtacacatgtaactcacagatcctgaagtccggattcctacacatacactcacacatacacaaggaaactcactcattcccatacacttacccatattcacaaatacagttgccaacacaatcacacaggtgtcgacattcatgaacacatatataaaaatgcataccagaaacatgcacatataattatactcaaagaaccaggtacaccaaggtcccctacccttctagtcttctggaatcattgattaccatcatatccaaataaaatggctcaagctctatcccagctactctgagaggcgctccctccccggtactcccatggagttcacctgccaggtgcatttgccaccctgaccttgctgcaagcacctgagactacagccctatctcctatgcccacctttgttccaaaattctcattgacacaaggttcttgaagctacccagcttttgctgaaaatataagagtgggcagaaaacagccctatgtttctaaaatgtggtggccattcattgtctccgtggagtgcagcctcccgctctgcctcagtgtctccatcctcatttcctcgtcacatctctctctcccaccatttctgagcccttgccccaaccccactcaccagccttcacccatcaagcctctggaactcccagagaacaagaccaaaatatcattttaggcagagccattcagtcctctcttgtatttctcctatcccttctggctcagggaccaaaggggcccattaggctctttcctagactaataataataataaagctatgtaagaaaaactctctggaaaggaattgtgcctctctcctaaaaggcagaagtggtttcagacagtatttgatgtcagcgacatttttcttacgcacttgcgcacacacacacacgtacagacacacacactctttgcctctttctttttttctctctctctctgacacacacacacacacacacacacacacacacacacagcctaggagaattaatttcctgtttcctactctcctcccactccccctcccatctttggacagttgctggaaaccaagaggctggaccctcaaataggtcctagacagggacaggggtagggtggggagaacagatcttgttaggaaaggagtcagggaaggacctgaatgggcctcagttttgaagggcaccaatgtatttactaaatcacaccctgcactttcccgcctctcaacctctgctctcacagtgcctcaccctggaatggccgcatcaaccctccagctctggctaagtcctccgttcccaaagtcttagcctctgtcagtcccaaatgactctctcactataataatcctcataagctgtcatgtgcacctctaccaaaattctgtaccctctgatttatgaggcagcccctggggccgctacatgtttccccaactctgtggtgaacttctggggaatgcgacctatgttcccccaactctgtggtgaacttctggggaatgcgacctatgttcccccaactctgagtccctagtatacccagtatacacagcctggcacaaagaatgctcaataaattatatatcatttgcttcatctctctgtatctagaactcattaaaatctgtgtcatcaatatctccatcatcaatatctacctacataaagcctacctggcttagccccaaatcctcaacctgagcaagaagaagctgatttctgctcctgcctttactacttcttggttttctgacactgagaaggtcatttagcttctccagatttttgttttctcatgtgcaagataaaggagttgaacaaagacagtggttttcaaactggattccgaggaaccctagggttccaagaagacatgatggtgagaagagcaaggcaaaagggaaagaagacaattgttaatgagcaggacccccacttctacccagattgctccttcttgctctgttttgtctaccatgcttccacacaatactacacttaatcaaagggttttggcagggcacagtggctcacatctctaatcccaacgctttgggaggccaaggaagatggatcacttgagctcaggagtttaagaccagcctgggcaacatggtgagacaaaaaatataaaaattagctggacgtggtggtgcatgcctatagtcccagctacttgggaggctgaggtgagaggattgcttgagcctgggaggtcgaggctgcagtgagccgagatttcaccactgcactccagcctaggtaacagagtgagaccctgtttcaaaaagaaacacacatacacgcaccccaaaacaaagggtcctgttgcaaaaaaaaaaaaaaaggaaaaaagaaaaaaaaaagaaagagaaggaaaaaagaaatttggtaaaacaccagtttaaaagcagtgttttgttttgtttttttaatattttactatatttattacaaaaatggcctgaattgcccctttcattttatccatggccctttcttttttttttttcttttattttattattactatactttaagttttagggtacatgtgcacaatgtgcaggttagttacatatgtatacatgtgccacactggtgcactgcacccactaacttgtcatctagcattaggtatatctcccaatgctatccctccccctttcccccaccccacaacagtccccggcgtgtgatgttccccctcctgtgtccatgtgttctcattgttcaattcccacctatgagtgagaacatgcggtgtttggttttttgtccttgtgatagtttgctgagaatgagggtttccagtttcatctgagggcctttccagcttttgccaaaacaagattctcacctcataaaatgcccatgtaagacagaaagcacaacaagtgtttttttatggatttagggctatctttccttttgtatctagagtcactgactacctttccccttcctaccaagactagtgtgctctcattacctcccctggcctctactttctcatctagctaaagggaactctcacagcacttcactctcagtgttttaaggagagacttgcattcaaagctgatgaaagcaaacccccggcactgagtgtggcacctagaaggcaccctctgagtggtggctgtggtgcccactagtgtcccaggagatggatgcctccatgggcatcatgcctggcttgtggctggagtttgcaatccgagggcaaggattgctcagtgattaggagcctgtgtgctgtcagacatctaattagccatcgtcttcccaggagacagctcagttgtgcaatttttatttccatattttacacattctccatcagcaagagagacccacgccaatctttcaccagcctcattgtttgtttgcattccagctgtgccaactgcccacttcttactttactctggttcccacccgccagggaacatgcctgttggcaggcagggtgggggtgtggggaatagctattacatgtcgcttcaaaggcccatcttcaagaccagcacactagggacagctgtattggttggatttcctgcctggcacagggatcagtgagagcacacccccattaccatctatttatagggacggtttggtgcggtacaaagaacattgggtttggcatcaaacaggattggtcttttttctagcaatttaatttacctctctgagccttggcttccttatcagttaaatcaagaccttgaataattcacattatgaggctgttgcaaggctgtatgcttccatacatatttattgggtttgtccaaatgaaataatgttcatgtctgcgctttgcaaactgaaagtgttgtctaggtgggagttattccacaattgcagactgtctttgattattcaacgagcttttatcaagtttagattatccagactcattattatgagattattaaactggccaacccttcctgcctgctgttgcctgttttgtggttttcattgtggtcagttcaaagaggctgattccttggagcaaactcagcagggaaagatgtgtctcctgaagctattattgatggcagttgttcctatctcatcggaatatgccttcgacctttctcctacttagaaaactactcagtgctctccactgggctagaaaccacggatgttataaaagaaatataagcctgagttcatgacttctacatgctccatctaactaggagagcaaaaatccacacagcatttagcaagcagcttttatgtgcaaggcactgtacccacatgcattttatccaaaccctttaagaagatgttattagtcccacttcacagacaaagaaactgaagcccaaagagtttgtcactttccaagctcacacagctagtcagggtggagcctgaagatgctgcctccttttgaaactgtactacgactgtctattttgtctcttcctcttctacattctaagctcctgggggtgggagctgggtctgttcatcgcagtgcctggcagaggcccctcagaagacagcgaccactgagatagctcattccgtgcccccagctcctccctgtctctcccaactaacctctcctcctagccacatcccaggacttttgccttcccgatctccctgcccgcaattcaggggcctcttcttggctgccaggttgttgaggcaagtgaaggcttgacctgggcctggggctcctggctaagctcctgattttgtctccccagacagagagggaggtccctggcattcaggacactgggtccttacctgccaacagggctaagaggtactcagcccgccaagaggccgcggtgctcacagctgccagtggagacacagcccaggaggcctggtcagtggttgcctggagattgagaaatgtgttggctccagcctggctccctcatctgagaaatcaggggaacctgacccaacagcccagtgtgtttccacagtgtctggggcagccggcaaatcaggcctgcctgacggagctcgggcccagggaaaagcagcctgttccttcactctccccatgttcacggactgctgccaggggaagcattttgagtgtttgctcaggctgggactgatgcgcaggcctcctatctctgcagggtctagccaccgggtgtcatggagaaatggggcatgtctggcttcggcctttgctccataaagtgcactgggaggacccctgttcagaaggtaggcctagtttggattccaagctctactacttaccagctgtgtggcctcttggacaagtcacttaacttctctgagctgcttctttatctgacaaatggggatcataacagcaaacttaatagaactggcataggatggacttatgaaataataaatttaaacagcctagcacacaggaaatacttcataaaggtatgttccttccttctgtcacactgtgccaaggcttccaaactttttcttgcccctctcacctgtgtccacaacatgcagagaggccagagctctggctttgacactgaccaccgtggagcaggtttgctgcataggtttccctgcactgggcctgggccttggttgccaccacactgctctcatacccccattgtcctcagcacacacatgtgagggaggtggcattgagtaaatgtgtaggttatcatcaaggaacagcccatcctaaatgacaagaacttaccaacacaaagaaggaaacaacagaccctggggtctacttgaaggtggagggtgggaggagggaggggaatagaaaagataactactgggtattgggcttaattcctgggtgatgaaataatctgtacaacaaacccccatgacatgagtttacctgtgtaataaaccttcacatgtacctccaaacctaaaagttttttttaattgtgtaaaaagaaaaggaacaacccctcacaaatatatgtattaactgacttcatttattcgtccatccattcattcgttccttcaaaaaaacatttactcaactgctactcttggaagggacacatattctggaccccagggatatagaggtgagcaaatacagcccctgtccagtgtctaggaagtgggggaaatggacaagggaagaggcaattaaacatttcacaggttaggtacattggtagaagagaaggacagaattctggggcactgcagagatgaggctcctaactcagcctaggaaaacaagataggcttcccagaataagtgatgccagactgttggaggataattaggaactatctaggcagaaaataaaggggaaaatgttgtagaagagatagtatagcttgcaaagacctattggtttcaagaacatgcccatgtatttgttagagtacgttaactgctgtaataagtgtctacaaaatttcagtgacttcaaacaataaaagtgtgtttcttgctcatgaagtggtcctgcgctggtgttcctgatttcattgtgtgactctgccatcgtttggctccttagaatctatcacttctagccatgtccccaggaggaaacggaaattgcttttggtgaatatatagcagtatcgcaggaagtgatataagatgtggttgtactggtaggcaagaccagagtgtacaggcgatatatgccaagctagggagtttgaattttatcctgaaagtagtgcagaatcatcagaatttttttaacacagcaatgcataatcagatttgctttttagaccaattactccagctgcagtgtggacgacagattatgaaaagagaggctagaagcagtagcaccagtcagaatggtattatggtaatgtaggctgtcttagtcagtctagtgttactatgagagaatacctgaggattggtaatttacaaagaaaagaggtttatttggcttatgattctgatggctggaaagtccaagattgggcagctgcatctggtaagggtttcatactgcttccactcatggcagaacgtggaagggaggcagatgtgttcaaagagatcacatagcaagagaggagggaatagacagtctagaaagaaaaacttgtatttataacaacctgccctctggtaactaacccagtcccatgagagcgagaactcacctacttcttttgggagggcattaatttattcatgaggataaactctcgtgacccaaacacctcccactagaccctatctcccaacactattgcattggcaattaaacttcagcatgagttttggtggggacaaaccacatccaaaccatagcacaggccatcttaccttaaggataggtgagcagagggtattggaaggaagaggggggtgttaaaagtcctaaaaggtaatctgagtcatcaattggaatttgtattgcagtgaagctagaatagcttttaggtccatgtctagttcaatggctaagtgaccattatgctcatgaaatgacaacgaacttatctgagagctgttttcacaagcctgaatctcacctattagaggactggtcaatagatttggtcagtacattttgttagcttttggagaaatcatagatatgtctgttgttgtcttaacatctgtgtcttttattctgttccccactctgttctccatatatgtttcttatgcctttgtttccccctagagaagcaatgacttgcccctgaatatcagtgggtagagagagatttccttatccctacaaagcggctcttggtctgtagctgactatactcaaaccaccttctggaaggccctgcctgtaacttaagggctcatcactctggaagggacccaggagactgcagacttactttataccaggagagagaaggattcaagtctgtgcatgcaattctcttggaattaaggagatgagttctgcagtatttttttttttttttttttgagacggagtctcgctctgtcgcccaggctggagtgcaatggcgtgatctcggctcactgcaagctccgcctcccgggttcacgccattctcctgcctcagcctcccgagtaactgggactacaggagtatttttgtatttttagtagagacggggtttcaccatgttacccaggatggtcttgatctcctgaccttgtgatccacccgcctcggcctcccacagtgctgggattataggcgtgagccaccgcacccggccgagttctgcagtctttaagtcttccttcacttactgtgaaggatgctaaaacttcagactcacacctttcaggttgatatacaagacctggtcagtccagaatccagctggtgtagagccacacctcatgaaatgtgataatgagtttcctcttaaaagaaaggagcttcagtgctgaaaattaaaaatattcaaatgggccagatgtgattccagcgtagctcagcagttctaacttaagccttctataaagcaaccagtaaaatacctctgggccgtctttttatgcttcatccaagaaaacaagttttccatggtcttgggaagcctcactacttcccatgtgcaaaacataagcttgccacagcctgggttcttgggattgtccctatcccaacagaaagcttcaaagtaccttcctggaaaacgtaggtagtggctacctggctggtttctgtgactaatacctggcccattgagttgagatttggcctcctggccacatggaggaccacaaacttctgcctggtcaggcctctgttctctgtattcccttccctagctgctgatcttgcctccaccttcaatctttgtgcacctcccttcagcccccatttacctctgagctcatgaatccctgacatatttcttccactcaacccatcttgccaatgttgacacacacaaggtggtttgggatctgcatcagtccattcttgcattgctataaagaaataactgaggctggctaatttataaagaaaagaagtttaattggcttgccgttctgcaggctgtacaggaagtgtagccccggcatctgcttctggggaggcctcaggaagcttttactcatgcagaaggcaaagggagagcaggcatctcatgtggcaagaattggagcaagggggtggaggatgtcacacacttaaacgaccagatctcatgtgaactcatttatcactgaggtgatggcctaagccattcatgagggatctgcctccatgaggcaaacacctcccactgggccccacccccaacactggggattactttccaacatgagattgggtaaggacagtatccaaactatatcaggattcttcatagcgagtgggcattttgttctctttatttccaggtatcttcttagggtaggccagtgagttggcttttatttcagatacagatttctgatcaattattgagtacttactatgtgctaaatattctacatatgttatctaaaatactcagggtaaccttaggaggtatatattgatacgtcacttgtaatggacacaaaattgtctgccttgaaccctcatttgtagaaacttcttacacaaatctttatggtttcagcaggagctactagatttctacatgatcctacttcctgggcccacacgattgatccaggagtgagcacccgataaagactgggccaatcattccctttgatactgggaagtttgctactgggcataaaagaagaaaatgagtttcactctctgtgtctgaacagtagtaagtaaaacccagggacctttataaccatgcttcccaccacatgcactacaaaagcaacctttgtgcttgagaaagcagaactttctggaagcaataatgtgaaggagtaagacatatgtggtggattaagacagacctgagttgcaagcctcattttgccagttactaaccatgtgatttggactgacaatactaacactatctaacagttgttgaatttttatgatgtgccaggtactgttccaaagctttatatgcaaggtcttatatgcattaactcattttattatcacaatgacagcataaagtattttctattatcatcttcattattttacccttgaagaaactaaggtcctgcaaagttagaaatgagccgaaatatacacaggtggttgggtgcatctcttgagctttaatttctctcaagaagcagagagaatacactttgggagcctgaggcaggcagatcacgaggtcaggagttcgagaccagcctgaccaacacggtgaaaccccgtgtctactaaaaatacaaaagttagccaggcgtggtggcgcacacctgtaatcccagctactcaggaggctgaggcaggagactcgcttgaacctgggaggcagaggttgcggtgagctgagatcgtgccactgcactccagcttgggtgacagagcaagactctgtttcaaataaataataataaaaataataaagaaatagaatattggctcttgtgcagaatagaattgacatagcaggcttaagactgctatccttagaaagtcctgctcacaagattggcccttgactagcatctaagaactagggtttctggagggttctcatcattccccaacaaagatggttcactatgcctaaaatgtttgctcaaagaatctggcttatatttgaggacccccgacatagtccacttcaggtttgttgtttgacatagaagatgaaacagattcactactttgaggagggtttggtaaccaggcatgcttatgaaatggttagaccctctatgactgcccctgtgtggaaggcacagcctgcatagccccatgtgggggcccctggagccccctccaccaccatcaccataactatttttaagttcccaatagttatactttagatctagcactgtatatagaatggcaaaatattttgagatattttagcaacaaaggatgtatttatttcaagaggttttccagtttttaataaggttgtgtgtggggaggacactttccatagctgtatttttaggttgattctctgtgaaaccaaccacataggcccactgatgtggaggtagaaaaaacaaccccattgccgatagggctgtgagtggtcatctactttcttcaacagaaggggaaacagaggatcagagaaaagcaacgtcctgagtgtctcactcacaggcaccccctacagagtgagggatggggccagggcttgtgtggagcgttctcccaccgctacatgctgcctggccttgtgatcagggagatggagtgggaagtggagaaaatgtggggatacccccctagaaactggtagcagggtgtaaacattcagttctatctaaggcctggttggcagccaaggggatggctcattcaaattcagcatgggtgaagggaagatgggaaggagactaacccggcttctgctcacttgttaaagtcagtttgtgtatgtaagtgaagcaagctctgtgactaccagtgaagaacgaagaaacctactaagcagataattgaattcaaaaacagccatttgggctttaaaacatctatatgtttcagggcaaagtggggctcgaggcttaagttacccaaataacaaattccatttcctaacttacctggaatggcattttccaagcagagctattaataatagatattctgggaagaaaggttgttttggccaacagatttggacgatatactggtcaaccaagttgatgggtatctttactgcaggacttctcagagcctgctcatgtgtatcgtgaaactctgagagaagattttactgtggtatgatattttaaatatatgtatgcacacaaatacatataatatataaaaatacatataatatatactacatatacataaatacacatatgtaaatacattataatatatactactatatcttatagtatacaggattttccagatttactcacttgaagatctttttttccccttccatatctcaggggaccattatttcagggctgacattgggaaaaacagttctgtatggtgttacccatcttctatgcctgagagaacattttaggaaaagagatgtggttctaggaggagaaggataaggataaaaggatggaggttagccagtccagtgttctgggcaggtggctggactgtgagctaagagatgcaaatgtttgtctcaggagagatgatagctgacttcttatcctctggagattctccaaacctggacatgctaaaatctaagacttacaacaggtatcacacttgtgaagggacattgtggcactgatgtcaagctagggatggcctgagcaactgcagacaccagggatgtttaacctggggacccaggacaccattagcgctatacttccccaaagtccccacctagggaaaggagctggttttcctcctaacctctagggaggaacacaaccaggatcagagcatcagtgttttggagaggcagagttcagcaccacccaaaagaaagctttccagagactgttgctgtccatcgcactctgggcagacaggcccctgtggtagctggctcaccatcccatgcccacctgggaggggcagaggtaagtttaaaccctggatgaggtatgatttcaaagacctttcccagccctaggaattttgactctacatagtttgactttgtaataatattgaccaatgacagcattttctaattcccttaccctctatattcaatctagcaacaaggccatcatgtctgcctacgaaataagtcttcaacctatccatatccctccccctccactgctactcccttagtccaagtggccattactttatgcctggaatactgcaggagactcttagctggtcttgctgcctctattcttgctatcttttaacccatcctcctcagcagccaatgagttgaaacccttggaagaagggcaaattcctcactgtgacctgccaggcccccctgaactgatctgagtctgactgtacaatctcctctctttccacttccatttttgcttactacaccatggctatgcagacccccacaaacacagtgagcgctcaccttccggcgtttgcactggctgctccttctctttgaaacacagttcccgctgctcttcctatggtgactctttctcatccttcaggctttggctcaaatgcccctggccccgcccaggaagcttctgtgcttaccctgtccacatcaacacagcctctattgctatggcttctacccactctctttcacagccctttgtctatttcctttctggcacttataacaatctgaaatataatttttatttatttatactttgatccatctctgccatccctcccatttctacctaaaattcaagcttcctaagggcagagactttattttgttcacactatattcctaatacctagaatagtgattggcatatagcaggtactgaatagatattggttgaattaattaattaatgacgggctgctctgtttgttgccgagatggaaagttgaaagccttagatgaagactcctctctgggggatcccactggacatccctatgccgtatctctactttcccacagtggcactgtacccataatgatgacttccccatctgcacatactcttcaagtcccagccagccccacccaggcacaagccagggaggaggccattgttcaataagctccagggtgcttcatcagacctgcaccagaagacaaagccatttcctaagtgtgagaattgctcagtacagtgttaggaaatcttcctccctggagagctttttaaatagactctcatttttctggggttattttgagcaaacttccatctggagatggagaatgagacaaaccaggaacttagatgacctcaggagttcctccctgatcctggctgaaggattcttgtcagacctgcagttccactgctggattctctctgtctcctaaatcatccgctttgacttcttcctctccacctgggctctctggatgtgccaaggcgctgtacatggagtcaacagctttgattaagcagctttgatctctgttgagcatctcggaataagatctttgctctcagcatctgtgccaattctcgaaatagtttagctcagccaagcaggaggggggctggattgcaaagtgtattatatgagaaatttaaaaagaaaaggcagctgcaaacagtcaggggtgtgtgtgtgtgttaatgtgggcacccatggctcctgggaaatgattaccatgctatcagcatgcaccaaccctgtattcacagtggctgcctgctgcgagaaagtgggcagcttgcagcagtcaaacccttgcatcaggtggtagttctgttggagaaacaaaaacatcaaagacctttgcttctattgacttggcttttgcttattttcactaaggtattctgagatgtgtgccagcgtgtgttctgcatagctgccatctggtgtggggttgggtgtatgcatacagggggaatcactatggttttgaggtgttgatcctatacacaattatatatatacatgccacaggatggatgtatttgctcttcttttttaaaatttttttattatactttaagttttagggtacatgtgcacaacgtgcacgtttgttacatatgtatacatgtgccatgttggtgtgctgcacccattactcgtcatttaacattagacatatctcctaatgctatccctcccccctccccccaccccacgacaggccccagtgtgtgatgttccccttcctgtgtccatgtgttctcattgttcaattcccacctatgagtgagaacatgcggtgtttggtttttcgtccttgcgatagtttgctgagaatgatagtttccagcttcatccgtgtccccacaaaggacatgaactcatccttttttatggctgcatagtattccatggtgtatatgtgccacattttcttaatccagtctatcattgttggacattagggttggttccaagtctttgtaattgtgaatagtgccacaataaacatacgtgtgcatgtgtctttatagcagcacgttttataatcctttggatatatacccagtaatgggatggctgggtcaagtggtatttctagttctagatccatgaggaatcgccacactgacttccacaatggttgaactagtttacagtcccaccaacagtgtaaaagtgttcctatttctccacatcctctccagcacctgttgtttcctgactttttaatgatcaccattctaactggtgtgagatggtatctcattgtggttttgatttgcatttctctggatgtatttgctcttctaaatatgtgtgttatatttgagcacgtacataccaggaacctggcatttaatcatctccatgtagataaatgcataagtatcttgggttagtaagtaggtacccctgtgcgtatgtgtctgtgtatgtgatacctctgtgtgcgtgtgtgcatgtgcacacacacacacacagcagcctttctgtgagttttgttgccctggagggggatggggtatgtacacagcagaagcatgtatggttatatttgcatggaggtgaattccagaaagagatgctggggaaaaggtgtttcatatcaggacattttgaactgtaagtcattattttctccactttgatgcccaacccctgggaaacttgtccttgtgtatagcccctctggatgtacaagtaaaagaaaaatgtctctatttgggaccatttgttcctccagaggaagcatttttttggtattggctgttgctgcgagaagcctttgttcctatggtggccccaggccggtggatatgaattaatgcatctcatataaccctctgtggtagaggccttttgactgaagctaaaggaagtgggagccaggaaggcggactgtggtctaatattgcttgtgatccaaccattcctgtgggttcctttgctttgaggatccctcagccgtggatcacagggcagctgcagaagaccaggctcttgctgagactgggagagtaaagccctggaaagaagtagtggattttctggggccactacagggcctgagactgcaggaagagattcagaactggttggggtgtggacctccgcttgttgggcctcaagtaaaggggaaagtaggcagcagagatgagatctgaaaatcaggatagatgggccagcaggccagggcagaaaaaccagagcacaaaggtatggaccagtttatggcattatctgtagcccaggttgggctttgactgaatgttgcatctggtattttacaccagttgcttggttgtggttgcctggagcattgtattgaaaataattcataggccaatgaattcttatgggaaaagaaggtggacgtattagttttctttttgctgctataacaaattatgaaaattttgtggcttaaaacaacgcaagcctattctcttacaattctggaggttggaagtccagtacgggtttcaccaggccgaaatcaaggtgtcgaaaggtctgcattccttctggaggctctaaagaggaattcatttatttgccctttacagattctagaggctggtcctattcctcagcttgtggccccttcctccatcttcgaggccagcaaaggccagtttgagcctccctcatgctgcatcactctgacacagactctcctgcctcctgctttcacttctaaggaccactgggattacactgggtgcacctggataatccaggagattctccctatctcagtatccttaaattattcacatgtgcaaagtcctttttaccatgtcagataacattttcacagatttatgggattcagacgtgaacatctttgggggccataattccacctaccaccatagggataaattagtaatgtctgcccaggacctggtataggtttggggtgataaggatgccagatattcaccatccctagtctggcaactaacaacatgtagagttaggaaagggatatcaacacgctgaaaagggatgagaagaaatggaaactaaaacttactgagcttttactataggccaggcacttgctatatgattcaaaagcatgtctcatttattaggttggtgcaaaagcaattgcgttttttgccattacttttaatggtaatggcaaaaaccattactgcaattgcttttgctccaacctaataattatcaccacaacgctggttggatgaggtggaaactagtattttacagctgagtaaaactgaagcccagagaggttaagtgactcttccaaagtcacccagtggtaaatgacaaagcagaaattcaaaaccaagtctaactccaaaactacaccattgctgcggccaagaacctgggtagcttctctcatgcaatgtgatgtcattaaaggtaacattggctgccacgggcagtgatacctcattggcttgatgaaaatgcctggcactgagcttttcttagaacctgcacccaccttgcagattatcccctggctttgcaaatggggttgaatgagaggccagggctgggggcttcagccccatcagcagaaatgctaatggcctcttgagcaaatgccagaaaaccagaaaatgcacacccagcatctctgattatgactttataccaacatgcttcgtgttctaattgctcctccttaccaaccttgaggggctgcagaatggagctcactgagaaaaagaaaatggaggtgtgggatgggagctctatttcatttaatacaaatattcttaactgcacatcaggcctgtttgaaatggggcagagaaagtttggcaggcaggcttcctcattctttttgtcttttgtataggcaagctctgggcagccacacatggctcatgaccacatctgagctgagggcgtgtggtgatgtttaccaggtgctgaaaactactggaagtcagagggcaggaggaagaatgggttcagaagagttacagtacaggatctggggagcttcccagggtgtggggatgttggggtatatttgagggtgagggtgctggccagaggcaggtaatcatacaacaattttcaaatagcatctatactccaggcactgagctagatgctttaaatataaaacctttcaccttatcaacaacattgtgaggtaggcattatagatctctccaatttatagatatagaacatgaggctcagagaagttaagtaacttgcacaaaatcacacagcttgaatgtggcagagcctagacttgaactcagatatgacttatactacaacccatctctcttcaggcactacaggaggacagccccctcccatactccctctcctaggcctccagattttctgaaagctctgccacaggcaggtggcaggagtatcagaaaatgccagctgttcctgccacaagcagaggtggagtaagagacgacactttttctcagggtctctggcttgagctgctagaacttgcaatcctggtgcctgtggtcaagattgtccagatagatttcccttggcgagctgccctcagcacttagaaaaccacaggcctgagaggatgtggctgagcgcacatgtgcctacatactttgtccactgttgcagatctcccaggctgatgggtttccagaagtcataaagatgctggctctgttcatcagttgatgccaccatggaagactgtggagtagtcctcagatcatacctagggttaaagctgctctttgcttcccaaaatgtcccggcttttctgatcctcccaagcctggaaattcataagtccacttgcaacacaaaatgagcatctgctggatggtcagtatctgcccacctccctccagcaccaacatcatccctcatcctcattataactctgtgaagcagatgcatgacccccttctagagatgaggaaaccgaggcttgggaaggctccaggacatgtcaagcttctgcagcaagcagatgggagtagcagcacttgcatctggatcttccagctcttgaacctggacttggacacccataccttgctgtgtctgtagccagtcacctttaggttgtgagccctggccaaggatggatgtggagtagagggagaaagtcaaggcttctgacccacacttttgtttggtggaagcaggagagaataggtgggctctgggcaagagggcagaggttctggctctttctcctaactgtgtctgcttcagaggtttaaaagttagcggtcattgagctcctattgtatgccaggtataatgttagaacttttacattaatcctcccaactgttgtgagtcagacaacattagtcttattttacaaaaaaatgacaacactgaggcttagacattgtagtagcttccctacattgatgtgggacaggcttctctgtaggggagggtggcttgatatgctgtggtatgctggagtcagcttatactcgcacaagagccagctgttaatttttcaggaattttgtgagctacttgtgaaaagcagttattattaaaaattaaattttataatctaacaattaaaacagtatattaaaaacgaaggtaataaatactcaaaactcatcatttctttcctactgtctatgctcttgaagttattttaggtctattgtttctagatggtggaaacactatataaaatactatgtaatgatttactatacacatctcttcccctgccacattcagtggtgccatggcagtaacttgacatcagccatgatgggaatatttacaccacagcaattgcaaacatgccaaatgagagttggttttatttttcctagagagccagctggtaaacattttcccgcacatcactgcctgataggcctcaagcatatcatgtttcagaatggggcccagtagctaagaggaagtgcccaagggtcatgagtctcagaagcccagtccacactgggatggctcttatgtttgttgggtgctggccttggttccaccgttgctgctgatctgccaagtgaaaacagccctggagagtggttggtgatggggccccctgagagatcacaggcgtggactttttctactctgctatggttagccttcaggataacaaggtaatgtcaaacatatatctgtcctttgaaaattataccctggcagtaacacaattaaatacttgtacagttattattagctaggtgtagaggaatcagataatacagataagccaaaaagaaataaaaattgtccaaatttctgccacctagaaacaattaatgttaatattttgatgtatttcctacctgatatcttactatgctaattatggacatttttagtagattttattacacttgatgttttgtaattgggttttcttcactcaacattataagcatctttctgtgttattttttatccatagaaatttgttttcgtggctctatagtattctatcatgtgtacttacagctccagttttggggcatttaggctaatcgtagtgtttctatagcataaactgtgctatgaggaacattcatatcactaaatccttgtgattctcctcaggataaattctctagagtaagactgctatgtcaagggatatagaacagtgcaatatttgcatctggttagtgggctaacattcccaccattccaccacttaatttgagctacaagagctctaggggactttcataataagattattactcctgtgtttcaaatgacctcgagagaatatattataaagaacactgtcctggtccactcagccttctgtcacagaatacctagactgaatggcatataaacaacaaacatttgtttctcacagttctggaggctggaaggtcaagatcaagatgtggcagatttggtgttttgtgaaagcctgcttcctggttcacagatggctgtcttgtcattgtattctcacagcgagagtggaggggtctctctggggcctcttttataagtgcactgatcccactcacaagggctctgccttcatgacctaatcacctcccaaagaccccagctccagatcccataacattagagattagttttcaacatatgaatttgggggaatataatattcagtctatcataaacacataaccaaataataagaaaacaatcaatgcaattaaaaattgaacagaatatttgaacaggcacaaaagacatatgaatggtaaataagcacatgaaaagaccctcagtatcattgatagccagggaaacgcaaagaaaacgatagtgagatacttccacactcccatttgaatgccaaaacacaaaagtgtgacaaatagcaagtattggcaacgacatgaagcaactgaaactttttctgtcgctggcaggaatgtaaagtgattccaccactttggaaaatggcagttcttatacagttaagcatatacttaccatatgttatgggttgacttgtcttccccaaaaaagatatattgaagtcctaacctctggcacctgtgaatgtgaccttatttggatacaaggtcttttcagatataatcaagttaagatgagatcatgaagttgggccgtaatccaatatgactggcacccttataagagaaaaatttggagacagacagctgcagaggagaatgccatgtgaagacatagacacagagggaaggtggccctgtggagacagaggcaggtatgggagttaggctgccacaagccaagggctggaactagggctgtcagaagctggaagagacaaggaagaaacctccctaagaggcttcagagagagcgtggccctgctaacaccttgattttggacttatagcccctagaactgtaagacaataaattcctgttgttttaagcctcctggttgtggtactttgttatggcagcccaagaaaactaaaacaccacccactgtatgacccagaacttccatgcctgggtatttaacccagagaaatgaaagcatagggctacacaaaaaacttgtttatgtaggatcatagcagctttattcacagtagccccaaactggaaacaagccaaatatccaacgacaagtaaatggatatgcaaattgtggtgtattcacacagtggaatactacccggcaattaaaaggaatgaacttctgacacgtgcacaacatgaatgaatctcaaaaacatgctgagagatagaggccaaacaaaaaagactatatacagaataattccatctgtatgaaattccataaaaggcaaacttaatctttaatgacggaaaacagaaagtagagcttttggggtgatagaaatgtatatatctgagtgcgctggtggttacagaagtatctcatttataaaaactcattgaattgaacacataaaatgagtgttttattctatgtaaactatttcttaattaagttagcctaaacatggagagctatttgcctgcccttagtcacacagctctgatggccaagccagaacctgaatcccatcatctgagtctccgttcaaggtagctcttgggagaagaaaaaaaacaccccactaggtctgtaaaaagccattaggtttgtagagaccctcttgacacacttcaagagccttttcctggaaagcattcttcacagctaatctccagggagaacgtcttttctcaagggttctataagagcagagagattaaataagagcctaactcaagcattttcaacctgctaggccccaaggtggagaagagaggcctgggtacacttcccttgggacagaggcatggagaatttcagaacctgtgatgcacatgaaacatataatgtgccatgtctgtaagacgtgcttgttggaatgtccttcactgcacaccccaccgggccacatggctgcagaggtgcccacatcagtgagtggtcagaccatgccttgggttggcagtgttacctagaggtcaagattcccctgtcagcatgggcttgctgaacctcagtttcctcatctttaaaggaagcacatgacacccactttgaaatttcattgtgagaagtaagtgggatgatgtatgtgaagcacttagcaccatgtggcatgaggtaaaagctcaatgcatggaaacttgttttataatttgaattattaccaatcctgactcatttaagagcctgaggaggatctgagtgaaaaactgaggctgaatagaccagcttagccatccaccttagccctcatagcaaagacagggcagatggcagccttgacagatggcatctgtttctaaaaaccatttctggcaggatgagtcataaagcataataggatatgctttttctttaaaccttgaaggatgagtatttagatacaccagaactttgaggacgttgagtgacagcgtaagaaagctgtactgcatgctgtgggtaatggtggaccatagaacatcctggagcaaggagtgaccttatttcataataactcggatgcacagtgattaatccaagatattaaccaattaaatgaagcctattagaaaaaaatgccacttgtccccctacaatcccagctaacagaagccttcattcagaatctacccagggtcaggggctttgaggagtgcttggaggaatcttggtttattacaagtgtcctcgggaccatcctcattccagggctgctccggtctgaagccagcagagctgacatgcagggtgggttcttgtggggtcctgggtcaaggcagcctccatcccagcccctctgcagaggtgctgaggatgtgggccaagggtcagctgtgagggctgcacagttggatatttctctgaataaactgtgatatgcagtgaggaatcaaggcttcccccagaccctagcatccttgattgtctaagcttaggtttttggacaaagaactattggttttcccctcttttcttccccccactccacgcccaccactgcccttttctcccttagcttcccaagtaacacatgcataaagcaatcactagcacagaaggatgcgtggtaaaaagcacaagtgtcgctttatcctccatggctgccctgagtctgcttccccactgcccagaggctgtcaccagtttggtgtgcagcttatgcatttacctgaagttatgtccacaaatgactaccaagcttttttagcataaatggaaccatcccatacatagcattctccaccttgcttttacacttggcagctttccatggcagcacataaatttgcttctttctctttaatggatgcaaagcatttcatagtttgcatggactacaatttatttaaccagtttcctgttgatgggtgttaaggttatctccactttttctgaggccacaaagcattggtttttatttgccaaagctctagggaaggcagagattgtccagccacagaccccaactatgaacagtgcagcttctcggtagccatcctttctccattcccttcttgaggctccccattcagctcagcctctcctgctgttggccttaatagcatgtgacacttggcacaagagccactgagcaacagaggagcttcgttctatctctgatgtggctgtgtttctttaagtgctcttgttaatgtttcatgatggatggcggtgaaacatgggaaatgtaccagcctgagttcttaaagtatctgctcacactaacttaatgtattcatttattcagcgtgacagtgaaagtaaaaaagtactgtgaatgcataggcaagcttcagagggagagtaaggaggacaagaggaagagaactaacatttattaaacctcttctaagcgccaggcattttacatttgtgagctcacgaatattcctcactgtacccagagagttgctaatactattcccattttgcagataagaaaactcaggtgatgcagcttatccaaagacgtgtagacaggcagagactggcatcaaaacctcatgctgtttctgtccaattctgctgccctggttgctgtgttattggaagatatcagagatggtaaggcatgacaacaatagctaacatttattgggtgcttactatgtgccaggagtcatcctaagttcatcctgtatatgaacacacttgtaaggatgtgagatagtgaacaactgctatacccattttgcagacgaggaacacaaagcttagagagcttaagtaattttcccatggtaacgcatcccagctggcagagttggactttgaacctgagaagactgatacctgagctcctgggcagagccactccacctcccacactcccctggatgatcagacaggatagaatcttaggggtgaccaggaagtcaaattgtccctgtttgcagatgacatgattgtatatctagaaaaccccatcatctcagcccaaaatctccttaagctgataagcaacttcagcaaagtctcaggatacaaaatcaatgtgcaaaaaccacaagcattcttatacacaaataacagacaaacagagagccaaatcatgagtgaactcccattcacaattgcttcaaagagaataaaatacctaggaatccaacttacaagggatgtgaaggacctcttcaaggagaactacaaaccactgctcaacaaaataaaagaggatacaaacaaatggaagaacattccatgctcatgggtaggaagaatcagtatcatgaaaatggccatactgccaaaggtaatttacagattcaatgccatccccatcaagctaccaatgactttcttcacagaattggaaaaaactactttaaagttcatatggaaccaaaaaagagcccacattgccaagtcaatcataggccaaaagaacaaagctggaagcatcatgctacctgacttcaaactatactacaaggctacagtaaccaaaacagcatggtactggtaccaaaacagagttatagaccaatggaacagaacagagccctcaaaaataatgccacatatctacaactatctgaactttgacaaacctgacaaaaacaagaaatggggaaaggatccctatttaataaatggtgctgggaaaactggctagccatatgtagaaagctgaaactggatcccttccttacgccttatacaaaaattaattcaagatggattaaagacttaaatgttaggcctaaaaccatcaaaaccctagaagaaaacctaggcaataccattcaggacataggcatgggcaaggacttcatctctaaaacaccaaaagcaatgacaacagaagccaaaattgataaatgggatctaattaaactaaagagcttctgcacagcaaaagaaactgccatcagagtgaacaggcaacctacagaatgggagaaaatttttgcaatctactcatctgacaaagggctaatatccagaatctacaatgaactccaacaaatttaccacaaaaaaacaaacaaccccatcaacaagtgggtgaaggatatgaacagacacttctcaaaagaagacatttatgcagccaaaagacacgtgaaaaaatgctcatcatcactggccatcagagacatgcaaatcaaaaccgcaatgagataccatctcataccagttagaatggcgatcattaaaaattcaggaaacaacaggtgctagagaggatgtgaagaaataggaatgcttttgcactgttggtgggactgtaaactagttcaaccattgtggaagtcagtgtggcgattcctcaaggatctataactagaaataccatttgacccagccatcccattaatgggtatatacccaaaggattataaatcatgctgctataaagatacatgcagacgtatgtttattgtggcactattcacaatagcaaagacttggaaccaaccctaatgtccaacaatgatagactgggttaagaaaatgtggcacatatacaccatggaatactatgcagccaaaaaaaggatgagttcatgtcctttgtagggacatggatgaagcttgaaaccatcattcttagcaaactattgcaaggacagaaaaccaaacactgcattgttctcactcataggtgggaattgaacaatgagaacacatggatacaggaaggggaacatcacacaccggggcctgttttggggtggggggaggggggagggatagcattaggagatatacctaatgttaaatgatgagttaatgggtgcagcacaccaacatggcacatgcatacatatgtaacaaacctgcacgttgtgcacatgtaccctaaaacttaaagtataataaaaaatttaaaaaaaagaatcttaggggtgaccagaaagatcaaagagcagcctcacactcctccaagccactggttggagaaggaagattgtccagctgatcccttggttttcaaagagacaagcctctgctgggggattgggaagatgtcattttcagaacatatgacttgagaaaacctttccgtgaaggggctcagcagtgtcagctcatcttgctgtgctatggttatctcacagcacagcttcaagctaagttgctatctaaatagcagatagaaatgacaaaatgcagagcactgaggagtggcatgcagagaccaccattaccagggagaagagctgcaggaggcgctctggggccaattctcaacagcaaaggcccatcccttgtcacgggggcctgtaccttactggtttttgtggtgcgtcatgctttactggactctccagctcagcattcatctggcagaagggccatcaaatgcagagcccctgaggctggaggcagcttggtgtgtgtgaggaacagaaagaaggccattgtggtgaaatgccgtgagtgaggggggagaggcacagacaggagactggggaaggagcacagagccagatcatgcccaggcttgaaggtcatgttaaaatgttggatttcactccatgtttgaagggaaggcatttatgttttaatctgatctctctggttgctgatgggtgaataaatgggcaaagagtggaggcagggggacttggtacagggtgcctggggacccagccacacccacatcaactgagatcatggccccagcccagacccactgacttggaatctacatccccctggactcctgtgagaagcaatgctctagggggagaaaatggttacttggactgagacggtagccacagaggaaacaaggaagcggtcggattcaggatatattttatagatggagctggctatgtttgcttgtgatttggattctgtgtgtgaggggaaaaaagaatcaaggatatcacctaggctttccacctgagcacctgggagaatgcaggagccatttactcaggtggatacactgggggagggaaaggcctgcagagggaagtgggagaaccaagagttctcccttgattgtaatgcatttgagatgtcttctagatgtccaagtggtgctgttgagtgggaagttagctctacagattcagagctgaggggagagtttgaggctgggggtgtattaaaatccatgggaatgcctagaaagtatggatagagatgagtaagaccagtggctcaacctagccctctggtatttagagctggaaaaagcaggagaggctagggtagatcaggaaggctaccatgtttgccactcctttctgggcatccagtttgtgccaggtacatacacgttttgctagtttgtacttcccaatacaattgagcagttggaacttattttatacatttaatataaaaaaaccaccctgtggttcagagagggtaggcattatttgaggatttgaactcaagttaattttcaacacccatattctttggattatgcctcatccagaggcagatggtcaagttggctgtgtatattagggaaatatggccatatctgaattgttgcccatttcccaccatgctggtgcttcccacttccttcagctttctgaagtcactccttctctgtattctgagagggtgaggaacacatgggttagtgataccaggcagggtagaccagatgtggagggccttgagggaaagactgtgctaatgtccctcaccctccaaacgaagatcatctactgctctgcggctccagacccctatgcgggcagaaagtgagtcagggaggcatgaagaagagctcagtcttgagaggatgagacaagcaacagatccaggcaaggatccttcaccaggaaggggagcccagggtgatggataggagcagctcatcagagcagggacagaggtatggggagataaagactcaggtattagatctgagaacactaggggacatgacctggggaacacaggtattattaacaataataatagatcaggtattattaacaataaaagctactatttatcaagctcatactatgtaacagacactgttctctggacttttgtttgcgttatagtcatttaatcacaaacaataaatatattttactctgtgctaagcattctacatttataaacttacttaatttttcacagcattcctatgatgtgggaacaattattatcccatttcacaacttaagaaactaagcgcagagaggttgagtaacctgcctaggatcacacagcgagtaagtgacagagccagcattggagtcaggctgcctgactccagagtttagacttttagctattattctatagtgaatacttaacacacagaaactcattcaatcatcacaacagccatgtagatactattattatctctattttacagttaagaaaagtgagtcttaggaggctatgtggtttgttcaaggtcacacagctggaaggcaggggaactaaaatgctgacggggtctttgcatggtaccagtgttcaaacttttacttaccagccatagtatcagatccatgccacctggtggaaggcagaggtggcagaaagaatgctttatgctgagctctttgaatgtggaagccagactccctaaatcctcttactgagggtaagattggctctagatctgggtgagccccagcagtatccccgtgcaggctctgactggctcatgagaactaattgcttgtgtctcttgctaattctgcattcactgacaccacagtgattgcctgaaatcagctatggtgggagtatttacaccatggaaatcagaaaattctacaaagcaggggttatttttccatgacagccaatattccagtacatgactgattagatttaagctgacatttagaatcaagggtgctcagctggaggcacaggaaagttatagagtcaggaagccaggtacctctctccactagtcctggggaaaacgaaatcagcaaaacattcgacaaacacaagcttagcagctaaaggatgctctgtctttgtaccattaggccctggaagtacttcagtgagttaaatagacatattgctgacttatagtccaagagggaagatggataatataaagaaaactaaagaaatttaagtgtacaatttcaagttgtgatattatgaaggacacagagaagaatctaattgtataaggggtaaggaaggtgactgtaaagcactggcatttagaccggagacctctggtatgaaaaggagccagcaagacccaggtaggcagaaaaacttggtgaagactgagtgctggcaacaggatgggcaaatgctgaggccagttcagatggagtgtgtggtgggcaagaagcataagctacggccagatggtgtagggccttgtgtgacacaggaaggagtttggtgcaatgggaaggcattgaagaagggtcttaagtgggagttaacgtgctggggggtgatgtgctctaatttatgatattaaaagatgactttggctcatgtatagaaagtaggcagggaggagagtggtcagagcagaagtagggaaatagcaggaattcaggcaagagatgatggtggcctgagctatatagggacacattggagatacaagtaggaagcagaatcaacaggacaagctaagagattgatatgggctgcaaggttagaaagagggtggactcaagatgattcattagtctagatctcagtttctttgagacattgaagacaagaggctcaaaccagaattcctgagtttcaatcctaaccctgccatctactagtggtatagccttgggcaagtgattcagtccctgagagcctcagtttctccatcagtaaaatggagatcatattaatttctacttcacagggttgttgtgatgtttcaatgagttactctctatggagtgcttagcataatacctgaacataatgagcactacacaaaagaactattattattattattattattattgctattaatactagtctattgatcatttctctgcctaccattaagagattgagcctttccaggcaaacaactcttgtttggaaagaaaatgttctggagaggagtaccccaggcatccttctctcactgtttgtgttcccttccccagcaagagtttggcaggcaaagctgttcaaagtaaacacaggttcagtgctgcagaaaatatcaggtttggtagcacggcaagtctggaccaaaggaaacaggcttgctttatgccgacttcactcggccactgcatcccaggggctgccccagcagggctggtgctttctggcagacaaggccttgatctgggagctcttcacctgtctggtttcttttctcgtgtgactcaggatgagtcatcactgtcactcaccacttcctggcctggacattagggttcatacgttcctgaactcaatacccaggcaacaagagatggagtccagaagaaagcaagtagggaggggaggcagtggcactgggcaatgtcaggagaaattagaggtccacagggtactagggagggggagaagccacctggaaagagcatcagatcccaacaaaagtcaggataacccaaccacctctggtttcagacacctagacagcgttcctcaacctttctgatcccatgtcctgccagtcgagaaagtgtggacaagatatagtacaaaagtaacaggtagatctgtttgctttcacaatataaaattataatattgaatataatttctaaacatttgtctgctgctccaaggttctgaaatgagcctgagtgtagcatgcccccagtcgagaatggagagttgtccttctaactatagtagtagtagcaatcataatagcacttttctgtgcaaatgctctaaaaattgagggaaagtggggcttttgtttggtgtcactctttttttaattgtggtggaaatatatataacatgacatttaccattgtaatcatttttaagtgtgcagttcagtggcatgaagtacattcacattgtcgtgcaaccatctctaccatctatctctgtaactttttcatcttcccaaactgaaactctctacccctgaaataataaccatctaccctgtcgccccagctcccagccccaggcaaccactattcagctttctgtctgtatgaatttggtactctaggtacctcacatgaatggaatcctatagtgttttctcttttgtgtctggcttacttcacttaacacagtgtctttaaggctcatctatgttgtagcacgtgtccgaattttttttccttcttaaggctgaaaaatatcatactgtctggatataccacatttggtgtatccattcattcttccatggatacttgggttgcttctatattttggctattgtcagagtgccactgttgacactcggtttgatgaggtgattcaaagtcaaaaacatcgtaacaataaaaggcctgggtttttctgtttgtacagtatttaaacttgtcagagcgctttgaaactaaggtgtaaaggaaaaaaaaataagtgtttgtaaagaccagacagacctggattgtaatcctggctttgtagcctcattagctttgtgctctgggacaagttccttaaatatactgtatttcagtatccttaatgtgtgaaggagtgaggaaattgtgcccagtgtggacagttattatgatactaaataagagaacaagtgtgaaaatgttgagtagagtctgacattcaatactcagtggatttcattgttgatttcatgttatttctttgtatccattcaattcaaacgagaatctatagttaggtgggacatttatctcatataataaggaaactaataagaagactaattgctactcaattaattagtggtagaagtcaaattggaacccagggctcttgaatttgaggtgaggaatgatcaggcagcaagtcacatttgatgtatatgtccaccccaatcaattgctactggctgcctggaatgcagtggaaaagtgctgggtttgattagcaatgtctgccatagttgtgggaatgggaagtgggggtacagcagccacatgtctactacctctggcttaaattatagcatcacttaaattctttttaaaaatgtgtgaagaggaagatcatcttctgtgtgtggttttaaacaagtttattacaaaattaatagaaaaaaaggtgaaaagaatatgagacttctagtttacctaccatcaaagaccagaaggttgttatccaaagtgagtaaaaaaaatattatgattgtagctgatcccacagcagaaggccgtttgctgtggtcagagtcactgtgattaccagactgaagcagctgcctacccaaggtggccttactccctgcccatcagtggggtgaggcaggaggtggaaacacctgatagaaactggttggcaaggttcatagcatgtaagaccagatccctgcctcctcagggaaagaatagcaattgctgagaggcctacctttcagcctttcagaatccatgtgggtcccatgccccacgtgttcttccattcctgctaaccaccacatgtcaggcagctggaggggtgacagtgtggccctcagttgtctggcaccccagtggcaccggacaggcctgcctgtgagccttctttccattcagctgcttccttaagatgaagctctgcccactggctcaggaattcctgtagcaggatataggcttcctatagtagcacctgcctgtctcacccatgcctgagacactgaagcttcaggtccagtgccaggtagccttttggctacttttcctgggctgcacgccctcctcttgccactccatatccttatttcttggacatgggacccagatgatgcctgctagggccttcctgactcacagaggaccacttacagttagcttgagtgccacattccatgcctcgtggaggtccaaagccctccccagtttcagtcagttcttgattggggagtggtaaggataagccatttgcctagtcccctgagatcccacacttttcctctgttgtttactgaccctttccccccaaccagcccatgttgactctgttctcatcacatctgctcacctggaaacccaatatctctcacacaagacagtgtgtatgtgtgtagagtgtactaaagatttgctggagagacagagaggggatatgtattttagaaatgcatgtaatttcatattgaatattagacatggtgtgtgtaatacatgaaaataacacaagctgatgtttatggggtgcttattatatggtgggcattgtgctgagcattttatatacattatctgattttactgtccccacaaccccatgaattagacactaccattatgtcaaatttgcaaataaaacagaggcttagagaagataagaaacttctgaggttacaaagtcaggaagtagcagggctaaagaattgaactcaggcagtctgactccagggcctgtaatccaaaagctgttcctgtggtcccctgtccccgacccccatggtatggacttttcattgtctgctccattgtcatatagcacccagcctcacaccatcctagtggcatattctctttttccagctctcattgcttatcctccttccttcttcattttatctccttcctttcagatgaacatagaaactgcaatattttctccctctattattcaaaacaattcaagtctccccagccctttgcttccagcctcctcttccatcttggattccatcaaagttctctgcagaaagaacaaaagagcctcacatacaataacatccatatatcttcgatgttaagagtatggactcattttctaatacatgttttctgctatggggcagggatgacaaccgtgtagcatgtgactaccactccccactccaatacccatggcaggcaccgctaagtactgacaagattccttcctgccaagcccagaccacagcttcagaatccatgacacagtgcacaagaaggccactatcaacttatctgttctgttatgtgaaaggaagcctttcttccctctcaaagggtgaacccacagctatacaggtagggaaccagacctcccttgaagccagaaggcaaaacccaacttcaattattaaagaacaccagaacttgatagataggccttagactgaaattgatttctttctctgagtctccctcttttttagtttacgctcttgattgaagcctcctttgggtgagaggaaaaagtcaacccttcatcacctggatacaggtcctatagctgggcatgcaggcatggattgggtcttttgcagatgccagactgaaggtgagctagatttgccagtttcctagtcctgtctgtgcttccctattgctatccctgagcttttagtagtcatgtttcatgtcccagcctggttatgactggtcagcagaatattaatggagaggtcatgagtccaagcttaatttagagccatttatgggagaagcaccaagccaatatggtggtaacaggattgactacagacatgagtttcccagaaaaggaattgagtcttccatctatacagcttccagcaagccttgtaaaggggtaggttatacagctctgaatctcagtagaaactgagagtcagataccacccaattcttgggcctcagcctacctgcctttgacccattagctataccttgagggctttacaataccaggaagcctttgctatggaggagaatgttgagttccacctcccaaatgaaggagaggaaatggaagaacatgtattgaacacctactatgtgtttgcaatgtgctagacatatttatattcactctcgcattccatcctcagggcagggtgtgagagagaggtttagctatatctgcttcacagaggaaaaaccaagagctcagagaaattaagtaacttgctcatgtcacacagctgatgggtaagtagcagacctggcattcagacctaagtcttgtgaaactcaaaagccaaggattttatcacttatgtcgcatttcctgtgggggttggagagggagaggcagtcccaggtttgagaggctgagctaaagggctgggcagagagggagccattgcagagcctgatgccaaatcaagagaacagaaactgccactcaaatccaagaagcaagaggcatgtctgcaacctctgcaggaacagcagcttcaactctgtggttcctgaagctctctaggctgcagccgactggccaagatcctcttttactcccacagttctctggaccagtgctcctttcaggtctgtggagccgatgctgtttctgaggcagctgagctgagaagcagatggtgcatggatgagggggcggttgcctgacatcccttctggagctcctgacagctcatgagcctctcctcctccccatggcagctctgctcaggaagcttaacccaggaaaagacttgtggcttattttttctaaggaactggctcttctgtaaaatggggatattaatatttttctggaagaggtgttgctagtattaaactcaatatatgtaaaagccctaagagactgtagatgctcagctgggcattactattattataccttgatttcaaaatagacatttgaggacaagcctatctcaaacttctcaccatcagaagtatttataatcttctcttggaagagcagaaaagcatgattggctcaagttaatagtgaaacatttggcacagtgttcttatcactcttcttataaataacttttttaatcaaccaaagtataagtaaatatgatacttatgattgattacaaccataattgaaagttatttcattctaggattatgaatcacaacataatttcaaagaatgcagaatcatcatcatcatcatcatcgtcatcatcatcatcatcgtcatcactatcattatcccattttcatcacaactactttccatccaggcaattggacctttcacgttattagtctcatatcacccacatgcctgcaagtaagatattataaatcccttctacaagtaaaataaaactgagctttcaagaggctaaacagctatgcaagttcaaataacaaagaatcagtgtaagaatttgaatccgttctctctgacgttaaaatcacgtgctcttctcactctgttcaccagctttcaatatttaatgtagtttcttcaccggccagaccaaccaggattctgattcagttgctttagggtggggcccaacacatataatggaatccagatgcacattcagcaatatttgggatggcatagaaaggtcacattatgcctttgcagaaaccaatcgttcctcctgtcatcacagtccctacccagccaggtgttcttggtaactcctcctccagcagccgtaggcagcagaaaataaccaccactcagtactgccatcattgagggagatctgcggtggtggcctcaagtgtgggtggcctgagctctggatgtttgcttctcccctgtagcacagtaggctcccagacagattgtggagcttggggatgtcatgatgggggcttggtggacactgagagctaaggctgagatgatgccctttctctgtctttgcctcctccttactatacttctttcagtttctagactatgctcaggaccttcatacatgttgcccttgaatgtccctcttgctcattccgcccctttacctccacctccaccttcacgtttatctagctcaatgagactccacctggcctctcatgatagaatcacttaaggagcttttaaaaatgcaggtgtttaggtatcaacccagactaactgaatcagaatttctgggggtaaggctctgacaccactatttttatataattctccaggttatttccacatgcaaacagtttgaaaactgctgattctagttaattcccacttgatttaaatgccgcttcctccagaaggccctccccagcctccctcccaccataatccaactaccccaacccccagactagacccagcccctctctgtatgttcccattgtcagtctcccccaggaagctgctagctgtgtggacatagcaatactgtccccattgtcactgggttctcagagccagggccttgcacagaggatgtgcttgttcttatttgctgactgacagaataaagacaaacagatttgtagacgttgaacaattattcactggtgcctgctctttgctagatcccgttgtagactctggggattgaaaactcagtaaggcatggtccttgaccttgagatgctcagagtcagcagggaagacagacgtggacaaataattacaatgtgtatctgactatgggcacaggtggaaggttggcaatttcttcagtccaatccagatggccaatacctgtgggtgtgctttgggggcacgaggaggtgaagaaacagagtgaagaggaggagacaattcagttggtgtgttgtggggcccagggtttggactgaggtgtgctggaggaggaaccattctggatcccctatgcccagcacaggtcctagaacataataataggtgcttattaggagcttgttgagtgagtgaatgaataagtgatagaatgagacaagtcaatgcataatctctgaggaactggagaactcactgggctagtatcaatgtgtattttatagacttctttgctatgagattagctagaagcacacagctagtaaagcagtggtccatgggttttagacccagaacagtgtcatggttaaaacaacacatttcagaagccaaaaggaatttcaacataactcaagtcctttatttgtattcctcaaacaccattaaagggacttaaaacccgcagttacacatctcaaggtgtttgtttccttgtgttttagcactctcgtccactgcccttatacttctaaggtcccttgcagcctgtcttagctaaatccccccaaactcccccagcccagacccacaggcccatcccacctattctctccctctattcccaggtcaagaggacgacactggcaggaccctcctgggagcagagaggacagaggaaggagagaatctgagcaggcagagcagggagggaaatgttacaaaagagaacatttttttggtcccatgacatataagatttgcatttcacatatgaaacattgtcgccatcaattgccttaaaaagtatccctaaggctgggcatggtggcttacgcctgtaatctcagcactttgagaggccaaggcgggtggatcacctgaggtcaggagttcaagaccagccaacatggcgaaacctcacctctactaaaaatacaaaaatcagccaggcgtggtgactcacatctgtagtcccagctacttggcaggctgaggcacgagaatctcttgaacctgggaggtggaagttgcagtgagccgaattcatgccattgcactctagcctgggcaacagaatgagactcggtctcaaaaaaaaaaaaaaaaaaaaaaaagtagccctacgttccatagtccagtgatttgaagtgtgtttgtagctcagtgatgatcttgcatcatctcaatccagggtggggcacacttttcctgtccctcctcattcaggcccttgactcatcctttgtttcaaggctaggttgaagacagggacgctgagccacctcaccctggtgtccaatctgtggctgctgagaattcacactctttcacatcagctcatctgcttgccaaatcagaagtaaggccccaggatccctggctctctcccttagggtattagttagcctgctgtctaggcagaatgcaggtaacagacaataatctcctatttcatgcttgttgagtgtttccctatacatgacaggcctatgggagacaattaggaaaccttggattttcatctcttgtccattctcttgggatgccagcaaaatgaaggacaagcagacaggtgaatgggaaaatccatggctggacaagtgacggccattagagagatggttagctctagcaggggcactgggcacaaagagacagtgcagccagcaccaaagttttattgagctattcctcagtgccagaagctacactgggcctttctgtatgaaaggccatttaattgcacaagctatctgcaagatgggcttcactgcccactccccacaggctccagccatgttggacacctacatgcactgtcactccagtgttctcatctactccatttcatctcactgaatactttcccattccaaagcctcagatggcctttctcattccttcctttccttcttcactgagtcactaaaagtggctctaccatgtacctgctatatggggttgggcaagtgacttaccctctctgtgctcaattttaacatcactgaagtgtggatgacaatagcacctctctcatggtctggggatgattaaatgagttgggatgtgtaaagcacagtgccttgtgcacagtatgctctgtttaagtgctaactgtatggattacctaccaaaggttaggcattgggtaccatggagctcacagctccctctccttccaccgccagtgagatcctgcttgcaatgaagctcagcactagtgagcctttgagccagaagcacctggctgagtggtttgagcttggtaagagggtcctatccagtaccctatccagttccctttcctcttagtaaattccaagtgcctttcagtgcccttttaaggacaagtgccaatgagtgagacccatttgcccatggtgacccatggtgagatggggctccttcctcccttgtcctgggtgatgcccagtgggtcagattttaaatcccacttgggatctagatctcaagattttctaaaatgtgaatataatcatatgccctgcatacacacatcaacatactcaggaaaaagccctaatgctttcagtttgccacaaagtcccatgcgatccagctcctgccttcactaactcatggactccggcctctccttgtcatgcccaccctgcaagctatgatccagcctctctgagcctcagtccctcacatatgccacgcacactgtgttgcctctactagcacacgctgttgcctctgcctagaacctgcatactccttgccactcacagcagtgactcccacccatccatgacatctctgcgtaggcctcagatcctttagcaagacttccttgattcccggagtctgggtttgctgcctgctcacctaactctgatctccccgggccatcacagccttgttggatttcctaggaactccacaaggaaaaggccaagccactcctcctcactgctgcatctccggggactcccgctgagtttacaaacagtacaggctcaacagatacttgccaagtgaagtgtctacccttgcagtgctcagggaaccccgcggagaggggacagtgcatgttctttggtcacattccaaggaaaaggctgcagccaccctgtggctcctcatctgaggctgctgagggtgtctgaagtcctcagaggacaggccaggagaagaggactgctgaccaagcatctctctgactcactgagcagaggagggaggaggcgggtgctaattgcttggtccctccacacccaaaggaaggcccaggctttgaagcggcagctgggtcacatagaaggcagaagcagccaattaggtgatgctgcagcttgcgggcacctctgagcccacaggaaattattaataaagacataacaaccacgcagccctttgtgtggataaataatgacaccctgtcttccccagtggcctagtctaagcactctgcagccacaatctagttcatccggccccttggaatgccagcgcagctaagggaggagctccttgggtccacccagctccccagcccctctcctcaaagcccccgctatgccaagagtctggagactccatctagtctaaggatggcaaatggttacacctccggggtgcatgctaagtgcacagagcaggctggagcttgggctgacaggcattttgaagctacatctgagcctatcataaaagaagatggtgatcaattagcactggttgccatgtatctctgatctagttcttgagatttccctagttttgtactgtttgctcttgttcttgtctcaccaactactggtttgtgctttaaaaaacttatgacatttagcaatcccaagcacacaagcacacagtatccctccataatttatggcgtgatttcttaggttatcggcttctttacacagagcttcttatttcatgtagtttttatgtcctgtccttcagctaggaatatgtcttgttgatggtgactctgaaaaccctactggccctttgatctcagcttgctctgtggagtctctctgagtgctccctgctcccaccacaggttggcatgatgtgctccctcccctgtttctcgtggttcctgtctttctcctgcatccagcgaagctccttgttgtcagactgaaccccacttgtccccttagctcctctgccccacctgtttcctgcacaagactgagtttcaacagtttagagcaggggttggcaaattgtttccataaagggcaagatcataaatgtttcaggctttgcacggccgtgtactgtctctgttgcatattcttgtttttgctttatttgtttgcaaccctttaaaaatgtaaaaaccattcttagctcaggggccagacgaaaacaggccaagggccagatctgacccatgggctgtaatttgccacctcctggtttaggtaaacaaacctttaggagctcctcctgcatgcttagcactggtctacatgtggggaattcaaagatgtgtaaagcttgattcatgtccgcagaaaatgccctgtctagagggagagacattcacagacaggccattacaatagtgatgggtgccaccaagcgctgtgggaatgtagacttcttggggaagatttccgagttgagtaagaatgagaaatgagaaggaagaaaggaggaatgagattaggctgagggaacagcaagccaggggatggagcagggaccagcactacatctcctgggaactctgagtggagttgccgagcatgcttccaggcacatagcaaagtgcagtgcacagtctcaccaagtccccagcccaacaccaggtcctgagtccatgctcaagaaatatttgggatttgtgtggttgtttaacttttctccatttttttattcttataaagttgcagagcctgaatgtgcattcaacccttagcagtgagggagatctacatgggtatcgctgctggtcaaagtggcattgtgattcatttttcctcagcttgggttctattcctggctctgccaccaactgaccttggttgagtaagttattctatttctccaagtgttaattttccacccataaagggggtatcatgataggatcttcctcttgggggtatcctcaggagccagtgagcccctgtaaatgctctgcaaatggtggccaatgggacttctttctcatctgcttgacccaagggatggagggcaggagggatatgctgagggtaattgacacagaaccagcagcagagagaggacatggggaaggagcctaagagatgacgcaagctggcacctcccacaccaaccagctcaggctcaggataggcccatgggcaggttgagtgccctctgtgtcagaaacagtgggaatcaggggtcagggaaccatgcagctactagctagcagcttatggtaccttctaagccagaggatttaggtcttaaggaggcaggcagaggaacagggaagagttcccatggggcagaatatagatttgtaagtgtttgtgtgtttgtttgctcctggcctctcttcaaaaggaatttgagacaggttgtaacaagttacatggatacaacatggttgatataatagaaaggaaaagaaatagccattgcccaagagctatattaaacattgaatttggctctgaacctctgagcagcctaggcaagggagggaaagaaaagagaaaaagactaatacttagcatatgctgaggaccattaccatggaaggaatttccacacgcaaccctgtaatgatacttattactatctccatttatagaaccaggatgctagagatgctacattgagttttatgaatatattcagatatgtctgtgttttttgagcatctgctatatgccaggcactgtgctgggtgccttatgcacagaattttaattcttctaccaatcttaagaaataaatcctattattatcatcatttgacagatgaggaaacaaatgaagaacagaaaggtgaagttattttcttaaggtcaaacagccagcttgtgcccaagccaaaattcaaacccagagaagtttgattccaaacctctcctctcaccaccctgtgagcacagcttctctgataacaagtttccttggcactatactctacaataattttctcaaattgaggtgttaattggggaggaacagaagacattaagtggcacattagtcagttttataagaatcctggcaatgattttaaatagagggctgaaattttgtgtgccttgtcttctggttttgtttaaacaccacaagcaccaaagcttgcaactttctgctctcggggcctgttccctcccttccatgatgggttaaatctaggcacagtagtgaatgtgagcaaccagggctcaggggcagggtcccaggatcctttcaggccagggtgagcaagccctattagaaacaacagacccaagatgacttgaatttcccacctgcccttccttttcctgccccttctccatgctgtgtttttatgacacttcagtgtgctgcttcttggggccaggcgcctcctccaagctgagccagccttttatggccatggagctaattaagtaacagcaactcaggggcgcttggaaagcagcgtgggccgtcgtcagtcctgggctgtgcagccaagtgcctctggcctgggttgtggaaggagcttttggctaagcatcaggctattcctctgcgctctctcctgctggccccaactcaccttctctgttacctctgcatcaggaactcttgaagccgccgtctccctgagctgcctggaaacttcccgagactggcctgagaataactgtgccccaattattattttatttccactccagggtacttatttacacaagagggacgggagggcgcgctctcaaaaggagagcaagtccttctgggtgccagcctttgggccagagggccactcttgacaggcaggaatgactgcagctcccaagtagcaattttttttcaatggaaggttataagcaacgagccccaaaggtcaaattccccaagggaaaaaagggtatatgcctctgctttcttctcccagttttgcagtgagcagtttgttctcaagtgttgtcacgggccaggcttacctccttcaaacaaaaggtgggggcaaacccagaaaggaatctcaatggctatgtgttaacagcttcaagtttctgtgagtgagatcacctagagagcaggttttcctgagcctcaggcttcctgggcacttctctgcctggaacataaggttttccacctcagcctccacccacaagatacttccctccttcagacttcataacttctttcctggcctcttgtttgacctctgaaatgtactccctgtccacagtaagaggcagtagctattaggagggcaaagggccacctccctgggttcaaatctaacacagaatttagctaagccttggtttcctcctctgcaaaatggggaaatagttgcaccactttatggagtttgggtgagaatcaaagtaggaaatccatgcaaagagctcagtaaggtgcctagcagagatcaagagcctgagtgcttctaatccgtccccctcaggacctccagagacctcatggccacatccttcatgcacaccgcagcttcctcctcttgcctcagcagagagaaacctccaggatccttagcatggtaaaaaaggccctgttcaacttggtcccaacctttatttccattccatctctcattcaactcacctctctagctctccctgactctacgccatggatgtacacttaaactttaatcatatgtttcaaaaatgccctggagtctttgtaggtattattcctttttcccagtctgccctccctcacttatttgataaactcccagttattttttaaggcttaacttaagggctcccttctcagagaagcctttcctgcccaccaggacacatacacgcatgctcacacacgcatgcatacactccctgtaaagagtagacacccactgcctgtgtccaactatatgaggcatcagtctgtagttgcttttctgtctccttcactgtctgtgagctcctggagagcagggagcatgtcatatgcctcctggcacaggacatagcaaataggtgttcaataaatacctgtggaatgaatgcttgcatcactgactgagaaatgtgtggtaggaagcttccttctatgcgccaataaatcagggctgctttgtacagtgtgtgagctgtggagtgtaccaacctgcatggccagtcccggggcccaaatgtgttttagctctactccctcaactgagttagcctcagagttgctcaagtcccctcgaaactaattgatatttgtacagcaattggtaattcacgagttttcacaacagtataattaataataatatcaatcgcaagaatgttaacattttctgagtgcttactctgtaccatgcatttgatgtatattatttcaattaatccttacaacaaccctaagggcagatatgattgttatacccattttacagatgtgggaggctctggctgggagtgaggaaggtgaccttcacactaaggccctttggtgccaagtcctgtgccccttctacccaccctgagagccttgttctggcacatcagaaggcatcagtcttcattcctcagctgtttgatttctctcatttagcttcttccctgtcccttcctcctcgatccccctccctgctccagtctggcctcataataagaatattttaggttgcaagatctcttggctcccaccacatatatttgaaaaggagcatgcactgcagtgtggagatcttgggttcataactggctctcccaccttccagctgtgtgtctgtgagcaagagtcttagttcctctgtgcttccatattctcatttgcaaaatgaagataatactaccaatcctagtgattcactttgagtatttacaacctagcacaatgcttggtgcatggtaaatattgaagtcagtgtttccctccttacctctccctgaaaaaaaaaaaatttttagaaagcaatttctgtggcattacgctcaaggaaaccatagcaaccagtttcctgtagcttggtttccggccttccctagctgtacaatagtgctgggacacagcctttgttattccgataccccagggaagatgtggacgtcatgcactctatggggtggaggcatctgctgggtagaattgcccagtgtgctggtggtgtcattgctgttggcactttggctctcagagaaccaggctgtcccaggcctgggttaggccacgaggatgctgtggtttcccactggcgactcaattcatcttctaagggttgccttattgtgggtcaggccagagcagctggccctctctttttacggggataaaagtagcatttggttgggtctggagagcttcctgactctccttagatcgttaagacatttcctaggatgtgacagtcacaagagtaccatgtgattgtgtgtgcatgtgtgagtttgtgggcgcctgttaaccacaccaagagtgaaggcacggcctctcaaggaaagaatcaagactgccagccacagaaaaaggctatcaacttggccttgtgaagtggagaactccttgtccctacaggcctctggggcaagctgcagtcgggtccagaccatggtgatactaaccccagcctgtactgccacttggcaccctgcacaaagagtctccccatatgcctggcgtaatccaacctggattgctgcagtctggctgcagagtgatttccaggcaagccatttgggcaagagcaacttgactgcatcacgaagcatgactgaattttggccgagcccagggtgacagcttgcagaggtccctggctgcgggaagaaaggcagtgaggtgggcaaaggcagcacctggccatggtctgggtgcctcccaagcccagtgtgtcctactcggcttgtgatcagggcttgataatcaatgcatcccctcattttacagaggaggagactgaggcccagagagggtcgggccttgcccaaagtcacacagcttgtcagtcatagacttattgcattttcaagacagaatgactcctaaaaattatctgtcccaaactcctcaattgataaatgacaaaaattaggttcagggaaggaaaggagcattttcagggttacagagaagcagagaagactcacagccctgactgagtgattttgtgattgatctacagaggccagcaaactatggcccccaggccaaatcagctggccacgtttttgtaaatacggttttattggaacacagtcatgaccattcgtttctgtattgtccatgactgccttcatgctacaagggcaagattgagtggttgcaacaaagaccatatggcctgcaaagcctaaaatatttactatctggccttttatagaaaaagtttgccaacccctggtctaacccactgaggtttttccaaacgcctggaaactgctggccacaatcccagtatccttctcctttgaggagaagagaatccatccctattgtcaggttggggactggccagagacccctctccagagggagaggctgcgccgcaggaataggagcgaggggatgctgaccaagaagaaagcctccttcagaggggagttgagtcccaacttgcacttggagagcgcccaagataataaggatgataagaagaaaaccaattgctaacttttgtgattgtgtgccaggttctgttctaagctccttttttgtaggattgaaccttcacaacagcctagcacaatgggtacaattagtattctcgttttgtacatgagaaatgaaacgtagaaagattaaataacttgcctagcctagtcagtggtgggaccagaataggagtccaggcatgcttactccggagcccatgcctgtcatctcgctgcaggatctggatgaaatgggtgtctcacctgcactgggaggggtcaagagcttaaccctgtaactttcctcctttctcttttcatcaactgtttagtgactgcctgttgtgcgcaagtcacagtagagctgtgctaggctctgtgatgggagagcaagaaacatcacatatagaacccgcgtctgaggagcccgcagatgggaaggcagcagctgtgtgatcaattgctatctagggtagaaattggcagtgtcgaaagagaagcatggggaaaatgccaggtgaatcaaggggcatcatcttccgagataccacatagccattcaaatgttgagcatcaggggctcaaaatgctaatgcccggattggccaggcagctgatgtgaacagagaagcagatcttatttgtgtaagacagcgaggagaggtggggcctgtggagaatggatgagtacattccccagtgctaggtgttcaaattcagaatttcccaccacctccacgagctaaaccgacctctctcaggccagatcagctgtggcatctgttatgttgactaatatttatcaacatagaaagatttcctatgttgttaaatgtgaaaagcaaattacaaagcggtcagattaacatgttttgggtttttaaaaatgtatatgtctccacacatagagctatatggagaaaaggctgagaggaattagtccaaaattttaacaagattttgaggctggctgggtgcagcggctcacgcctgtaatccaaacactttgggaggctgaggcgggtggatcacctgacgtcaggagttcgagagcagcctggccaatatggtgaaaccctatctctactaaaaatacaaaatttatctggacgtggtggcacatgcctgtagtctcagctactctggaggctgaggcaggagaatcacttgaacctgggagacggaggttgcagtgaaccgagattgtgccactgcactccagcctgggcaacagaacgagactctgtctcaaaaaaacacaaaaagatttgggggctattattttgcccctctgttttttcttcatttccttcccctttggtacaataaactcacagtacctgcctcagcttttgtttctgtttttgtttagaagagagagatgattctatatccttcccctctctaccccaccatctcttgactcattcctactcttcaagattcatctcaaacatcacgtcctttagggaaccctggttcctagggtggtttgggacaccccggctgtgttctgtgctccccacatcacagcccttcctttttggcggttcttgttgtgacctgtgtactcctgtacctggtactgaaacaaacactaggtatgagcttcctgagggcagggactgtgtctaagctatctttggatttccagtatctaacatagaacttaacacataatgtgtgctccttaaatacctgaggaatgaggggctgaatttagtgctgaaggcaagaggaagggcccctggaggggagccctacctattgggcacaagagaggccaggagggttgggggccaaggcacctggagtgaggggcaaagacaggacatcctgggcacagtgggccatcccatttggctggagggtggggttcttgaatgagaatagagagaaatcagattggaaaagaggagggctccagaaagggggctggaacatcaggcttgggggtttggatgttattccagcacccaggacaagcctgcctcctcacaaaagatagctctggccccagcacatcattcttttcatcccccacccccctctttagagcgttttcctgcctttttggcaccgaatgcagtgctggcttctgtcctgagcagcgtgatctgctgcccatgagtcaggggctcggccattcctaagtgactaaggctgtcgcctcccgccagtttcccgtaaccgcctgagtaaagactcagtctgaatcactgtttattgtttttaagggtttttttcccctcctctccagtttttaaatatcaaccacccagccaggccagtagggctgaatgagtgctggggaactgtaggacacacccctcacccgcacacacaggagggatgcggaaccccattctgcttagggaagcaaggaggctgtggctatggagccagacagacctgcatttgaatcctgcctctacccctacctgctgtgcccctttgggaaaatcacttcacctatctgaaccttagtttccttatctgcaaaatggggataataatgcctatataagagggttcctgtgagaatgagagctaaaatttataaaggaactggcatatggcaagcattccagaagtggtaattattataaaacacggctcttctgctcaggaatgagctcacgtgagagaacggtaggggtctcatgccttctttgcacctgtcatttcagtaaagccaaacaatcaagggcttccaaagcccatgctttaggaatttatttcagactactgatgaatcacttagttctattatgaatagccaacatttttgcagcacttagcgggtgccaggcactgttctaagcattttacattaagtaattaatttaatcatcacaaacccctttggggtaggtattatcattatccccacttacagatagagacagaaactgaggtgcagaatttaactaacttactaatgagagacagagccaggggttgaactgaaatgatctagcttctggggacaaggtcatgcctggcagtgagattctctcagggacgtcccctgacctggcagtccttcttcatatgttttgtcctaactggatcattatcaaataatgacaatgtgccaggcattgaagtatcatcaattttcaatttaatttcaccgcagttataaaagatagatttgcttgtccttattttatatatagggaagttgaagttttgaatggtgaggaaacacccaaagtcagttagtgatagagttagcgtttgaacccaggtctctctgcaatttgggggtaattgcaccactctgtgtgaaatggctagctgagttgagatcaggtttatcttctagaagcctatcgatttaattatttggcattaatggcccactggtctgcctaagtccctctaaagaggtgaccagtctgatgggatttagcaataggtttgccccttgggatgagcccttggtcctccacaccaatagcctgcagttctgggaggatctggccagcctttggcaagtctgggattggagtacaggaaatctctctatacagaacatgtattcagtgtccagaaactctcaccaatgcatagtaagcatgtcctccagaccaggtagctaggaagccactgtgggaatccactgagacctgtggacacatctgaatggaattcctgtgggatgtacgtgtcaggtgtctggcagcctcaggaggctgcgtggtggtttcatatagaaattaggacacctccacctgagaaaatacatctagcagggaatagatagatgtccacaatatcaagatagcttgtgttagtcacatgatctgatcaagcagctgagagagagcaagccacagagtggacttcactctgcagggttccagggctgcccactaccaccagagcatcaggcacagcacctggactcactcccctagacagcaccttacccacatacaacatactcaccccatggtacaccctacacattgctctgttgacttatgtagattgaggagtgggaatctggagagggaggaaagaaagaaagaaagaaggggctggtgataataccatgctaataataattgcttccacatgcttggtatgtgctaagaactgtgctaaactttttacacacatgccttatctcataatccaattgttatcctacttaacagatgaggacactgagccttagagaagttcgtaaactgcccagaaaggaaatgtgtactgtggaaatgagcactgcggtcaatgtgccaagcacattgtgaagtgctttatatacatagccccattaacctctgcgaggacctgggaggctggtattgtgtcagtccatttgtgtcgctataaagaaatacctgaggctgggtaattcataaagaaaagaggtttaattggctcatgattctgaaggctatacaagcatggcaccagcatctgcttttggcgagggcctcaggaagcttacaatgatagcagaagggatggggggctacatattacatgtgagagagggagcatgacagagagggcagagatgccacacactcttttaaataagcagatcttgcatgaactgagtgagaacacactatcaggagtatgacgctaagccgttcatgagggatctgcccccatgaccaaacacctcccaccaggccccatctccaacactcattccaatatgagatttggagaggacaaacatccaaaacatatcatattcattttgcccatttttcagatgaaaacagtgaggttcagagaagtgaagcattttccaaggttgcagaactaggatgagggaggactagattcaaacctttgttaatctgtggattgtcaactgtgccaccctggttctggctagaagttagaagatctgggtttcagtgactgctttggttcatatagataaaatgggggtatttgtattaaatgatccttaaatttccttgtagtgctaatattttgtgtttctctgaggaaggaagagtagccgggagtttgggaagtcatcagtggccttcttctgggacacatgtaagcctgtttgaatggggagggccaaggagagagagtagtttttcatttcctctaaacggaatgtcaggggttgcggggtgtaacagaaagcctcatggcagcagcttaggaaggcggggtcagtgatgtgttttcttaaaagagaaaaggttgagttgggtcaccttcttttttagctgcttgtgtcctagcaaggactgaatttttatgggtcataatttggtacagataaaaacatattgtactgagctcagccaaatcccctatgctggcattactggtagagttctcagccagctgactgggcccatccaagaggcctgtggggagaagagtcaggcaaggcctggatgttctcttggagcaccttggcaaggatttggatagcactgtggtccccactgcctgcctcagtagagcagagctgtgcagggcatccagaaaggctgggcttccagtcgggtctgtgtgagttggctctgcccctttctggctgagtgaccaggacatgagcaagtcattcagcccctggggttgcaaactttactccacaaaccagcacaaggacaaggccacatttcaccaacgcccagaggagggagaaaactcaggatattaaattgtatcttcaacaatataattttattaagttttaaaaaatgacctttattctgattaaattgtctgccacaattgtttgcattaaaatatcttttcttttgccaaaatgggacgataagtttagatgtagcattttttaatttttaaaatttccttactaagataattgaggtgaacaatccatgtacactcccccaattgttttaacttgattgcgaaatccaaaaactggaaatcactgatagagcttctctgaaaattagtttcttcatctgtgaagtggggataattagctccattttcttcaaagggtattgtgttggaaaaaatgaggtaatatataaaatgtctgttcctgaactcaatttaaatagaattatacttccttttcatgccaactgttatatcctaggtctacatgctggacttcagcccttgtcacaatgtcctcccatcatttctgggagctttcccagggtattgactcatgtgtcaatgcccagcaggaggtatctgccctgctggcacagttgtcaccactgggggctgtctctgagaccccagtgatgaaggtgaagctcttgatttgatctaaaggtcattcttggtggcccacaactctcagaagaggggcagctgctcagatataccccttagtctggagcacccaagcactacctaaatgctgattatcaccaaacttggtgctttttgagctgctactgcctccaccatggtaaatagtggaggccaagctcctctccaagggcacggccaagggcactcacccacttccagatcactcaaggcccccccacactgcaagcccagtgccaaccccacagacaccagagtgaggaatatatttctccctcatccagtcctgagtctcatcatatttccagcccttccgggatgattgactatgggaatacccattctcttcaagggtagagttcttctcacccatccttcaagagtgctcacatccctatgggctcaagagcccttggttggcacattgcccaaagttgggtcattataacccatggcctctcagtacagtgcctggcacattgtaggtgctcagtgagtgctgatttcccatccaagtccctcactccataaaagcacatggtcaggcagggctaggacctggaaatccttccctcattctagctgtagttaatatgggtttggggcaggatgagagcaagacccaaatgctgacatcagtcctgaccctcagaggaggccctaccatgatcccaccctgggccagcctccagcgaatcccagaccttccctcagaaggccccacagactgcttagctaggcatgtttgggtggtttgtcctgccctctcagttcagaagctctgccatctgcttttaaatcaccttaatttccagccaaatgggagttttcctctcatttcaaaatgcccatgatatcatccatcagtggggagcagttgaagaagaagcctcgaagacttccagaccccagcagtaggggtggggaaagcaggtttcaagcagcccttactagaatcaggccctgtgaccacacccccttcccaatatctacttgagcaggcctgcaggtatggccgggctgaggagtcaagctctgcgggctccaagataatgttaaggaagaggaggaagggtaacagatccagggttcccatgcacttaaattccttcattctgcaaagatgaatttagtgctcattaagagtatcagtttatttggggttgaaagattttcacacaaactagtgaaacagccgtatgatgattgcaagtgcaacaggaattgcagctgaagacttggaaactggatctagctctgactctttttaagttgatgagtgatattgggtaaacctccctccctctctaatcttccatttatctttctgataaatgaaggtgcaccagtctcagagggcccctgttgctctggtcctgggaatggtgtgaggtttcaggagcctcccacgctctgcaccaagaggtgcttttggacttagactgactctcagggctcaggtattttctaaaaggcaaatctcatcatgtgactttccaacttaaaactctccagaggcttctcacatctcataaagtccagaattctcagcatgctcaggagatcttgcatgctcacactcacctcttctcacactgctcccccagctccctagtacaagcctattctccaggtccccatgttcatgtcctaacccaccccagggcctcctccttggctcctctctgcccccttcacttcatttaggtggctcctactcagccttctagtccctatggtgacatcgctgcctccacgaccatgtcacttgcttcataccacagatagttgggtcccctgtgatatgttcccttgcttttcctttgagtaacctgtctctcagaatcaaccttctccatccctccccctcccagactgggagctccaggaaggtgggatccttcttatttcccagttgtccccaacactgggcctgaccacaaagcaggtactctgtgtttactaaacaagagtctcatgtttccctcaatccgcccattgtgtggtctcagggtggctcacagggaggtactccaggtcataggggttgcctgttcatttctcctcaacctggggattcaccttatcagatgaatgacactgcattcatcacagtctcctctcacttaaaggggttgtgagcaaaataagttcacattgtctggtgcttggatgaataaagcatggctgcatgggcctgcccaggtggggaggacccccagtgtgggaaaaagcagcatgttatcatggagagagctccacagtcctagactcgaggaggcccggattatcactgttatatcctggctctgaccttcaataagatactcccttctctatctgggtcttagtttcctcacataaagtatgggggttggactcaattataacatttagtctttaatggatacttcttagtttttgccaggcccagggctaaacccttcatatgcagtacaggtaattcccacagtaaccatatgaggcgggcactattattagccccattttacagatgaggaaactgcagattagaaagtttatataactttcccaaggtcacatgactagaaagtggcagaggtagggtttcaacacattgagctcttaaccactttgcctcccctccgaggacctgctgactctgttattctaggaacatgaaactgcccagaggctcagaaggtcagtatgagatctaaaattattatgttctcaatacagcattctccctggaacagggagacagcgcaggctgtcagcccagcatctccgaaacactggtagccctgggagccatacagcagctcttggctgcattgacacttgagagccagaaaagagctagaaatatttcttatccagatagtcaatctccaggttacagccttccctctcagccataacctggttctgtgcttgtttttacatttaaattttcattgaaatattacatgcattcagaaaaaagcaaatattatacatgaattatctcaaagtgaacacacctgtgtaaccaccatccaggtcaagacatagaacattaccagcatcctattaggtcccctcctaatcattatctcccaggtcctgtgtgtttttatctgagaatattccctggagctatggagaaaggctggaataagaagttaattttcaaattatcctttcatctccagggaaattgtaagtctgcaggagggatgtggaggaggggaggaatgaacacaagatgtactaaaccctcagatatggcaaatggctgcaggttccagagaaaagggatgtgtgtacatgtgtgtgtgcacatctgtgtacatgtgcatgtgtgtatgcatgcgtgtgtgtgtgtgtgtgtgaactttgttggcaggagggaggccagagtgactggcaagtgtgggatcacagaaaatgagtgcctcaacctcttgagttaggacaggtctcattgagaaagaaggtcatgcttagggaagtgtaggagattcatctagagagcccctgtgccctagcgctgactctcatcctccatccaggtgaagttgctacagactctagcactgcaatcatgcctgctaggggatctgtcttctggtttcttcagagatcatagaatgggatgaaagaggggaggcaacccaaaacacacccccaatttggggaaggtctacctagagttggctcattatcaagctgaagtattcttacatgagaagcaaagaatcccaattacagccttgaattgcatgattatgaagcccctgaaaactcttggagggttttattggccttatatttgttgtacataaaggaacagaagactctgtaaaggagaaagtgtaatgcttaggcaagctcagagtctgagctaaaccttgacctgtgtaatcttatccattccaacaaatgccttgggcaccatgaatgttcatcccctaaccccactgagtgagaagctgtgattctcagactatgccgtggtaacagaggtacacaaaccatagggaaaacctgcagcaagcatctttccgggcatcaagtttactttacattttaagaaaaaatatatgagaagtaaaaatattttctgaagcaaaacaaggagaattattaagtagaatgataatattcatatgctcttttcaaatttcaaagacaagctctgctatcaggaagctttggatggtccctttgctctgtgcaccagtcactcagggggatatatatcagctctctcctactaagagagcttttgtgggcaaggctgagagattctgaacaaaggagtaatcaaagtatattatataatgtggggatagagttagtatcaggctttacctctgaaaggaaagtgggactatgagtataggcatggtatgccgcagttagcctgggatagtctcgggttgtgccttttatccaggcacaattattaatagcatcccctttcactgcacaaagagcccaatttggatgaaaaaaatcatatggtcatcctggctatgaaaaactagattattttttcagagagtagaggaggaaggctgtaagcacattccctggctgaaagtaactcagtataaggagagctctgcacatctccacaaagagctcctggaggcattgggaatctaaaaggaaggaggatcccaatgtggcccttctcagtattccattcttggctgccctggtcaaggcaaagttgctctagacaaaggctgtgtgacaatgctgggacagagttatgaaagccaggctgagccaagcctcagccagtccctggagcagccagaggtggaaaatctgtagggctagtgcaaattatattcaagggagtcagcatgccaaacccaaaataatttgccagctccaagggatacgtgcaaagacatcaacaagagatgagacaagaagcctagaaccaggaatgggaggaaaagttggggaagaggactgcaaggtagggacatgggaacaggactcagggcaaagacatcactgggggccaagagctggccacaaggctggcaacagcccggttgggtcagaggcgtccgccaggaggacggtcctccccaggctgcattcataatcagccagctaaattgccttttggtttctgattttggtggcattgctgtgattactttataagtagttctttttacagaaaattttattcataagagaggaggggagtcttaaaaaaggaaaggacttattttagcattaacccttttcagattatttcacaagcagatgaattcagctaatcagcttgcccgttcactggcatcagccttgccaaagcatgtgtttgcagggttttggtgtcactgtagcacatggacagagtgtctttccacgagactttcatcatgagggtgctgagttgaaatagaaagattgccatggttgccagatgcacgatactgactatcatatgagaatcaaacaaatgctgcagaaagaacctagagtttggccttatgtgttgacttgattcatttacatctattttattttactttttattttttgagacagagtttcgctcctgttacccaggctggagtgcaatggcgtgatctaggctcactgcaacctccgcctcccgggtttaagtgattcttctgcctcagcctcctgagtagctgggattacaccaacacggccggctaattttgtatttttagtagaggtggggtttcaccatgttggtcaggctgctctagaactcctgaccttaggtgatccacccacctccgcctcccaaagtgctggaattacaggtgtgagtcactgcgcccagcccatttacatctattctaatattttcctttattcatgcttatgtttaccaccttatagttttaggtcactcctctcctcatcaggcatacctgcatggccaaagtctggtggtttctgagtgttaaccaattgccaactgtatgatcttggaccacttacttggcctctctgtgctttaatttcttcatatattaaaaagtcatggtgagccctatcttttagggtcattgtgagtgttacaggagacaatacatgtaaagcatttagaatcagaatcaacacgtaataagtgctcaaaaatgttaattaattaaaataaagtttgggggatccaaaggaggcagtgacaatggggacacatgtgttggttccccaccatatgtgaataggactgatgcaaaagccaaagtaaaaacaaaacaaaaccctccctaggattttctagaaatcttggtaaaaggagctggttttagtcctaccagctggtgcaagagaaagctcctgcaggaactttgaagttcttctagtccaggttcttcatttgctggatggggaactggccccagagaggggccagtggcttacccaaagtcacacagcaatttcaaggcagagccagaagtagaacccagatccccgattttcagcacacaccaaagcttttctctttcaaagtcttttctgccacacccctcaaagctgacctggttgtcagcagtaaagccaagtgcctagggaatgagctagcccagagcttctgaaacttttttgtacaagtgaatcacctggggatcttgttaaaaatgtaggctttgctacagtagagctggagagtggcccatgaatctgcattcttgacaaactcccaggtgctactgctgctgttccagggatcacacttagataaacaggctctaggccagcgttatccagtagaaatagaaggcaagccatgtatgtagttttcaatgttctagtagccacattaaaaaacagaaaaaaaaaacagatgacattcattatagcaaatgaaatcatttaacccaatatatccaaaatattcccatttcaacctataatgaatacaaaaattattaatgagatttctcactttctttttttccttccaaaatcttctaaataccatgtgcattttggagtgagagcacatctcaattcagacttgccacgtttcaagtccgcagttgtcacatgtggcttctaactgcagtgtagttccaggcagtttctcagtgggtctcagccccacttcctgaccacaccatcttttttatttttatttttatttatttatttatttttggagacggagtctcgctctgtggcccaggctggagtgcagtggcatgatctcaggtcactgcaagctccgcctctcaggttcacaccattctcccgcctcttggttcttccttgggtttttcccactgtggcatgctcttcccactgaagaacagcagtccccactctcacccagcctcagcttcctggaggaagacaagggcaaagaagcccaaaatccaccttacgtcattcatttcctgaccacactagaattatctgggccaaaagacccctccctggctggcactatggtgtcaaaatgcacagctaaatgcttgaaggcctgtgtgttctgccttcaattaggagacaggagctgacaacactttccacatggctcaggccctgccactgtctggccaggtggtttgaagggttttgcatgaggccagccattgaccatgagagacacagtctgtgattccatggccaagtgccagcgtgacatctgtgggccctctgtgatttcaggggcggctcttctcctgccaaaatacatcaatgggatccatctgacagttttgggtgagcatgcagactcactgggagaaagacccacactggctgagggcctcaccaccggggttgcgggtgttgtctgaactagaacgaagtccgcaaacatcttccccaatctgtgacctgcatgtgactcaccaggcacttctgttcatatgtaccccccggaaacccaggtctgagaagccaggtcatttgtatgttgaagcaccaaccaaatgtatgtttttgcttgcttgtgtctgggaaagcttgtagcttgacgctacctaatgctaaacatatgacttatctggaaacatctaagtatgctgtggtctatagacaaaacatccacatctataaggatgtcctgattaatggtattttctggtaaagcaaaaatcattccttgtttgagtccttgttgttgcaaatccttctaatcttggattgagtttttcctaccttagtaagtagaatctaatgagcaaaatcaaatcttatctaatgcctcagtgtccttaattgcctccacaggcattttgcatattgatcatacaggcaattatacttcattcattcaatcagcaaatatgcattgagtacctgtcacaagccaggcatcgttctagactcaggggatgcagcagaaaaaaacccttgctcttatggagctaatattcaagtgtgtgcatgtgtgttgaggtgaggggagatggggatgggcagcaaacaagctgatagcatatacattataccagctggtaggtgttctgtgtgctgttgtacatttgataggctccaaaccgagggaacagggcagccaaggctgctccccgatcaggacaggttttgctgcctgcccaggctctacagggaacctgaccaagaccttctctccaagctcatagcctcctatctaaccaaaggctggcacttgccaattaagcagatcatttggtgccctcctgcccttgtattttcagattaatcttgtctctttcacgtatctactaccagcccacctctgccagggcccttggtttcctctgtgtttgaggtggtgcctctgcgtgtgactctcaccctccacagggtcccctcgtgatgggatgggaggggatgctgtgtttcgagtgagatagccgatggcttgtttgtaacatagacttttcccattgtcatgaggttggggcggcaacagctagaggaaatacaaacaacaattttccatgccctatttctgtctccaaccaggagtgccatgctgacacaaacacagtgttcatttgttcagtgtttgaagctgaaatgtaccataaatataccatagcccttcaaagggtgggttcacaacagtctgctttaagaggccaccaaagtcatcttttgaggaaaataaaacaaaaatatatttagaaaacattgcccttgggggaaattgaaaacatttttcctatttatgatctggtccttttccacttgacaaacactgattgctgtttcccacccacacccctgccctttctactgttttaggtggagcccagattcacatggttttctggttaaataacaagtgtgtctgtcccagtctcagcctagtagagcccacacaccagcgactggtgtaacattggaggccagcactgttctaggaaggatagaacatggaagaccctggcttgagaacccactagagtagactacggtcttctttagaaagatctcttcattgtagctggagggagaatgttaggagattggactgtaaaatatcattaggccgatgtataggaaatcaccatttttgagtcaaaagtagttgttatagacaatttcatttagttccatctaaaaataaacagctgccatttattgattattgcctgtgtgagctaagcaatttacatgaatgatgtcatttgatcttcacaataacccaacagggtggtgtctcaggttgggttccacagaggcagacgctaagatgaggatttgtgacttattgaagaagggctcccaggacaaaccagtaaaggagaggagagtaggacagggacagggatacagccaagcaaggatgaggtttcaggcagagtcccagcctcagctgcactgtgtggggagttctggagcttaaattacacccactgcaaggcaaatgagctgggttttcatatacccacaggctgcccagggagtcaaccctcagacacaaccagctctctgcatgcataggtgaaggggcaggcctccgagcaagctcacaggtgccgatcattagaagcaaagcacagggaagccaggggaggggagggccgctgaacagggacctatggtactctgggcagagcatcttcagggtccactggagggaggtattagttttatcctattttacactgaagaaactgagactcggaaggatgaaagtaacccacctctggtcataaagagatagggccagaactctattatcctgaactggccattctgtagaactcccactgtcacttccaatgcccttagtcactggggtcagctggtggtgtctggtccctcttttccttagaatgaaattttagagccagcttggttcatgcagatagactaggggtgcagggaccacccaagggaccaacagctattgctcgtctaagtccatttggcagcaagctaggacttcttgtcacattagctctcccttgtacctctctaggttggaaaaaaggcctttcttgggcccagttcggtgggatctgctgacatgttcctccactgtccccggagcctgttttccctttcaaggttcccttggcagaggcgggtgtgacctgatactctctacctcagtggccagcagcaaagtgctatccagtgccactgcctgagagagctgccaccacttggcttggatcagggaatgtactcccagtattccaggccaagggacacactggcatcagaacacctgattaggggatcacctcccactgctgcctctttgctcactcccctggccaggtgcagtcagttacctgctcttatctggcaacccaaggtggccttcagggagttgagtcggcactctccggtccaaaacatgacatagtgggaaagatacagactttggagtctgcaatccaagttcaaaacccagttcagccacttaataatggaagtggttatttaacttctttgtacttcagttttctcatccgtaaacagggaatgacaatacctggcacagagtggactttgaggaatatttgctcccagccttttttttttctagattttgccttacctggcattgttttctgtcacatgacctatcctgacttcaggtcattctatgcattttaatacagcctagctgtcctgggattgattggctgcagggtgcaagctggaaaatgtgttccttattgtcataaagagttttgtcccttctggtttaccatttgagttctgtctaaagacactggatgggccgggcatggtggctcacgcctgtaatcccagcactttgggaggctgaggtgggcagatcacctgaggtcaggagttcaataccagcctggccaacatggtgaaacccaatctctactaaaaatataaaaattagccaggcatggtggtgtgtgcctataatcccagctcctcaggaggctgaggcaggagaatcacttgaactcgggagacggaggttgcaatgagctgggatcacaccagtgtactccagcctggatgaaataataaaataaaataaaataaaataaaataaagacactagatgacctgcttttttttttttctaatcctgactaaggccttgttcactgaatcccattctactccatatgctaatggttccttgaatgaggcttggcttgctaggacatagcacaggagaaaaagcaaaatgctacatgacactgagatgctgaatcatgcccccataaccttctcctccatacatagaaatgctctcctggttttttcggcagcctacttgaacatcaatcacatcgggaaaaaaaaataaaaaaaataaactggcttgccaccaacgccattgtgctaagaataatttctgtcctagcagtacagctggtcagaaacatttcccagtgttcccatctggaattaggtgtgaggattcaggaagtgcatttgtccatttcaagtctgaacctggcatgggccttgaaacttggaagcctgacaaaaacctaagaatcctagagtaaatgtccaaacactgacctgcccaaaaatctatctcatattgaagtctccttctcttttgtgtgttgcatgactctcatttagtctattgttcctagttttccaggagtcagtattaaatatcaaccgtatttactaaggcagagcttagttcagctcagcgtctcacagtggagtcctcagccagcataacatcttgatgatcaggatcatggtttactggttctggtttgaaattggttcttgatgatagtggctggctgtctggcttcagagaaaggattgtttacattttaatcttccaaataaatagaattattcatccactcaaaaactattcccaagatgctgacattgcagcaggcattgtgctctctaagcaccaaggactttaagcacaaaaagacaccttctccaccctcttggagatgatagtttgattcagtggttcctaaccctgggctgcacggtagaatcacctagggagcttcttataagtagtgttaagatatgattttcctctttaatcctcacaataatcctacaatatagatagtgctgttgtacacatttcaaagacaagaaaactgaggcatagattggttgagtcgcttgcccgaggttacacagcattgtggaactagaataggaccacagaaggtgtgccttcagagagctgtacttacctcagaactatcctggaatactatgcagccataaaaaagaacaaaatcatgccctttgcagcaaatgggtggagctggaggtcattatcctagcaaactaacgtaagaatggaaaaccaaatatcgcatgttctcacttataagagggagctaagcactgaatacacatggtggtaaagatgggaacaatagacactagggattgctagacaggagagggagggaggtgggcatgggctgaagaaacacctgttgggttctatgcttttggcctggatgatgggatcgttgagaccccaagcctctgtgtcacacaatttacccatgtaacaaatctgcacatatatcctttaatctataataaaatttgaaatttaaaaaaaaaggaactgtcctgcctcttcctgaatagggcaatgcaggaagagacaagatagttcttttttttttttatttcagattttattatagaggaaagattaaagggcatggcatgtctggagatggctggtgcaggtggcaaaagaaaaactagggagggaggcaaggatggggcaggaggggtcttggggaccccgactgggacactgggttttagttaggtgattggaatagttaccacctgtaacaactagactgtgaaggcatttgctgggaggggcttagcatacatttctacacaacaaaaagtaggtcattgtcttcagaagagagcagggaaggtgcagatgcttgtgatggcaattggctctgacagcagctccgtgctgagtggggaggaatgtgagaagggcctcctgctcctttttcccactgaactcttgctttgacacgttatcgtaacgctggggtcagtcctagagcagctggctctgtgcctccttccctggaagctgccttgcctacccagcacttgtgcccactcagatcatcaagcccaccagaatcttcactacactgttgctcagaacccactcatcacagcacagggctgagtgctgatggggctgccatggaggagctgcaaacccacttccctgctcattgtgtaatccaggagagaacggggtgtaatcgttacacacatgagccagggtttgaattccaactccatcatttaccacgtgactctgagcaagccccttgacctctaggaagctcacttttctcatctgtaaaatgaggtggccatccctactttgcagctttgttttaagcattggggatataattcacaagggacctagtaaatgtgtcggaggccctcagtaaatggcagctgttattatgcctgcttaactgccattactgaattctagatccccgtgggcccagagagccctggtggagagccattgaataaaccccttattttgcagatgagaaagctaagcttgaaaagggcagtggctttcccaaggtcacccggactgtgaagagcacaaccaggagcaggagctacctgtgagaggcctcctggctccaaccacagagcagaggtgaaaagttcagctccagcttggccacggccacccatagcctttgctctgatttcctctctccacaatggcacagacacaacctttctggaagggtttgtgtggacgagtaagctgtcattccaaagtgctgaaaagtactccacaggtgccaaatcatgactctccatggatttcaacacctcggttggcatgccttcccaccagatgcaagcttcatgtggacagtgctcacgtgtgtgtgtgcatgtgagagagagagagtgtgtgtgtatgtgtgtgtgtaggcgggtaagaaaaaggagaaggagggagaagaccacttagaggattccagacattctgaagtccttttccatacctgaactccaggacattatgacttagccccctgccttatgaagaagaccactgctagctacttttgcagttgttccagatcctacttccagccacctgctagagaaaggcgtgaagaagggcaactggcctagggcccccactctgtggcccacagtgaatcagtaacactgttgctgaaatcttcagcaaacaagaagcacagtcaggaattctgtgccaggttgctgatgtcaaatggagtgtcttagcaaagcatggagtttagaatcagacaattaagaatttgaatgctggttcttcctagctctgtgaccttgggcaaattaccacttgtgtacctgtttcttcgtctgtaaaagaggggaaaatattacttccaagcattgtttgaagcaattaaatgggatgaagaccctggtgcataactgtttagttcttaccccaaatgctgccaccagcctcagtggcttcctgtgcctgggttaccatagcacctgagctgatcctggtatccccttgattttacttatggattttgaagagtcagaaagataccagtatgaagaggtggtcactgaaagcaaagcctgttttccaagaaaaggcatctcacttggagatgattgccttgggcacctcgtatatttggggcaaaggcagctattggtgatgaggggtagggatctgcttttatcccatatgtgatactccatagtagaagagtagtgcagcaccttgaatagacgactttgagataacagacattcatagccttaccatgcatttccttgtgaaccaagttagttaggcaagaggtcagatgtggacagatgtgatccaggactgcaatgagaaaagttgagcccctctgtgcctctcctggcctgcaaaactgcaagtaaagtgtctacagggagcttccatcacacactctctagcttccttttcctgcctggtccattgtggatgccccagctctgcacatacagatcccttacccaagatgctggaggatccccgtgagccagagggacagggatccccaatgggctcatagcctcagattctgggccttcacttagtgtcgtagcaatggaaatttccacacattcagatatatccatggcaagggatcatgcagtggccctaaggtaggtgggagaggaactgtggcttgaatacttaatgtgttccaggaaatatggtaatcataataatagtggtggccatgtgttagtcactggtttagtgttttacctatattcatttaatcattccaacaaccctatgagggagggactgttataaactctattttacagatgagaaacctgaggcacagagagattaagtaacttgtccaaagtaacactgccagtaagtggcacagttcggacccatgcagtcacacgtatgcaatcaaattccaaaatcatccttttaaccagtaagctccactgcctctctttaatcttccccctaaatccaggaggtgggccttattaccagcagaggtaagaaactgaggctcagagtggttaagtgactgggccaagatcacacaaccaattaagcgcaaacatctgtgagactctacttcactaaatagcttccaaaagagcaaccgaaaccctgacattatctcttactctacacagagaagtgtggggttggggacccagatttttacccctcaatgcccagacctccacccgaagcacactggcaggcagaagcaaaagccctattcttgcctggtcatcctctttgcctttcagatcctggccccaaacatctaaaggggtctaagatgtcttacctgctaacatagcacttgcctcacttagtaattatacattcactgatgtggttatgtaattacaatttccctgattggaagctccacgagaaaagaattttgattcttactaacattttatcaccagtgactggcatgttgcccagcatttggtagcaacataaaacgctattagaatgaatgaatgagtgtagcagctataaggttctagacttacacctggccctctgtctccattatctcaaatcctcacaagaactttgtgaaatagtcgtcatcattcctattttactgttgaagaaactgaggatcagagaagtgaggggacctttgcctcaatcagtcaataagaaatgaagccaggcaccacagtgaagtctgccagatccagcctccgtgttcccctttttcaccccacttagaaaggaacctgataataaactatctaaggggttgggggttggtggggggtctgccagagtttctcctgtagggaaaccagaagaaaatggggtcgtggagatcaaaggcaaggaaagtgctcaaatggccacggtcatgggaggggattctagaagactgcctttgataactcagcaggaaatcagctttgtcggccagccgcctttgaaaactggattctgcatactcaaatcagccctttgtggtaccccttgggaaggataagaccctaacaagcaaatgattctgaatgggagttaattcaacattctgatgttttttgaaaagatggactttgtggaaatgaagccaggatgatgatgatgcttagtagttttcactgcaacctcagggagactaactttgtttggttcgtatttgaggcacttccagactgccttgaaaaggaaattctgataaatgtgtgtgaatgtctaaaattcttgtgcaatgtggagcttcaagaaagttgccaggcaaatttttggaaaacaatttaatagtgtcttgccccactgtttataaaacaatatctttctaagccaaaaaataaaagacaattcctgtgtattttgtttttttccacccgtgaagctctgaggttttatttgccttggatttggagagggaacggaaatcaatgcagctgtttatggtctcaaatcttcacacaacttcaaatgctctcagggcccaaaagatcctcatgggtgtctctgttttgttgacagcttttagaccatccttgagctcagccaaggggtagcattaactagaattcccttttacatgtgccctgcagggttcatttctggcatcccactttcctctccatcttctctgtttctgcaggaagaagattgtcttgaggccaccaacatcattagttatagaggcaagttgatagatcagtcagaaaagaattgatttcctagtccttgtgctcaggggtggtcttggcacttctgtagacaatgattctgtgggatccgcttccctggaaggaagggagaatagacggaatttctggggtaatggtttttagttgtgtcagaagagatcccacttgtcagtgactttgttatacagataacctccctttaactagaactggattttcactttttggttgctaacataggttttgtttattagtttgggagaaggagctcaattctcctgcctgaaaaaggagagggcagagatggatgtaagctagttttctgcatttccacatcaccaacatttgcacagggcttggttcacagcagggcttaataagtgtcctctgaggccaagcacacacacctgtaatcacagtactttgggaggccaaggcgggcagattgcttgagcccaggagttagagaccagcccgggcaacatgatggaaccctgtctctatgaaaaatacaaaaattagctggcacagtggtgcatgcctatagtcccaactacatgggaggctgaggcaggagaattgcttgagtccggaaggaggagtttgcagtgagctgagatggtgccattgcacttcagcctgagtgacagagcaggaccctgtctcaaaataataataataataataataatagtaataataataataataataagtcccttgaataaataaaaggttaaaacaaatgagaatatttatttgaaaaaaaaggaaatcccatggaaaagtaagttaaagccacccataattccaacttttaaaaataatggtataaaataagaaattaatagtccctaatttacccctcagaaagaactgctgttaacaattcgacacgattccttccttctttttccttctctttataaacatgtttatttatacgtatgtacacacacataaatatattagcaaaataattttaacagtaggctaatatatataaataataaagaaaataatatttttttaaattacaaaatgcataccaaagctctaatttttgttaaattatccactattgaggtttttttaggccaacacatccttttattagcacagaccttcatgagttaactctgctccaaatcctcctctcagagtcctaaaccctgggcactgggcctcttcctggaggtcagacattgaccagcagcacctcttccatctgaggctcaccaggctccatgcctggggcagagtcagagggtaggcatgaaggcttccaggatgacagcagtaaccaaaagaggaaatgtgttgagagagccgtggggaggtggggagcatcgcagctcagtgcctggtggccctgcaggagcaaccggtagagtaacgagtaagggtcaggctgcctgatgctacccgcaccgctggagctgaggcggcattggggggattacctggctgtgtttgggctgcatgggcagctggactggctgagtgtttctgtcaaaaaggaaatctcactcagaaagtaatagaaggcctggatttttccagattggctgttaacatagattgaaattatccagattattgcctcagtaatcccccactgtaaagtgttgtgagagcaaagcctttgcagcgcttcataaagccatgtttttcaattcgtctgcacccagagagctttctcaacattctactgcctgtgcccactcccagaatctgatttcattggtccagggtgggaccaggacagccttagtttgtggatttcccaggtgactctaatgtaaagccaaggatgcaaagcaaaggggaggaccactaattcagagtaacctcattgcttttttcaaatgcagactcacagcttcagaatcctaggtctggttttttttgggggggtggaagggggtaggtatcttttcctttaacaagcagcctgggtgatttttaggcttcttgtttaaggagtactggtcgaagttgtctttgcctccagatgaacatagcaggaagccctgtctcagagcacgaacatcacgcaaagaccaccccctgtaactggtgatctttccttgccttattattaagaccattgtcattagcaaactgggtgactaccaaacctttccactcatttcctcaacttaaaatggactcattctgccaccactcaggagtgctgtggggattcatttaaatgccatatataaggcagatcttaaccgtatcagaaacaggaagttacattatcatttccatgcttatcattatgatggctattcctttgatagtatactgtctactgtccagagtccaggcactggagtcaagtcctgctcttctacttaattggcagtaggatcttaagtaagatactcaaacctctctgggcctcatttttctcttttgtaaaataaaaatgggaataactatctacctcatgaaattgttgtgagcatgagaaatcatgtatgtaaaatgcttaccttagtctctggcacataagaagaataacttcataaattacagttcttatcagcatcatcattattattgggtcaactatggttgcctagtcatatgtgtgggaagaagaatagaggccgggcgcggtggctcacgcctgtaatcccagcacttggggaggccgaggcgggtggatcacgaggtcaggagatcaagaccatcctggctaacaggatgaaaccccatctctactaaaaatacaaaaattagccgggcgtcgtggcgggcgcctgtagtcccagctactcgggaggctgaggcaggagaatggcgtgaacccgggaggcggagcttgctgtgagcagagatcatgccactgcactccagcctgggcgacagagtgagactccgtctcaaaaaaaaaaaaaaaaaagaaaagaaataatttttaaatatcaatttgaaactgaattaactagacctcaattcgtagaaataaataaataaataaataaataaataaataagtcttctgtaatagtgaaaaagtgggtggagaattaaaaataacaagcagacaaacaaacaaaacaaaccttgcatgtcagatccagcctagaatctgaacatactcagctcagtgtcacctttactttttgcaggtaaagccctaggtggtgctcactccaaaataccagctagagccaactgtttggactggagaatccagacgttttgatttccctctccctatttgacctctttgcccacacatataattgatacttatcttttatttacatttttcctggacccagctccttgttagaagacattcttaattaaatttgcctggtcattctatctcacatcaaacaggaaatccaattccctgtctgtccaggattctgcaaatcactgaatgaggagcaagggtgatggggaagaggcacaatttcattctcgtggccatccctgattacatttctgctcccattaatcttaggatctcactcttgtctatctcttttctctgttctcttccttctgtgccaaaacaaccccaaattcaaaacttatctctttaaaaaaaaaatagcaatgttcccccacctaaagaaaaatcaagtcactccaagtatttggtagcatagcaggctttgttgctattttgggaaaataaacgggttttactttggcacttttgtctgtgttttttgtcctcctcagtaggctcttcacactgctctggctactccattttttgggagcccttcatattgaaccgctcccaggaaatggaatttttctcacttattatagatgacaatatagcttgacccctggactctaggctgaccttcacatatccaaatgctcactaatgtatctctaagaccatatactcagaggacctcttgagcagcttagaactggcagacttcgaaatctcagacttggcactaatagatattagtgcctgaatatggaaggaagtgatatgtgatttatatttccactgatatgatttatttacacagccttctcccacctacagaaagtgaaagtagtcacagtctaagttttaaataagaatccttttcttctattacattatatttagccattgttttattgaatacaggctttcctctaatcctttgtgggatgaggcaagatgtaaacaaaggaatgtttcctagacttaacttatagaagtaggagagtggaacatacctcttagagtttcaacaccaagggtaaaagcaaaaaaattctctctattactttaggttttttgttacaaaattaaattaatcaacatacctgataaccccacaaatagttgaccctcctttgtgcctgatttatcattgtatattttgtgctgcctctattagagtattggttatattgtttgtcattcatttattcccctgtttggtttccctactagattgtgagttgtttctgtttttcagtttcgagaaaggacaatcctcaggtgagaaacagcagctacatccttctttgaaacttgagagccgagagcaataacttattcttatctgctctccatcataatgcccaaagccaggcacatagatggcttgcaacaatttattccttgtattaattattgagccactgattaatcaatggtttgctacctgcagtcatgcattacttaataatagggatatgttctgagaaatgagtctttagtcttttttgttgttgtacagacatcatagagtacattttcacaaacctagatgggatggcctactacacacttaggctatattctatagcctattgctgctgggctacaagcctgtatagcatgttgatgtactgattaccataggtaattacaacacaatggtatttgtgtatctaaacgtagaaaaggtacagtaaaaatatagtataaaagatttttttaaatggtatacttggatagggcatttaccatgaatggaacttgtaggactggaagttgctctgggtgagtcagtgagtgagtggtgagagaatgtaaaggcctaggacattgctgtacactattgcagagtttattaacactgtacacttaggctacactaaatttattaaaaatatttttctttcttcaataataagttaaccttagttaactgtaacttttttactttataaacttttaaattttttgactttttgactcttgaaataacacttagcttaaaacgcaaacacattgtacagctatacaaaaatattttctttatatctttataagcttttttctattagttatttttttaactttttcaacttcttaaaattaaaaatgaagacacaaacagacacattagcctaggcctaaacagggccaatatcactgttttccacctccacatattgtccctctggaaggtcttcaggggcaaaaacacatatggagctgtcatctcctatgccaacaatgccttctggaatacctcctgaaggacctgcctgagactgttttacagttaatgtttttaagtagaaagagtacagtctaatataacaatgaatagtacagtaaatacatgaacccataacatagtaatttgttatcaagtatttatcatcaactatataaagtattaggcactgtacatggttgtgtgcgctatacttttataaaacttgcagcacagtatcaccacaaacatgagtactgtgttgcactacaatgttatgactgccactatgttactaggcaatagtaatttttcagcttccttataatcttacaggaccgccatcattatatgcagtcagtcattgaccaaaacatcattatgcagtgcgtgactatatttatttgacatttagtctgggtcattgactcaaatgcctataaacacacatacacacatacatacccctcacactctagcttctgcaggtaggggaaccctcagcctttgttctcagaaaaaaagccccagaggttaccattgggcatactgatttgcacacagacccatctggaagaaagtttgagattggaagtgagtcactgatagggtgagtagatgagcagactttccaaagagatgtcttaaggttcttacctcacttctctgcagtatgagatgggtggcctctcaactcagccactactaaaaggtgagcctttgtgccatctcggagatgtctcataagttgccaacccatttgtagaaaattaaggaaaagtgcattttttttactcccaaataaactcataaatattttgctttttatattattcaagaaactttgcaacatttcccctcatcatgtataatctagggtctccaaaaggctgtagacttttccccccaagatccctgcatttttttgtgacaggctgggccttagatgttccaggctcttcaccggactgtcttcttgggaggtcaggccaacaggggtctttaactaagatgaaggatgggttgatggaactggtcactcacaggtcaggtctgaagcccaattcacactcaactaatcacaagtggctgacgttgaggagcagagaggggtgcagctggcacttcctgatctgaggatggctcttagaaccagggaactatccagtctcttaggatgattcagtggacctgagagctttgataatacgtttcaatttggcctatcactgacatttgggtgattctgcaagttctgagccagaagaaaaataaagaatggttgtcaaagttggaatttaaaatggtgggccatttcaacttggcatacttgtccataatgcatatagtaaaaaaaaaaaaaaaagaaaaaaagaaaaaagttattttaatacctggatagtgtattctttccagagcagcttgccattctccaaaccagtgacttgcgttagcctccaatgcttgcaaaacattgatttaaaatgacgtttttcatgttaacacagtatcagtgtggaaggagtaaacttataggccgtttttataatttgagattatcttatttaagtaagaaacttataattatctcatttatcctaggagaaaaaatagcttccccccgccccacccttgtctggttattatgataaattattttgctttaaataagaaaaatgaacgtttatagaaaatatctaaaaggagatagggccaggcacggtggctcacgcctgtaatcccagcactttgggaggccaaggcgggcgaatcacgaggtcaggaggtcgagaccatcctggctaacatggtggaaccccgtctctactaaaaatacaaaaaattagctgggcatggtggcgggtgcctgtagtcccagctactcaggaggctgaggcaggagaatggggtgtacccaggaggcggagcttcctgggtagtgagccaatatcgtgccactgcactccagcctgggcagcagagtgagactccgtctcaaaaaaaaaaaaaaaaaaaaaaagatataaaaggagatgaatctttgggaggccaaggcaggtggatcacttgaggtctggagttccagaccagcctgaccaatatgacgaaaccccgtctctactaaaaatacaaaaattagccgggtgtggtggcatgcgcctgtaatcccagctgcagtgagccaagatcgcgccattgcactccagcttccagcctgggaaattagagcaaaactcggtcacaaaaaaaaaggagataaataatgctccaggaaaaagcaaatagaattactaaagggaagaagaggcaggaaaagaaagaaatttggaaacagactaaaagattcacttgtcctcaagtgaaagatctttcatcaagaaaaatgaagaattatcagaatttagttatataaaacacacagggttaagggaaatgctcatgtttaccaatcctagaacattagaaatactttaaaagaaatactgttgttcatatttatgcatatttgagggtctcagaaccccgaaatgaccttggcagtaaatacaatttaaacaggaaaccaaagatggcaaatacataatatgtatttcactatttccatttatatacccatagcagacattatcaagtgatcaggcggctatttccaactagatggatgcactctgagatccttttcagtagatggcccttaagatgaaatcctcctgctgtctgtgctactcaaagcgtgatctttagaacaccagcatgtgcatgacatgagaacttactcggaaagcagaatctcagccccattctagaccaactgaatctgaatctgtattttagcaagatccccagtgattcttaggcatattaaggtttaagaagttctggagatgcactgaatgcatgatatattcattagggcagaatatctcaagttttagtatgcatcataatcactaggttgaacactgttgaaacacagattgctgggccccatccccagggcttttgattcaataggtctgggtggagctttcaaacaagtttccaggtaatgcttctgcagctccagggaccacactttgagaaccactgcattagggccatgggaatactttggaatatctccctgatctttagaagctgaagattgtgatatctttccacaaatcttggtacactggtcagaactagaattcagggcaggcaaaagagtcccaaggtttatagcataatatttcgtatgtccttatgttcctaaatctaaaagacaatctctccttcttctagcatcattcaatcattcattcagtataaatgttgggtagctattctgtccacagctttatgctccatactgagaagatctaaagaaagttaaaacacagctcctaattccaagatgtttattctctaagatgaaaatgaatgcatgaaacaataaataacaggttaaataatgggagacaatagtacgggaggtggcatcagatggcaaagggcaaagtgttaagtaagtagcatgaatgatgtgtgacttgatttcagagagagggaggataactgaaacagacatagacagggccgtgcatttcagcctaactagagtagaaagttgctacctagaatggctaagaaggtgccttctcatttcttaatgcttcagaggttaagactttgatgtttcctctggtctgagatctttgtcactttgggccactataacaaaaataccataaacaggatggcttaaacaacaaacatttatttcttacagtactagaggctggaagtctgagactaggatgccaacacggtatcagattcttggtaagggccctcttcctggtccacagaagactgccttctgtgtcctcacaaggcagtaagaaagcatctctctcctgtctcttctaataagagtgctaatcctatcatgagggctccactgtcttgaccttattacctcctaaagttccccacctcctaataccatcacactggggattacgggtttaacatgaattccagggggacagagttaatagcatctgagttattctaaatcaatgctatcagcactgaagatcaggctatagggtgggcacaaagtgtcctggaaacaaagaagaaagacaaatagtttataaacagagatgactttgggggaaagcagcagtaatttaacaacagggaaaataaagcccagcttttattggtctcttacattgccaggtacttgtgctaaatgactgccatgcaccaaccatctcatttaatccaaacaacagctcattaggtaaatgtcgtcaagcctccaccttactacatgtgaaaacagaagctttataagcatgcatgtaagcttaaataacttgcccacttctaatccaagcagttctacagggtgggaggctcctcattcataaatcgcgaaggctggcctgcctgatcatctctcagtttccttcttattctcatccactttcagtcagcgaggaaaccacagagcaacccaaacagcgaattcgagtcgaggaacctgttggggccagtgcgtcccaggcgcggacagggaggggctccatgaaacgcagcaaggtttggccagagcctgccggggtcatggagcctctcccggcttcttcaggccactctaattacagagtctgtggtaggttgcgtggaggagctgtctcggggcgggaagcttccctgcgtattgtatttgcctataaatacttcaaatagttaagtgaaatgtgcagcctttgaaaactggagaggaagccgttgggaggccccccgcccagccggcctggaagagcaggcagagaaatggctggcgcgctcttaaagcgggagacgagcttcggccctgcccaagccagatgggggcagcgaggctgcgggcgtgactccggaagactcaaaccgttaaggtgaccggagcaatttgaaaaaggaaacaaacttccctcgagccgtgcccgcgtggctctggggcggacggttgcgttcgaaagggcatttttcaaaagaagggtttcaggaacgcaggggtgtgggccccccgggaggcgcgcggccggggcagtgccgcaaagcggccaccagcccgctttgtactcgcggccaagcgcggccccagagtttcggcggcggccagagtttaggccacaccctctttgcagtgagacccgcggccgctgattggcgcaccgtggaccaatgggcgcgccggggcggccccggctgtcagcgcgcgccgcagcagcgccggcagcagcctgtcctcccctgcgctgagccccgcagccagcgcagccttcccgggaagcgcggcggccgctcccgagcgcagccctgcccggcccgccagccgcgcgtcccggcgcccgcgccccacggccacagccttgcctctatctagctcacggagcatgtgcagacccgcaggcgctaaggtgctctcagtccgggggccttctgggcagcggtgactgtcaccccaagagagacctttcgggggctcttgccgcacctctgctgcgtcgcgggtgacactgcggtgctcgcgagcagggtggcagctgcctctcggtggagacgtcttgggacccttgcgcccttcttctctccttccttcgctgctgtctcctttccttccttggctgctcgctctttctctcgccggctcagacccgtagcctccggaacgggactcgtgggtcgccgccgcctctgtctcttccaaaggggcctcctcacttcggagatgcagtgacaagttaatatgggcgtccaagcctctgtttcccaggaggaaatttgcaagaggcggcagcccctgagcgcccagagctcttgaaaggccacccaggagaggtgtgagacccggcggcagcatccgtccaggtgggacccgctgagcgccgtggccagtcccccattcccatcccggcaccccaaaggcgcgctcgcccgattgcttcgagttccccgacctggggattttttttttagccgctggtggtgggcgcctcgtgggctaaggcccggcgcctgctctgctacccgcgctgcctttagcggtcgcccccgccgccgctgccagggacgtgctgggaaagcccaagccccgggagaagatgccggccatcctggtcgcctccaaaatgaagtcgggactgcccaaacccgtgcacagcgccgcgcccatcctgcacgtgcccccggcccgggcgggcccccagccctgctacctgaagttgggaagcaaggtggaggtgagcaagaccacctatcctagccagatccccctgaaatcgcaggtgctgcaggggctgcaggagccagcgggggaggggctcccgctgcggaagagcggctcggtggaaaacgggttcgatacccaggtgagagatgccgtttgccggggtactgttctggaaggatggatgaatagttctttcgggatggtgtgggagaaagggctggatgggagaagggtctaccatgtggccagggaagggaaccattccccttaggccggcaggttgggggatgcgcgaggagagtgggccggccggtgggtgtggcccgggtgccggaggtttgccttaagagctcttcgagacctgggatggcgggcacgtctgcagcatcttcctggggaggaggaaaggtcgggatgttctcaaaaaacgtgtgcatcgctggaaatgtgaggtcctgcatgttgaggtcttggccccaagaagccagtatccgcagcagcagctgtgtgtctgtctggcggttccgcagagattctgttccggacaaggaatgatctaaggccccattgggttcgacgccccctagcctggctgtaagatccaggaagaaaaggggatcgcgggtggcagtgaacctgctcttcccttggcttgaagatgacctgtccctgccccatcctgcggggtgacgggattccgggcaaggtgctgggactgcggtactagtgcaccagctgaggccggcagctggagactcctagcgccttggctggctgttgcggtgggggtgggggtggaggtggctgcctcagaatggcggccgaagctaagcccctccttcctgggtggtagatcctggtgttggtagcccgagtgacggggcgtggggatgggagatggcttgaagagaattggtgactcctacctttccagacagagcctgcatccagacaagccctggccgtgcaatctcttttacagaaattagcaagggccaatcaggttctcttggtcctccccgctccatttcccccttcttctggtaggagggggctatattttcttggcagtcagtcagcagggacttttggggacaggccgacctgacggatgtgactgtccggttaggagaggcgggaagccagaggggaggtggtttggggctggtgtcaggaaaatggcaacagaccagctgacctttttggcacatacttccctgctgacaccatctccaccttctcctggagctttctctgatcagaggctagagctcaacacgttcctaggctttctgatgcgggaactggagctgaagctaattgtaagcagacttttggaactctgggctggagaaggccctcaaagcagattaagctcccacaccaggctgataagcatgccccttgctgctgcacttgctaaacatttttggaagctgacaggtttgagtgatggtgtgtgggaggaaggcaagatttcctccagtgctccgggggcctgcctctgtgagggttttgtgctctgctcttcttctgttgttacgtacaggatttgtccagtgggctctgccatgggggtgagcaccagggtacacttctgcatggggtttcccttcatccatggacttggggtttatgaggtgtagtgggcagtcggtgggaggtcagtacagtgactcgggactggaggtgacacataccctcgagcctgatgaggagcacccgaggaatgagagggaaagtccatgctgggattgttcatatccaggcagctgttctgcctttgcccgtttgacccttcatttaacaaacattgtcagaggactggcagtgcataggctctggaaaggtgattcatcaccctgtccgtgaaaaaaaatgttcttcagcttctctctgaggggctggaacagtccacttccctcaagactttgcttccctcttttgcccttggtccataatccccccatttcacctctctcgccctcaatgggcccttgtgtactgatggtgaacatagtttggatggactgctaaggaaattggccacttccagtggactaccctgatttttacctgcctgccctcgtttgccagtgcccaggggttctgggggctcttccctgtggcagatccctgtctgcacagctgacatcaaagtgattttggccaatgggattttaccttctttgccagggcttctcccacagtctgcctgatagggtacccattccccctccaaaacagtctcttggttatggcatgaggactgtgtctgactggccatctggtagtttccaggtcccaaatttggtatatattattagaagatactcaggaaacaatgaattaaatggcaaatgctctcttggggcccctgactccccttttattcaggggatttttggcaggagattgggttgtgtagtggctgataacatagcttttaaagtcagatgggtatcgctggtgtcttgcgtctgtcatatactagctaggtgaccaccttgattaatttctttgggctttagtgttctcatctattaaaaaatgagcatgaacaaccattagagttgtgagcattaagaaaaataacgtaaagtgttcagtgcagtgtctggcaaataaggaacacttaataaaagtagctatttatattgctaacctaagagatggggcatgctgaatcaacattaatagcccgtaaatgagaaaagatatggcttattctctcaagcccctggaaaggtatcaatctgttccaaggatctgtagaacatctatcacctttctagtacagtaccaggcagaacgggaagatgagggaagggcatgtccactttctgagtgcctgatgggtgaggctctttacatataatctcatttcatctttacagaaacacttaaatcaggtctgatacatccattttctatgacagtaacaacatggtaacaataataacaatggtaataatggccaaatccttatatatcactttctatgtgccaggaattgttctaaggactttacattaaaaactaattttattcttattacaatcaaatgagataaatgttattatccccattttacacatatgaaaactgaggcaaagaccagtttggtaactttgtgagtagcaaaggtagaattagaactcgggcagtctggcactagatcccatgtctttaaccatgatattgtacagggagaaacacagagactgtcttagaacttgcaggccctgatttataagaccattgctgtaaccattgagctagatgaggcttagcaaggtacagccacttgctctcggtcatccagggtggcagggcagggagtccagcaaggttggtctggctttgaggcctgcggtcttcccactcttcattgctttctttttccatcctgctctggcagatctacgaggcaaataggacatggcctgggccttggggattttataatctagttgggaggcataactgatatacacagggcaacagggcacaacacagggaggcctcagaggcatgcttggggctgggtatccaaggtgctcaaaggaaaggccaagatggctggagaagtccagagagcctctggaggagacagaagatgagctgaattttggagatgggaaggacagactggtggggaggagaggaagtcagaatgaatgtgatagtggagaatgaagagcaaggtcatgcagtggtaccgagcagttgatgttgcttcatgcaacaagtcattgctccagatctgacatcttccctttcaaaaggtgatgaagagaaagaacaaaggctttgcagctgaaggattggatttgcatgttggcttcctggtggatcatcattctgaatgtgcagggtagttgtgagaagatccggagagggtgtccgttaaggacctgattcagattcataacagatcattgggaaatgatggtgattattatttttagcttggggttcagaatattcaacgtggtagttacaggggaaaggaggctattctgacaccttgttttattatgcagcaactttcttcagccagtgacatcccattgcccctaagcctgctcttcatctccatcaagtgtgaaaagacctaacttagccagcaagtagctgttaggtacagccctactgtcacccacccttcctccaggccccttaccttgagtctctcccataaacctacagctggttctcccccacccacccccacccttcccagtgcaggaaactgtgttctgcagcagcagcacacctcccctgaattaccttcctgggactgagatacctgtgccttcccccaagtatgaacatttatagcatctgctctgttaacatgtgaataaattaggaccatgtgcagagagctgttttaaagacacgctctgtgtttgttcagaaactctctctggctgaccttcagataagtaacatgcctgagctatttgaggagacattagcctatttttaagaagcagttgcaaggaaaaaaagaaaaaatatatacatatataaaatattttgatatttcctgtttttagcagctggtgttcaagttgcacctagtttttttaaaaaagtaattagaagtgattgaacttctctgtgggtgttttagatgttgaaaaagaaagcatagaggaggcccctgggaagagagcgcagctctaagcttacaacctgtggcaactttgctccattgtgttttgattagaatccttgctccatcatcaaaggtgattatggatttgattagtgcatttttctgctattgtgttactccctttcttctctttctcagttcttggaggggaatgtatagcatggttatctgccaacatgcaagaatgtttatggttcacatattattgcttactccatgggttaattttctaaagacactttaagggtggtactggtggcttattcagggtaacattacatgtgtatatatctgtatataaatacatctacttctggatatgtgtatatatgcatatatacacacagataacacaaatatatacacatggaacagcttaaagtattgagcacatataagcacacacacacatcaaaggggaggctggaggagttacggcccaaattctagctttcagaatagctaggtttgctttccatttctcattctctcttcctctgtgaccaagatctgaagcaccaaatctgggtcccatattatttacttataagatataagggatgtagccttcagagaggtgttttcatgaggccccagtggaactcttggaaccattctgaaaaagtcaaaccacccagcgagattttggcttaaggtcagaaattcttagttctcagaatccgcctcagcagcagggaagggaacatttatggagcatctgctatgtgccaggtagtctgcggagctctttatatagatattatttaatgtgaggcacaagaagctggataaaatggaaaacggtctgtgcattttttgtgagaaagcagaggccaagggaggttatcacttggaggcagttttacgtggtaaattcgactttattgagaggtcagagtttgcatctaggctttgggcaaattatagaacatccctaaacttcagttttgtcatctttgaagcagaaatggtgatgcttataggttgggggtgagggttcagtgagatattccaggtaggttcctgaacacagtgtatggcacatactaagctaggaatatatagtattgcctatttttgttacctaaggtcagatccaagtttggaaactatgtctgcctcattccaagctcacgttctttccaccctacctctctgcctcccaagtacgcagctgagtacatgaaaagacagacggcttgcaccatgaaagtggagggcatagcagggctttggttagatgaatgggtaaattaagaacaacgtcatccaaagaagtcatatctcgagttgttaattgaaaccttcacaggttggtcccagacatgccatctttataacagtaaccaagctgagggatccgctacaaaccaaacttgtgggaagcttcctttgtacaactagtctgaactggcactgtagaggtggttgagtggagccggccaatctgagggcctagcccaggacaggaccaagaatggaacattttcattgactgggcttcttaatggttcctcattgttctgagggcagaaggaaagcccttttttctcccagcaggcatggttgtaatgagagctggaccttgtgatcagttggccattaaggtgccccaaggcatggccagctgcccaatggtgctttaccaataaccacaggccaaattcaatgactattctgtctcttggtcacatttttcaaagagatggacaatgtgttcctagaatggcttgggcagaatgggccatgtgattttgggaacaaaacttagctaggctttttgtgctttaatctacacaagacaatagtgagtgacacaaagttttttgcaggaacccccattcgcccacacagagccagagaatgactcatggcttagtgccccctttcccagggaatacagatcctctcttgtgttttgcaaacaatgggcccccagcctcagaatattttgcctcttcttccaagtgaaacctcaacaccttcagtgaattttgggttattccaatccttccgttcatcttggtgggacagaggatagggtagaaatggggtcttagtcaagataattgtgatcccactttcagcggtctttggaagactttgaacaaaattagctactcatggcaatgtggcactttaaaaataattataatactagtcacggatatcgattgagcacagcctctgtatcagcataatgcatagcaccagatatgtatcattcatttaatcctcacaacatcccatgaggtagatgctacttcctgaagagaactggaaatgaccactctaggacttagcaactttggttctaattctgtctctttagtcaccttgctacatgaccttcaacaaatcacattttctttctgagcttcagtagcctcacctataaaatggagaagatagtacctgctgtaccttctttgaagttactatgaagattaacacaggtaattattgtgaacaaggcacctgtttaagcatcttacactttaggtagcccttgaggaaaccagggctgacagaggtgaagctacttttccaaggagcacagctggtaggtagacccaaatatttgaacgcttatctgtttgacctttgaagtcaaccttcttaaatagcaagtgtgaaagcactttgaaaaaatatctgaaaaaatgctgttactactgagtctaagtaaatcactttcaaatttcctttagcttggtaatacatatgccatttgactcctccccctgccctagagtttggaaatattgaaaatactctttcaatgttaagtaagtattagttgcttatagttgcttaatcatattggttgaacccttttgggatgtttaaaatttcaagtcctctgaggccacaaggcccactaaacgtcattgttgagtgttaactggccgggctgattctagacagaggaaggagaaaatgaggaatttgattcaaaatcacttgttggcatgaggaagcaatcagataagtttagattatgaatcattatttaagacaacaggccagggatcttcaaaaatgtcagtgtcatgaaagacatgaaaaagttttaaagcaggtgaaggactcttctagaaaagagtaccaaagctatgacaaccaaatccgatgagagattcttgagtagctcctggatgaggaaaaccataaatgctacaaaggtcatttgtgagaaaattggagatatttgattgtagattgtgtattagatagtattattctatccatttcaatggtattggggttatgtaaggaaatgtcctttttcttgggagctatatgctgaaatattagaagggaagtatcttgatgtcagtaagtaacttaactctcaattaggaaaaataaggtgagaacatctgcagaaagaagaaagaaaatgcaaaatgttaacaactggtgaatctaggcaaagatatatgtgcacgtctttcaacttttctgtaggtttgaaatttttaaaaacaaaacaaagtcctgcctgaatagtatttgtcaccgatgcccctgatatttatgagaacataaatgaaataggagtgtgtgtatgtactcacaatagcctggccaaatttgtttcatgaggtttaagttctggactctttatcttctttctggtatagtgtgaaaactttggcttaattccttgttctttcatgagaatggttgctgacattttctggaaataaatcacaagattcagtttcatttggtaatcttttataaaaatctaaggtgtttccaaggttgcaaatacaaaataaattttttaaatgaagtaattttttaaaaaaaatttaaaacctctgactgagccctgctggtctaggcactgagaaggtaaggagtatgattggaagcaagcttttctcttttgcctgactgaatcctcccacactttacccacacaaaatcagtttagtgttacctcctccaggaagccttctgccaccaccatggtcctaatacagtgtatcttctatgtgttccatagcctggccattagcccctcagcttggactgcgattgcttattttgctggaccatgacttccatgaggtcagggctgtgtctctcctgattcctgctggcacaggatctatacataataagtttttagttaatatttgcagaagaaaagaagggtaaggggagataaaagaaagcattggaaaacagtagtaaatagatattgaactcgagctgtggatggatcttgcagaactccctcttaggatgtgaactgagaaggtcatgtgatggtgggtggccaagcgtaggagacagagacacagagtgggcaacctgaacactgtctggagccagcatcaaagctctccaacaccaggtcttagggaaacttgcctggtctggctgagtagagggcggaggcagattcctttgcacaaggctgtttatgatatccaaactctctggctgctgcgatggaagaagagctgtgaggatgtaataatggcactgcagcagactggaggggttgagagggagataacaccatgggctttggcaagtttgggcagattcctgccccccacccccaaccgcccctaccttggatggaggacctgagaagggttctgagggggttttagttggttaggaaagggagaaggtttagaaaagcctaggataggacagagtttccaggaatgatgatcacagcaaccatttatgtgccatttccttacataatctcatttaatcctcaaacgaactttctgagctgatattattgaacttactttaccagtaagaagaaaaataggagacagtgagaggactagccttagaggagttctgggacttttttgggtcacacagctggtatagacagtgtgtggcaggatttgaactgaggtctttctgattcccaaacctgtgcttttaaccactgccttcttttgccagtaattgaaggaggcctgagtcccatatgagctactgctttagataatcaaacctccagaccctcctcttcttggagcctactccctgcttccctggtctcggcccttcttgctgcttccccctcgttggggccttctgtgcctgtgccagcttgttgccagaggctctgtgtttataggatgaggagccctatttggcctttgcccacatcctgctgcaatctgggcaggatctccttgtcctactgctgtggctgctgtcccccaggtgacccccgtgctgccggcccagcagggtccatgtgcctaacagctggcaggaccttgttcctgtcctcctgccacatgctggctgcagctctgcagacagtccccatttcatgctgatttgctttgattcttttcagacctgggagtgactcatgtttacttcaaaatgtgtgggccacaagtgtgccagagctgtcagaccttccggtgtgcaagctttgatcgttagaagacaagccttgaaggaaaaaacctccatttaggtgacaaaaccagatttagaataacctggcttacttgggatatctgcttagtgatctgtgcctttaagtactagagacttaggacatctgagccagaggagacctatgaggccatctgttcccatagctccattgtacagatgaagaaaccatgacccagagaggagtgtgacttgcctccagtcacccagctccaaagagcagagtaaaaaccagaacccaagccttctgactgtggaccagtattttcatctcagttagtaatcagatgttctgctctgaaaggcctgatagcttaaagattggaaccagccctatgctatatattttttcccctccttctaccaagtagttaaaatgagtatctttttttaagagactgggtgtctctctgtcacctaggctggagtggcgtgaccatggctcactgcagccacaaactcctgggctcaagggatcttcctgcctcagcctcccaagtagctggcattacaggtgtgagccaccacacctggcccagaatgagtgttcttaattgcttcatattaggaagcttttgcacttggctcaaagaatcagaaaaatagggcctctttgtggatggtataagtgtggcaataggccaacactgaccacctcccatagtccagacactttacatacattatcccctttaagtctcacaagggcactgggggcatttcatccccattctatgtatgaggctcagaggaggtcagtaacttgaccaagaccacatggagccagtactgggactgtctaatttcaagtccatgttctttctacccagcctcttagacccttgctagctggaagccagagagacctgggttaagttcctacttccccatttatttacgaggaatctcaccttcctaatgctagggcgaggcctggggcacagtaggcacttaagaaatagttgttgaactgcagcttggacaggtctgccctgtcaagcctcaatttccctgggtggttatagcatttcaacacattgtgcaagctaaagcagttcatgtatgtaaaagtgtgaggcagataagatcactgttatttactgagcacttactatgtgcttgatattctcagcattttatgtggattttcccatttaattgccataaaagcagtaaacactgagatggatacttttgtgattgtttccattgtacagatgagctggggcaggtaaagcataagcaacttgcccaaggtcacacacccagtgagtggaggcgccaggtctgaatctcaggcagtgactacagagcttgcctccttccccacagcatggtcctccctcagtgctgccgcccactaaacccaagtctagttgagggtggggaagagagacacatgcaactgaggacacagaaagggaaagcaacttgtttaaggtcccccagcaagtgagaggtcataaaacccagcaaagacttgctgtctaaagtaacacggggccttggtctttcaaaagtattccctctctaatggagaaggacacgatgtcctggaaagtactcctaaactagagacggtcaccaggaatcccgactgcctggtggactccatggctttcctctttggtccttgcctctcactcatttggaatcattccttctctggattgcagagcagaaaccaatataaatttgacccagtctctagaaatgtttacctggctaaaaatatgccagctttgtcatatttttagccacatttagatttgaagtatatgaattgcccacacccatgtattaggcatgaactgttggtacattttgtaacaggacctgctagttttccattccaaagaactggaattcagtcagaaatttgtcatttgcaaataccaactctcgctacattccattgctgtttttaagagtgtctcgtcacctggattgtgaggaagcaggccatgggcgaggccaggctggctgggctgccttggtgcattccccaggtctggtggcttctaatcgacctctgcctggctctgccgaggccctcgccgttctgcggtgtgttgcctttggattagcataagggcagacagggtgcttattttagaactggaaggagaggagatatatcaataaaagaaatgggaaaggaaaaatcccttcagtggtttaaaaatatctcttccttaacaggctagattatttcatttcttaaaaacaactagtaattttctcctctgaaacagcattggaaagagaggcgtgtcagactaaaaaaggaggggctgaaatggtggcctgtagttttcactcccctgtcctgttcctataggataggttattttccccagtctcccaaagccttcctattgactctggaaccttagaactatatcacaaagactctgttttcttaccccttcattttgaagatgaggatgccacgcctcagggcctttgcacttgctgctcttcctgcatggaatgtcttccccagataccaacagcactcactccctcagctccagttctttgctttgatgttaccttatcagagaggtgcctttcctgagtttagaactgactgtgagctgcccacagtagaatgtgggaatcagggttgccaacaggcacgattccactttgttttcagattttcttttttatttttcttttctgcccactttttgtgatctaaacacttgctaacaaaagtatggtctgtggcctggttgtaatggcatcacctggaagcttgttagaaatgcagaatcccaggccttgccccagacctgctgaatcaacatctgtattttaataagatcccggatgacatatacagaaatgaaagtttaagaaacagaagagcatttatgccctcaaccccttcagaagaagaatctaagagaaaccccatcccacaaagtactgtcgccacctctgtctggaggcacaggcccaactgcctcaaataaccccctatggttgaagatgggagggatggatggagtcaccctagaagaggacctcataagacagacttccgaaatccatagctactctgtttcttacatctctcatgttgcttagggtaattcacctgtacactgggctttgtagctaatgtttggtcaccatgaccagagactgttatctacttggtagctgcagagggaagggaaacccagtcttcaacctgggagtgcagcagtaattagagggccttgactccccactctgccaggtgtgcctgggctggttgagatagcacctttcaggagctggaggtagttccatccagcccgtctcacaaatggctgtgaatgcctctctagatccttcagcaaagacaggtcagctattcccacagtctgaatagaaaccaactcccacagtcctttgctgtttggaaatcttccagttcttgagtcccccaaatcacattgcatcattctagcatgtggttatgtaggaggcaggatgcttcccagggcaccagtgggaggggctcactccctctccattgccttgtctaatgctcagggaagccctctcaatgggcaggtgctgtgcaaatctaatctgcctgtggaggcatttctttcaatcaccctgcaattgtgcattgatttggggaaagcccattgataagagtagagcagaataactgagctcctgaattaggctgcttgatgaaattattgtctaatgctgatgttggagcctttttcccttgttctgtgtaaatcagggctattttaaagctgtcacatgatcactgatgccatagaaactgcctgaccttgtgcacacctgtgtctcagtcaggcatggaccaccacaggtggaggaagaggacttagtgacagaggtgtagcttcactccagagtctgcacgaggaaggaaggtagtagaggatgctgtggagcactttttggtttctcctagctttgtccagctctcctagctttgtctcatttaaccccattgaaaccacctggaggaatgactactccagccactctggagtccagacctggtcctgagcagggacagggaagctgtcctatgactgagagatgatgttttggcaccaagaaggtttctgtgtgtgtgcatgcatgtgtttgtgtttgcatgcacatgcgtcgagatgctccttgagaggttgtagaaagtccactttggccactggcatcaccatagcatatgagacagtatggtgagcctgaaagagcactgttcttagagtcaaaaacattaagttctctttctagaccctcatttagcaagcttcatgactctgggcgcatattcagtggttcttcaccagccgtgtgtagaattgtccaaataatccaccagccctgatgtctcccatagattcaggcctggagtggcactttggcatctgtatttcttagggctctgcaggagattctgatgcacaccctggggtgagatctgaatttgagactagccccctcagagaagtcaggatagtgaagtggaaaagagcgagtggtcattgccacacagaccagggtttggatttcagctctgtccacgtacagcagcatggtcttaggcaagctgctaaaccctgcctctgcttcctcatctgcaccacaggcaccatagcaatgacctcacagggctgctctcagcactaaatgcgatcatgtggatgaggcatgtggcaaatgcctggcatgtgagtacaccgtaaatgttacatcttgggtgtgagtatgtctgtgtgtgttttctgctgtactgttatatatggatagaatcctctcaagaaaagtccaaggcagaactcaatcaagaaatgagatggcagtgctctattatattagtgtaatttggtaataaggaaaccaattaattcattctttgttattaatagcaaggaacgtatgcagagaaaggtcctatggggcaagagagagatgccaagagtgcaccccttccttcatgacagtagttcttaaacttcaatgtactcaggattacccagggagcttgttaagtgtgcagaatcatgggccagagcatcagagagtctgattttgcagatctggggtgaggtccaagaattcatatctttgaaaaatatgaccaagtgagtgtgcataagatggtctgtagccttcactctgacaaagactggtctagattagaagatgaaattggaagactgagggaaggagggaactgggtgacttggagcaagcaggaatgggatcctagaagatgggagaggagctgaggtttgaatgcatgcaagatcccgagaaaacagggaagcatactttggatttggtctgatgaacagacggtggagagctctggtggacaggaagctctggctcttctccctgctgccattggcaggagatgccaggttgggtaggcatcacactgggaatgtcagccactaggaagggtttactgagaatcctggtgaaatataatgaacccaaggcatgtgtctctttgtcctctctttaaggcccaagatggctggctttaagttgcctaactgtgcccatagagttgagcttctttttatctatttccttattcagaaatgagggcttgaagcagcctgcagtggtagacctggaagtataaagtagatttgtgatgctcagggcaccagagtgggctagcagaaagggcaccagagatgataggagatgttgagtgccatttctccttattaggggctgtgttggctgagaggggccacagctgaatctcaggtctgcaggggacccatgttccatgataaagtctgaaccaagacatccctgtaacagtggcctttggatctgcaacctataggagagcaaattttggggggtcttcactggatcaggaagagctacaaataagaatggagaggggaaggggttgtgtactcagcacttactatgtgccaggctccacattccatgcttacatgatgtttgtaatctagcctccaccttaggaggtagatagctctagttttacagatgaagaaagagatgcccagagaggtgaagcaactcacagctttacacagccaggatttggtaaagcctgggcttgaacttgcatctatctggtttctgtcatgaatcttccacagttctatggtgaatgtgttggggaccttgattcttggtcctcaggtgcaagtgcctcggaagcccagttcccctcggcagggtcgggggttcagtgtgggcagagtgccctggagtcctgtgacttgtggggcatttctgtgccctctgtcaacaatccagccttcagtaacgttgtgctgctgccggctgctttcaccacatccagaccccccacccacacaggcgaaggttttggccaagggcaccctggagggggaggaaaaagtgccttccagaggggcttgttgcaaagcccctgaatggacccattgaggctccagggcaggatgacaatgggcctgttggggccctcggtctgctgaggtgacagggctggggccgggcaggcagtgcagtgctggctcagaggccagacgctgacttccagggctgggagccagcgcttctgacgtgctccgaaatgccagctttgcttaatggggagcagctggggtgggctccgcataactccctatgccaggaaggcagcgtgaacccagttcctcaggctacagccgctcttttcctcctcccggcctggcactgctcccccttcctgagccaggccttgctcaccggacaccaggatcatagtcagctccttctagtgtccccttggtcctcaggggcattcttttcagcctgattggataaataacaccccttccccaatagtctagcctgcctacaggtgcagctgccagctaacatgcagcatgcccagtgaaatttgaattttaaataaatgatgaaaaaattttaattatatttaaatatgtaataaatgacaaagcctgaaccaagatatgagttcattttgtgggtcatgggacacacttaaaccaaaaaattatttgctgtttatctgaaattcagatttaactgggcatcctctatttttatgtgctagatctgatgaccctacccaaggcagccatgatggatacccatgtggggttactaggacttagttaggttttcctttatgccaccaaggtgggggatagggagaaggaggcctctctgtgcccaccctccacctcccatttcctgtacataaaatgctggatgccacacttagtaggtcttactcacaggcaagcattgcccccagtgttacccacaccaccctcccttctaggagctgcagctttctccctggctcccacagtgggaagggaagctttgggatacaattgcagttggtgactatttactgagcacctgcctatcacactgggctgaaccctggcaatttaatgagaatgagacagatgtaggctttgctctcaaaagagcttacaggctagtaggggagagaggcatttgaacaaaagagcaactataattcagtgaaccataaacactgtgggtaggtggcaggggttgttggggggatagttattgagggaggtatctcagaaattccaggagagcatctcactcgcacctgtaggaccaggatagaggtcttagagtcaggagatttgagatgaaatcctgggccacgtcattgagttgagtagctatgtgggcatgggccgatcatttaacctcttgagccttgattttccttatctagaaagtgggaacaattttccttgctttagggaccaatgtgagtttccaagtaaaatgattaatgtgaacatgtattgctaactgcagggtcctagatcaaacaaatgtgtgtgtttgtgtgtatgtgtgaagtcagaggtaggagttgaaggatagggaaaatacagaggggttaggaatgcttgggccccatccctgctctgtggcttgtacagtattttgctgtttgcaaaggataatgattaagagtatgggctgggaggctgaggtgagtagatcacctgaggtcaggagtttgagaccagcctggccaacatggcaaaaccccatctctactaaacaaaaatacaaaaattaaccaggcatggtggcgcgcacttgtagtcagtctccctgctactcgggaggctgaggcaggagaatcgcttgaacccaggaggcggaggttgcagtgagacgaaatcatgccactgtactccagcctgggtgacagagtgagactccgtctcaagaaaaaaaaaaaaagagtatgggctggaaattcaaacaggcctgggtttcagcgccatctctactgtgtgacctcaagtaagtacctaatctctttgtgccttagttttctcccctgtaaaatggagcctcacaggcatggttaaaaggatgaaaagtagaccattcatataaagtgcttagcatggagtctgtcacatagcaagtgcccagaagtgggcagctattaagagggtcttagttgagtagcataacaaccttgtgaggtagaaattatcaggtggagaatgaagttcagagaggttaggtaaccagcccaaggaggcatagccagagaggcgcctctgggagaatatacccctggcttcttaggaggcctttggtcacccagccttcaaggaactctgcttctagcttttggttggacaattccctggggactagctggactctgggattccttgcccagttatggtctggttcagatacctgggtgtttcctggagatctcagcatgcctgtgtgtgccaggcctaccctgcccagcctctgcagggtcagggagaaagagcatcctttaggaatctgatgacttacgtgcctcacaccaactattcttcctttgctggatttgaagtctgagatatgggcctcatttttattatcttattcctttgtgttaatcaatgcctgcacaattatgcagttggcatggatgctagttttattgtcttgaacacaaaagcagctttgaaaatgtggtatttctagggagcggctgggggtgagcctctcactggagaaggcaaactttagccaatcatttccccctccaatgggaacagaagcaggtggattaaactgctccattaggcgatcttttgtttctaatagaataatcatcaacaacccttgatggttgaaggtcagggaagggagctagacctggctgagcatttgctgtgtgctcagctctgtgttggagcttctttcacatcaagttcagttgtctctatcactctgtgtttatgtcttagacccatttttcaaatgagtaagatgagatagagaagttgactgatttgatctaggtcacatggctggtaaatgatagctccaggttttgagctcaagtctgttcagttctggagtccataccttactatcacccatgtgcctaggtctatgtgctttacgggagaccgaaacagtggaaggcatgtgcttgccttcaggttctgctaagaacccaagatgcttcacttaccgcacaacgggttttaaggcacctgcaccgttagttcctgacttgataacatgggactgagacttccaggggaaatggggtaggagctggtttctgatttcacatttacttaaaggagagaaaggatttagatatatggggagaggaaagagggtttttcaaggacagaaagctatcatgggattccaagtaggggaaggcgggctgaaaatagtgtataagagattcatatcaggacatggaaaaggatgaagactggaggcctacctggagactgttggtaatcctggtactgctactgatgatggtaatgggaggctgatggtggtagttgtgatagtgatagtgatggtgatggttaacgtgtattgaatgcttaatatttgccagatactagtctaagaattttacaagcatgaacttgtttaatgctcacaacaatcttataggaaaggtactgtaattagccccatttttagttgaggaaatggaggcatagagaggcataagggtctgaaatagtggtggactttgaggctggagaataacaagcagatgtaagagccattgaaggaagaactagggcagaatctggtgaccatgtcgagaaagggataaaggaataggagagtctacaatgaattcaaggtaacctattgatcttttataggagccaacttcctggtggtagttattggtgaagttatgacctgactaggaaagacaagctttcaatttactaaatgcctttattaaaatggaaatgtgatatttgagaggatgaatatgatgacccattgccagacatagacatcttaacatgagtgaggtcatcagcttcagtgcaaggggaattgcttaagtgaagggacactggatgggttagttttgagaaggcctgtgccagccaattccttccttcagggtgtgctatcctaaacataaccacccagggtctcttttcctacaaccgcttccccttccttcctattcaccctcaatctgatgtaaagcagttcatgctcaagcattcgttgccaacactggattaagatctccctccttccaggtcatacattggcattttaacagagacttttagaaacttggctaatgaaggtggggatgtgagtgatcctggggttaggaagggatgggaaaagttcatgcatccctcccctaactcccaacagacatacaatggaaagggctggggtctcaacttaggcttcacaccagcagtgcctggactccaagtttctagacccagattcccaaaaaagtcatgaaacacattctcttagccaagtatgccatggagggctgggtcaagcctatgagcctccactcaggctggcagtgaaaagcagccctgggccctccagcccacctaggtagcatgtagttattacaagcatggactctccagacagccaagctagagttggagccaagcctcagatttgtttgctgtgtgaccttaaacaagtcatttcatttctcgactcttagttttctcatttgtaaatgaggataatagtgttgagaggagtaaatcagagaaggtctgtaaggtgctgagcccaggacatatcacatagtaggtactcactaaatataagctgcagttgtcgtgccaggcccactgtgaacaactccagaagacataaagcttctccatgggctttgggtgaagcctgggaccaggcagctaggtgttcccagttgcaggatggcagtgagcttagcacgggcccctgctcacgctccctggctctctctgccagaaaaatgggtggtactagagagtctgcatttccctgcgagcagctttcttcccttggcatcctaggcagggcctttgtacaattccttttcagcccccaaagatctatatcagaggtaatagtagttccaactgatacttacagagcacctactatgttccaggcactggattcattaatcctcccaatctttctgtgaaatcagcactattattcaccctgttttacatgggatgaaatgcaggcacagcaaggccttgcttagagcaagtcacttgctaagaattatatagctaaatcagagccacaacttgaactccattctgaaccaaggagtttgaaaccattcctcctgcatgatgcatgaaattttaataacctgccgacagcccaggaggtttgcagtttctctgagcccaagggaccagagccatctggtgggtgctttttcaagggagctggtgtgactgtttcagggtaaaatgcagagaaatagcatcactttttttttccccgtggtaaaaataacatgcaaggatgggaagaacaaatggaggttgggaggctgacattgcggggaggaaggagctagaatgctgggggctgtctacctggtgccatgtgctgccatctgcccagtatgggggcaacatcagcctgacctgccagcacctgcctggctaccagtatcagctttcaggaataaaaagatctttttcaaaaagcctttgttccccagggaagctcaaggggcagagtgaggtccgtggagggttgtgacagttcaaaacatgctgtccatttatagtatgcagcagtgaccctatatctcaccctctctatagcaactagctccagacacaaactgggcatggcttttgatcatgaagcatgtttttacaaacaaaaaaatactgaaagtagtatgtgaggctgagattatgttaatttatgcagtttccactgctgctaggattaaaaatagctttctttcaagaaaactagaactacgcactgtcagtatgccttctaggccctcttgttgggctccaggactggtgggccagacacaggacatggattatgagatcctccttggcagtcccaggttctggagctttgctgaagtggaagataaagacactttatcttccagtggtaaggactcttacaaagtctttactgcatgtttcataaaactggatatgctgagctctaatgaaagctgttgtcagcattaaatacccagggaaaggcatggaggcctttaaaaaactgccacaatgctcctgcactgaagtgctcacattttgctccatatgtgagagggaggggaatttggccagtgtcatccacctcataaaaggcaaacccaggatttaaactcaggtctggtgcctccaaagcccaggaactcatgacatctcttcccccaactctgctgttctacatgttgattatggctacctgtggtgctcattttaatcagatttcatcaatataaacattagtggtggggtcttcctttagagttagtatagccacaaccacctcccctaggttatgcaggacacctggcaaaccttttctgaggggcccctaccaggggaaaaaaaaacttattgccaaacattaatatgccagccccattttggcgggccggtctcacacaatctcatgaaagaactgtagtgccagccaggaggggcagtcctcttgctctcctagaattggctgctagccgtagagcccaaggcaacaccactggggtaattcctgaagatccttgggacatctggttgacaccataagtggacagaagtttagagactgctctgaagggacagctgaggacagggactcctgtggttctgggtcagagcaaggaacagcctggtcaatcccagccactggaaagagacttagagaatttcaaagagagcatggaaaccagaaaatatgagtgaaagggaagggagtgaatctacatattatacaccgtctatataccagttacagtgctatgcatcgtggggagttacagggtgcacaagaaggacagaacccatactttcacggatcttacagcctggttgggagaataggcattataattacatcatggcagggagaagggatggggaagaggagatggggaaagggcccagctgtcaaatagataattccaaggcagagtaatatggtagaaggtggtataacctggcaattgcaatcacagacttgggatcaaagagactggatccaagaaccatccttgctcctttccagttccatgtccctatgcaaggcatttatttatactctgagctcagtttcctcatctgaaaaatggagataagagttcttacccgacagggtgcttgagagggttaagtgaaatagtgcatggaaggcacttagcaggaggtctgacatgcatatcgtgcccagtgaatggtggctattactagttattatctgatttctgagacctgagcagatccaacgcagctgatccgagtaggggagctgagataagtaggtgctctgacagcccaagccatggctgatggtgaaaccactgacaatctgacagcaaaggaagaggggaccaaaaaatctactgtctcagcagctcttagagcaattagtggtggttatgatgtgaatttctgtttgatgtcctcgtctttttgagaagatgtgagtgtataatgtacaacttcatgaatgaaaaggtaaaataaaattttgagtgctttgaacaggaagattatctggaaaattcactgactggggaggcctccttccctgacatggcatgcagaaagagctgtcttgggcttatggagaggttgacacctccagaaccatctgctctgcagagagttccctcagggggccagtgacatgccccagagtcgggtccctttcctccctcagtgccagctatgctttccctgccacatggcaacagcccaggcagggcaggggcctctagacacatgtctgctgaagacccagcaggagcctgtcagccttgcccaggccggatttccagttctgtagatgtagatcataaatgtgggtgacagatgtgggagagacacatccaggagatgaaaagatatctccatctgcttggttctggagaaaatacggagaccataagtggatggtggcttttcctaatggggaactgtggctgagttttcctggggcgaagcagtatttacaaccaacccagaccccgcccccagtatcctgacaccaggtttggctgatcaagttggtagagggggcttgtttgctaggggatactggggagaatggttcctggccattgtgaggagagctcagtctctgtcctgtaaaggaaaccacacaggttttagtgtttgggctttgtgaaggctctttaaaggtgttttaatgacagcagagatgaaaggtaaggcttctgctgctctgatgtgtgactgtctgtccaagctgcccacagcagtgcagagttgtgtgctggagctcagaacctcccttggagctcagtaaattagcttctgtcccctggttcacgtattggtacctgctgggagaagaggcagaagctggagaaaacacacaactaatattagatggaaaaatggaattagaaacatatacaaatcactagcctgggcaacatggtgaaacgccatcactacaaaaaatacaaaaattagctgggcatagtggcacacgcctgtggtctcagctactcagcaggctaaggtgggaggatcacttgagcccagggagtttgaggctgcagtgaaccacgattgtgccactgggcttcagtctgggtgacagagtgagaccctctgtcaaaaaaagaaaagaagatacatagacaactcttacacacttcccttgtaatcctcccaacttggtcagtaaaatttaaaatcatttattgaacattcatatatactagattctgtgttactctcttcatattctcagttaatcatcgtagcaacctagagcattctcattttatttgcattttaatgatgagaaatgagtaaagagagggctagatgcccaaggtcacacaggaaatgacagagcagagatgtaaactcaggtctgtcccccttaattgttacttcagaggtcacgctggggaccctgaatccccctgttttcagggtcagtagcgaatttttaagctgaggggtgtagctgatggccctcagactgaatcaggtctgtggagacatttgcttatctggcacattggtttagaaaatttttaaaaatgattttagagagtgttctctgttagccacagtatccaccatgctcatatgtcttatacctggtcagcttcttggcccctatgggaatttgagtttataatccctagctaaacctctcttttgctggagtcagtgatggaaacagaggagactggtagtgtcctaaggaaaaaatgctttattttgccctctgaagaaggaagcagcggctggcagctccagacttcggccaagctggatggaggaacttctaagagggccctggtgtttgcttttaggctcagaacccagctttcatgaatttaaatttcacagtagatctgaagaggacagtggaggggaaactgtattatcctctccttggagagggaaaggaaggttctccctgtttattcgtactccgagcaggctccccctggagggcagccactgggagcttgatggggaatcctttgtactgcgcactttggaggcatctactagaaacaaagtaccctgtgacatgctggaagggatctccggacagtaaaacatacaaggaacagacccagggcaaactgtacttattcatgatgggccctgaagtgtgaaggggtttattcaaaagaagtaggtaggtggcattccaggtaaaggggacattgtgggcaaagacatggggatgaaacgtgtgctgtgtcaactcagggttaaatggattaagggcagtgcaagatgtgctttgttaaacagatgcttgaaggcagcatgctccttaagagtcatcaccactccctaatctcaagtacccagggacacaaacactgccgaaggccacagggacctctgcctaggaaaacagagacctttgttcacgtgtttatctgctgaccttctctccactattatcctgtgaccctgccacatccccctctctgagaaacacccaagaatgatcaataaatactaaaaaaaaataaaaataaaaataaaaagaacacaggagacatattcaggcaaggagatttactgatattttgcagaggggaagagtacaatgggggaattgaactagaaacaatacttcctttggtagcccagtcagcaataatagcaaacatttattgagtgcttactgtatctcgggcatgttatcagcatgtgacatatattgttttctccagtcctcacaaaaagcctataaggtagacactattactattgttatcatctacatttgcagatgaggaagctgatgcaaagagctcacagccacattccagatcacccagctagtaacccaggtattatggtcttagagcccaagagcccacactcctaacctcttcttcctgctgcttccaatagcagccaacagtctgggtgacttatcagtagaagggatgtgagattgtagcaagagatcaagtgagaggagtttagatcctgcaatggcaccattttcaaagatgggaatgtaaccttttctgacatcaaggctgtctcctaaatggccttagcctcccccttacagattttattttttaatttttaattgtataaatttaagatgtacaatctgttttcatatacttgtacatagtgaaatgattactacagggaagcaatttcatatgtccatcatctcatataagtatctttatgtgtgtggtaagagtacttaaaacctactctcttagaaaattttcagcatacaatataatattaactatagtcctcatgctgcactttagatctctagatttatttatcccacagaacttcaactttgtcccctttgttctatatctccccattctttcccccacttccctcccccacttcaggtaacaactgttctactctctgcttctatgagcctggctttctttctttctttcttttttttttttttttaaagattccacatataagagagatcatgcggtatttttctttctgtgtctgggcttatttcacttagcctaatgtcctgcagtttcatccatgttgatgcaaatggcatgatttccttctttgtaaaagttgaataatatttcattgtgtatgtatgtatcatgtgtgtgtgtgtatatatatatatatatatatatatatatatatatatatatcacaatttatttatccatttatccgttgatagacatttatgttgtttccatatcttagcaattgcaaataatgctgcaacaaataggggagtgcagatatgtctatgaggtgctgacttcattccctttgggtatatacccagaagggggattgctgggtcatacggcatttccacttttaatttcttgaggaacctccatgctatttttcataatgcctgctttcccaaaaacagtgttcaggggttaccttttctccacatccttgccaacacttgttatcttttgactttttttggatgatagccatcctaacaggtgtaaggtaatatctgcatctcactatagttttcatttgccttttcctgatgattagtgatgttgagcaccttgtcatacacctgttctccccttcacccctcctgagccccttatactccagcccaaccaaacatttttggaagaccatggactcagcagtcatcgggacttggggtcaaatactggctctaccacttcctacctcctgtaactttgggctagttacttaacctctttcagtctcaatttcctcatctgtaaaacaagggtgataaaagtacttgcctcatacattctttgtgagaattaaagaagacaagtgcaaggcacttaacacagagtctggcacatagttagtgcccaataaacagctactttaaggccagaataaatttcacacatggtcatcatctagctctgggattggcaagggtgtgggtgtggtttgcaaggaagactcatggactgcctgctacccactacgtgaggcgctccaggtaagagctggtggctggcagttcatgcctccttgttctgcttggtgcctatgtggatgaggcactggttccagggaggttacagggctggttcccctgtaccagggcacagcctggtatcagctctgcccatctctagatagtgggagcaggaatccttcagtcctgatgcacagatgggcaggaaatctaaaagccacctctgcccttgtccaagccagtccacatgtggattagaagctgcagctctgcactgctgtacctggaaggcacagacaggcagacaggcccatgttcctgtccactttggtggctgtcctggcaagctgtggctactattgccacctggtggcgtttcacagcaacacatgcatggagacttctgtagtgtcttattaaagatgtcaaagtttgtagcatcctgggaattgaaggtccacttctacctgctcacagtgcggaaggcaaaaccaagattagagaaggaagaacagtggggtttaggagaaagagcactgtgagagttgtgtagccttggttcaaattctactccccctatttgggattttggacaaatgacaacctatgtgaacttgtttcttatctaaaatgtggtggagatcctcaacatttactcataaggccactgtgaggctcctatgaagggctttataaactgcaaaggaccctacaggtggagaggtggtggttatagctgttgcagctccaaagtgaggccagtacttctgaacttgggagtcaggggtctggcctagcataaccaaccactacccaagcctagcaacaagacagatggcagaaggaatggatatgagctactccctctttgctggcccaggatatctccagggtgggtgaagcactggggtcttccacccgtgctgtgagttcctggtgctttctccctcctgggtcttgcctgcagtctgctcacacaagtgtagcttcaggtgggaatgcctagtgcctgcagttgtcagttctaggcatgaggagcttgtgtctgggtttccccaaaggacaacattctgggtctcaatgaaggacaagatgcagaattccaaggcgaggccacaaaaaagtgctgggcttagcctagagctacctctccagccccaggaatgtgacggtatctggacctggacacaaagcattagctcatcccttctgatgatagacaaagagcctagtgctcagagttgggcagtcatcccggcagcttctcactgtcctgcccaggcagctgtctggactggtccagcccaaagagcctggagtgtctacttaccccactggcatggaaggtttgggtcaggccagggtcatcccaatcctcaggccctaatgctaagcccatctcacaggtactcggaggaggagtcctatttgggttgtagtatgcttcccctccactggcctcagatacagttggtttactgagcacctaatatgtgttagataaggtacaagatgttttcacagagattatctcatctcttcctcaaagaagccctggaagtgtggtgtgattgttcccatattacagatgaagaaactgaggcttacagaggttcagtcacttagtgaagtgggagcttggttttaaacccatacttctgcctctagggcttgcctttgtgtagtttaagagtgaaagactttccagaaagagacctggagtgaaggcctatcctagggatgagttgcaggccttcactgtgcagagtagaggatgccaatggcacactttgccagagacccattgaaacactccccagtgccagctgttggctgtcactccttccatctccctgtcctaaatacctccagaaggtttagttctgacaccactcatgtggggcccatttagagagacagtgagttagggaacatggctgaggatggaggaaggagcaccactaattgtggtaaacccataattagttctctgcttatggcttcaatcagtacttttaatttaaaaggtaatatctgtggattttttttttaaagatttgtgacatgggtataaaaggaatagaaaacactcatgttttctccaaccaacctcaccccactgtctcagaaatcacctctatgaacagtttcttgtgcatcattccagaaaatttgtacaaaaacaagtatattcaaatacatctatcctttctttactccagttggaatttcaccatcctcaccatcctacagaggtcttctttcatgcatcatcatctcttaggcatctcctgacatagatgtcaaatgccttctcttaactctgcactgtagactattatatggccattgtcctcctggtaggcattttggttatcctgattttttgccgtcatgaacaatgtgctgattacacctctatttttgcacagtttcccatataggactgtaagataggtggactcctgaaagcataattattggatcaaagtacatgctttttagattttactaaatattccctatcgctctctagcagggttgtactgtcaccagcactaggagtagaaatgatctccacatggaagatgagtccagtagtcatgtgggacagttgctgagaagacatgatttcagaggcacccagaaactgctcatgatcctgtccccctcaggaatctcccctttccgcctgtcatggtgtctggaattctcattcattccttgacctgtggcattgtctccagaaagctcaggtgtttattttatgactgcatttgcaaaagacaaatataatccaggctaaattgtatccatttcatccttctggtttaaaaaacaaattacaacatttccttgggcccctaaaactatcttggctcctaagcattgtgcctactctgcctaatgggtaagttggccctcgattttgtccccagagtagccctccacacacctgcttccctacatgttgtcaccattcctgcccctggcttttgacactggaaaggtgtaaaatacaatctttcttgggggtagccggctatcacagaaagcggtggtccccagcctttctggcaccaaagacccagttttgtggaagacaatttttccatggacagagatgcaggatatggtttcgggatgaaacttttgcacctcagatcatcaggcattagattctcataaggagtgtgcaacctagatccctcgcatgtgcagttcacaatcgggttcacgctcctgtgagaatctaatgccaccactgatctgacaggcagagctcaggtggtaatgctcactcgcccaccactcacctcctgctgtgcagcccagttcctaacaggccatacaatggtacttgtccatggttcaaggtctggggacccctgacataaagcactgggcaacatttggatgggatcagggctgaccgtatttactaacaactgcagaatcctgcagtttccaaagcatttttatcaacatgattttcttaaaatattatgcccattttacagattagggaaatgaagacactaaaacagagaagagaagtgatttgtccaaaacacaaagctagtaagaaatagaatcatagggtcaggtcaaatgcagcctcggcccacttcacagcttccagcacagttaggttctgctggatctcatgatatatctttgtccctgaacatctcatatgtgtggcattgcagaagacatgctgacagtgtcacatcctgacaggtgcacaagtggagctcaacatatttgggtggcatatggaagctaattgcagccgtggttcccaaatctctccccaagtaactgacttcagtatgcgtttgtatgtttttttttaactagagtaaatttgattgtcacacatgcctccaatcttattttaatgtaagtagagcatgattggaaattcagaattagactgcccagcattaattacctctcaactacactttttatttatggagcatgtttactgtcattaatgaggagaacgctagaagggcatggaaggaggattgatcaaaagaaggtggattgaataagtagttatggatagggcaatttgaaatggatttattcctttttaatttaaattgtatctgatttctgcattctgattcttctaacccctttgccacatgcccccatgttctctttttgaatcttgctctcattcacctcgtattgccccatccacagtgttaataagataatgtccaggatgccccctaaaattggtactcctgattgcaaggggctgcaagattctctcatcatgtctgtcccggcttaaaaaaaaacatgaagattatcactgtctaccttttattgaacactctttttttaattttattattactatactttaaattttagggtacatgtgcacaacgtgcaggttagttacatatgtatacatgtgccatgttggtgtgctgcacccattaactcatcatttagcattaggtatatctcctaatatctatccctctcccctccccccaccccacaacagtccccagtgtgtgacattccccttcctgtgtccatgtgttctcattgttcaattcccacctatgagtgagaacatgcggtatttggttttttgtccttgcgatagtttgctgagaatgatggtttccagtttcatccatgtccctataaaggacacgaactcatcattttttatggctgcatagtattccatggtgtatatgtgccacattttcttaatccagtctatcattgttggacatttatgttgtgaacactcattatgtctcaagtactttctcaccactcattattttacctcctaataacactattaggaggagtaggaataattatacctaatatatagctgtgaaacctgaggcttagagaggttgaatcagtagtttgaagtcacacagcagatataggagtcaaattcattacacattgtcaacactgactatgccattctcacacaggacagtagtcagaaagggctgaatgaagcatatcgccaagcaaccaggagtggaagggatctaggactagggctgagtctcaatgcttggaccactcagcattcaatttgcccttgcaggggaggcaaatctgcttttgtcccattcctggcgtcctctgctccccctgactatctttaggcagtagcattgatctggtttcaagctattttggtttttcaaactaaaaactaagctgagttgggctacactatttacttaatgctttcccttggcagttatttcccttccaggaaagagctactgtgtgtcattttctctcctgacagtgatcccttctggaaaccaggagcttccggcccaggtagagacctggaagacttggccaggctgctaggcctctgtctgctgcccctggggagcctgctaaccaagtagggagatggtttgcagcccaggaaaccctgagcacatgggcagttgagcatggcattagtgggatatgctgggcatgtagtgagaccttgtccaggctttgtggggaaggctctgatgtcaaacgaggcagctctgaggctgtgggcagtgctgaccagtggactggtggaggcagagagattggatttccttcaaagcaagtcacagtcaattctcccagcttgttcagaggcccttatagatgcctgcatgtgccctgggattttcacatcccaggagacagtgaggcagacctgtttacccacattttacaaattaggtaaccaaggattgcagagttcaattaagccactcttatttatcaagcatcttactgtgatgtgaaggcacaagagacctggaccccacctccaaggagtatgagagagggaaaaagaaatgtagccaggccactggaagtgtcacaatctaggctggatttgaatcctccctctgctacttctcactatttaatcttttttgaatctcattttccttacctgtaaactagttataatacatacaccacaaactcctcagggacaagggccaggcttgtcttgttctccacctaatccctggcgcctagcatggtgcctggcacagagtaaggaatgcatatctgttaaatgaatgagtagacattgtcatgagtattaaatgtaatgatgtgggtaaaatgcttacttaaaggttcatgggaagcactcaatgaatggtagtgttaatactctgttaggaacggggcagggaaggtgcaggcacctcacttcacagagaggtgcagaccaaagagaaacaggcttgcaagacaatgagcatatccctcagccaggtttccaaaacagatgatgctgctgaaaggtaaagatgtgagtgaccatgattaaagatattgacaggcagagatagggaagaacttgcccaaaccacaaggctggtgactggcaaaagccagggttaaaacttggagcttctaactctcagtttgtgttgtttctgggccattcagaggtcttcttgtaccctttaaagttttaccagcagattgtttaagcatcctctgtatgaagctcttagaatttcaaatggactcttatttttagaagcagcatcccactgagcatttgacagtgatcgattcatttcccagtttgttttttaataagcttaaaggttactgttgataactgtttatagacagttaatgtggtacttgcagttcctgatttcttaggcctgggactcactgcgccttcaagatgctgaaaccaagcaaggtgtgaggagtaggtgggggcatctccctcccagattttcctcacctcttcaaggctgtcattcacaactccagtcactggctgctgcaacgttgttcccaatttgactaaaatgtcgttattttttatgatgactttattctttccatcataagctggatgattaggagctagaggcagccagtaattaagctcacctgtcagagtttagattcagtcagaatgaaacacatcctttaacttcccctttcatttccctggatgtcaagacgtctgaattaagctccttatgggaacaatatctgacccaaaaatgttaggacagggattaccgagatggaaattcggttacgttacctacttgtcatgacttagaagggctgtgaattctcaggctgcttgagaaaactactcatttgtgaggagaattgagttccaaaccataatagctagtggaagcaatttctgggatcacagcattcagacttgatattcatttgtccccttgagaaggaattcaggctagagactttcacgaataaaagtgcaaagtccacaaaatctcctggtgccgtttgtcatctgcggagaggcctgcctcacgtctatggctttgagggagcagagcattcagatactttgtttctgctggtgggccatttgagccaatggctagatgaagctttgttcttgactcttgaaaattatactctgatgtacttcaaagggattctaatgaggacattggaagcacaaagaattcagctttgcaaagtcagttctcaattccataaagttcggcattacttgatttctctaacgaacctcttcgctctcccttgcctgtgtctgggtgaggattgtcttagaggacattgatcattttcaccttcattttccatttttgcttctggtatgctcatctcacccccagttttatcaacagctcctctgcattcttttctctcttcacatgcaaggtttggcagaaatggccttcgtttctaaaatgttgattaaagacattttctgaaaatctatcagtcccaaaccttctcacttatacacatctttttctctcacaactgccatgtgtctcattttctccccaggtatttttctgtcgttcccttgacctttcaaacaatgctttggccgttgccagtaaagaactcactcaggcttgctgtcctagactctgaacacatctgccacctctgtccaggtagttttaatattagtgagatatggctaactctatcccaccttcctgctgccttgggagccctcacccactctgttaatgctgcttccagagcattccccaaagtaggaagttatagaatgtcccgtgtggaaggggctttatactgagttctatctctcacttcagatagagtaactgaagaccagagagggaaaacaacttgcacagtcacaaaaggaggcagagacagagtcagaatagggtcccaggctcctcttggccctttccctttgagaattcatttctatacacaaatgccacacaggaattcaggatccttattgagtcggcattgctgctctcatttgtggagcattagctatatactatacactgtgctaagtgctttttatgtatgcttcatctgattcccaccaggtactctataagatgaaatccattttgcagatgaagacactgaggcaatggtatgctgaggctggctggtactatctcttgagagccagttgtgtgcatctcttcccaatttcacattcagtgacatcatgttgctagctaaaaatagactatagcaagagtatttacaccatggaaattggcaaatgctacaaatcagagcatttctttatcccctttcctcccaaagaagatccagtttcccagcgcaccacttagcttacatattagctaagcagcttacccaagggcacacagcagggaggtgacagagctgggacttttatccagggctctgacttcggagtctgagctcttaaccaatactcatactgctagtcaacaaggacaggttttcagtgactcatttactcttagactggagatgatgagtaggagaaagcagctgccaggggtctggtacataggatggtagcaaggtgtggggtacccatatctatagagaccgtaccccgccagctagagaaggatgcccccagaagttttcccagatctcactccacaccaaccacatcagcttccttactgttttccaagtttttcaagcatgctcccaactcagggccgttattgttgttcctgctgtcttaaatgcttttccaccgataaacacgagcttgctcctttacttctttagtatgtgtgctctttcttgaccaacccatctaaactagcaccccaatattctctactctcttcctttattttcatagcatgtatcactacctgttttcaaagcacgtatttgctttttgtccttctctttcagtggaatgcaagccctgtgaaggttggagctgtccctgttcactgttgtagcttcagagtagagagcagagagggattagataggaaaataagtgaatctcagctgtattctactccacatgccacctttcttagacttgacccaggtggtcaactactagctcacacattcaccagtaaaggcaaagggctttctccttggttctgtgatctcgtaggatcttcaaagtctaaaaccatcttctttccaccttggagcctcttctttcatgttctcaccgtccctctgaaaataggccaacagtcatatttgttggtgctgatttgcagacagataatagatcaaacattttcagaaggaacctttggccccaagaactaattacatccccatcttggaaggtgactgtccctgtgtcatttaaactgtgtaagagaatggtggaggctgagtgtgacctttggcaaagcccacacgagggtactcagggaacagccagcaatgggagaagctgcagtgagccctggcctgggtacctgtgcacttattttcacctggagggccacactgatgttgtttcctgcatttcttgggtcatgtccagcagtaaatgcataatcactcttacatacccatgcacatatacatacactcaacttcctttctcatttcaaaaatcttatagaaaatgtcaaccatagggatgggaaaaggatgattaataatcacctgcaatcccacccctgagataaaaattgtgaatattttgatcaatttccttttagtcatttttttcctactaattaacatctgtatattttgtgacccatatttttaaaaacttagtacatcatgaacaccttttcatgtcattaaggatttttatacacagtcacttttagtagccagaaagtagttgtatgaaggtaccatgatttgtataactcattcctgaccattggacaggaatgttgtttccagttgtatattatcacagataatactatgaggggatttctcattggtaagtattagacaaacagtggttattctcatggttattcacttcaatcattgtaaactcaatgccatggactgaattgtgttcccccaaattcatatgttgaagccttaatccccaatctgatggtatttggaggtggggcctttgggaggtaacgaggttgagatgaggtcatgaggctgaagctcccatgatggcattattgctcttataaggagatgaaggtattagactcattctttccaccatgtgaaaataaagtgagaagacaactgcctgtgaatcaggaggaacaccgttaccaagaacctaaccatgctggcaccagatctcagacttccagcctccagaactgagaaatgaatgtttcttgtttaggccacccagtctacggtattctgttatagcagtccaagctgagtaagacactccccacttcatgagtccttcacttgtacttattagaatggtaccttcatcttgaccatgattttgcctctaggcctttgcatattctgttccctctgtttggatagcccttccccctcaagcctctttatcttatttccacagattttttcttaccacccccacccaagcatacatttttttatattttgatatctctgaaatggggatgaattgaagggtcattatgcatatttgtggtagtaagtcatagactggagacatagaattcctcttcattgtctaaggctcagcccaggcagttcctctttgggtttaggctctcttctctgggttgcagtaacctccaggctactctgtcattgcattagtcagactatactgtatttgtctgctcattggtctccccctgcacgaggacctccttgagaacagcaaatgtgtctttcattcctttgtcccctgctcccagtagcccaggctccaggacagttgctgaagtcagaacaggtgggggtggacccagcccctgattatcttctgccctctccactaataggcaaattgaattatttcctcattccaggcccatggagagctcctttaaggagcccttggcgggtggggcaaagcatctcacctgtcccagctttgaggttaatgcccattttaggccatgattggtgtatttatttgctcagagggagggtggggagaaagcttggtgggtggaggttttggtaattcatgcccgcatgactataagagagcttccaggaaaccacgttaccagcatagcaattgttttcactgcatttcagaatgacattcaagagtcaacagaaatgcttgaatttcaactttacaaaagggcttgctagagatatcgcctttcccctctgtcccttttgcttagtccaggatacaatgaccatgaaaaaagttggccatttgagcttttcaatgcccttcctcccaacttttcccctttccctacctctttctgggcctttctcttttttctgagttgatattcccttatcttcctctgcatgacttttaactttgctttttattaattaactccagaaggaataaggtgcctgttacatgggaacacactgcacaaagttgggagaagggaagatcatcctttctggctgggaaggtgggtaaaggcttcgtgcaggaggcagctgattcttgaaggctgggtaggattcaaacagatgaagaagtggtgaaggaagaggataagtcattccaagcctaggcaggagcaaggcatggtcaggaaggtgagggctgaggctgaagcaaacatttatttataatgtttacagactacctgcagtaagctggcaactttcttaagtgagtaaaccagatgtcactcaggtccctggttctccagctcatgtgtctgcatgggctttcttcatttttaccccatgacaacaacccagactctaaactcaatacatttacaagtttgaaccaaaggaatccatgattataaaaatattggtacccaatttagatttgactggttattttgtagaggacatggaggattgagctcatcttgtatacttcactgcaagcaactgaaaatatccattagaggtttctgttttctcagagaactccccttagcctaccgtggtatggaggagtgttgctgtctccttccctcgcttacttccttgctggcccttttctctcctggattctttcctgtgaactctgcattcctcaccctttgttagccaactcttgccaccgtcacccacaacttgcaaactacagatccattgtgttaatcgacaggatcaatgatccagatcattgtgtccagatcatggcccttgggatccactcttctgcaagaggttgatttagctgtactttccaaacaaatgcaatgtcttccccaagaaaattctgatggcgaatgtagtctccctgttgttacgtgtacattttcacattcaactcaccacaacagtccttctaatatcttcattttacagagtagacaactaaaaataagagaattggcttgcccaatgtcacacagcagccaaaatggtggaggtgaaatctgaactctgtcattctatttttttaaaatgtgtaagagctacatcccatgcatggactgtgaggaaggtgactttgatggaagaaaggctagacatgtaggttgtgacctgtatttgtttcctatggctaccataagaaaataccatgaactggtggcttaaaccaacagaaatttattatctcacagctctagaggctgatgaaagtccaaaatctggttgttggcaggattggttccttctagagcctctggggaaggactcgctctatgcttctctcttagcttctaaggtcgctggcaattcttggcattccttggtttgtagatgcatcactccagtctttggcttcatctttacatggtgttcttctcttcgtgtctcctgtatcttcacatagccttgttataaggacaccagtctttggctttgcaacccaatgttgtgctaaactcctattattctcagtagggaaggcaccaggttctagaggccaaagaagagacccagagccagcaaatacgatatggagttttattagggacttacctacagggcagagaatctggtggcagcagtctggacaggacaaccaccttacatatagaaatggtccagcggcagcaggctggacaagataactgcacagcctagtggtggctggctgggcaggaaaatcacaactgctttcaaaaagactgtagtttctacatcacttaacagcctccccttaatgacctccacgtggcaactttcatttaacctagagctcagagcctcaatctcctgtacagctcttgttctatgggacgggatgggggctcagatgttcctcatgggcaaggaatgaatctgtgggttggttacgtctggattccctggctcagaacgcacattcaggtgtttctgccagacaaggtcattctaagggtatgcttaaattattgctataaggggcacttaccctacacccaccctaatccaggataaactcattttaactaattaaatctgtaaagatcatagtttcaaattaggtcatattctgaggttccaggaggacatgaatttttggcaagacattattcagaccagtacaggaccagttcatgaagagtctagaaggtattaccaagaaatttggactgcgcgcaaggggcagtcatgaagggtgactgagggaaagaataaccagagtcaacctgaaacccccaggaatctgattggctccgtgttctttctttctcacccagctccctatgccttgttgctttattaaggaattaaacagggtgggcgtccatcagcagatgagtgttttttgagagtggcagccttttcttctttttggaaactttgcatttgcctctgttgtgccttggactaatcagtatgccgcgtgaaactatttaaagcctgatgcattagtcacaacaaatctgctcctgctgggagttaaaaaggctgatcagggcgccagtttctttttggtgagcacagtttgtttttcccgttacttcatttgcatccagccccttggatttctcggacttcacgcacagagcccctttcctgaattgcccctggtacagagagagctgccaaggcctggtcaggccacctttgaaaacctttctgaggacagaggctgagacaaggccagggaccaaaacaggaggggctgctgggctggactgagctgggctgggctgggctgatccacggggaagaccctgatgcccagagaacacactgtgccagctggaaactgttgataaagcctgtggtgaccacttcagcgccctgctctgaccttttcccatctaatgtggggctattttaatgttgttttgaagctgagagagcaccagaaccttgggcctgctctcctggtggaaaccacaggcttcatctgcctttgtggtgttgccaaacccttgactgtcctataagggagcgggcttgagagtaacacagttggcctcaacgcgtgtgtggaggcctagggctcctgtttatttttagcaggagtactcaagcagcatggcagagtttctccatactgcctcataaggtgtcctcagattctggggctgcaggttgcacaagagagcaaccctggggtggtgacaagaagagagtttgaatttctgaattaaaggcttttgctcctctgcctcgggttaactgtgtgaccttaggcaagttgcttgacctctctgaacaccagttttatcagctataaagtagagtgggtaattcctctttatcgtaagattcagcagcatgaactaagaggatttctgggaaagtgcttcataggctgcatggtgtgtgatgggaaggtataagggacatgaatagccctgtatctggtgcacagtaacagcttacacttattgagggtatggtatgtgctatacattgttctgggtacttttcatggattgtcctatttaatctgcacaaaagccctaagagatactgttataatctctattttacagatgaggaaactgtggcttagagaatttatttgctgaagatcaaacagctaattaattgccaaagccaaattcagactctgcagcctgcagtcttacccccagtctcttggtgctgcctctctcagtgtcatcattatcattaccatcatcattgcccagttattggaacctggtcttcgacaaaccccaaaaatattatacattgtctctaatcctcacagcagcatcataatattaactcattgtaatatttacattgtggtgtaaatattatcccctccacttcatagatgaggaatgttgagaataaagggttttgttcactccgtttattgagcacctacatctctatttgaggcactgggacacaagaatgaacaaaacaggagggtcctgccctcatagaaagtatattttagtgtgaaggaaccaggtgatgtaatacctaagcacagtaatttcaagtaatactaaaggcagtgaagaaaataatgtaatgtgacaagtgatgggtcagggaaggcctctctgaggagggactgtgtgagatgaggcttgagtggtaaaaaagagccgcataaaatgtatgggcagtagagaggggctgaaggagctggagctggcgaagggtggtggtggaccagaggagcaggaagcagcgactgtgattgcaagtggggtgacttcgttataagaggcagtgcgggggaccaggaatccatccccaccaatgtatggaaggagacatgatggccaaggacaggcccaggtgactcagggaagggtgagctgagctggtgggcagccccagtggtgggtgaactgagcaggttgcaggggagcggggttcaggcttggggccctgtggagccctctgctattttgctgcagtgcagtcaactgacctgggggattgtgggttccctccacgccagctcgggctggttgtggtgctggtgcatgggggattgatgaagctggcaatcgccttgtgactagacccagctggctgccagaaagggagccaaaacctcaccagggaggcagagcaactgcttctgcccttttccacaacccccaggaggtcattgatcttaattaattatcccccctgaggattgtggaggaaccctcctgtctacagagaattactggtggatattctaaagaaccgaataagatccccaccaccaacttctgtcttgagagaaagaaggtgcttctgtgcaattgatcagaatgaaatcatagaactttggatctgaaagacacttttttttttttttttttttttttttgagatggaatcttgctctgtcagtggcacaatctcagctcactgcaagctccgcctcccgggtccacgccattctcctgtctcagcctccccagcagctgggacaacaggggcacgccgccatgcccggctaatttttttgtatttttagtagagacggggtttcaccgtgttagccaggatggtctcgatctgctgacctcgtgatccgcctgcctctgcctcccaaagtgctgggattacaggcgtgagccaccgtgcctggcaaggatctgaaagacactttaatgataatcttgtctaacacaccctaacttttaagaagaaactatggctcaggtattgtttgaatttagtgttaggaaaaatagtcggtgaaagtctttctgggaaaaaaacaaaaaccaaacaaatgcacttttcctgtcttagtaaacagaataaatcgattgcttggtcaaagagaggccaggaacaacatggagcggggcctctggtgctgggtactcctggggttggctcccacatcaggtactacttactagctatgttttcttgggcaaattgctttaagtctctaatttctcagtttcctgtttgtaaaatataaataataatgatatccacctcatggggttttttaatgtgaactgaaaaaataatatatacaaagtgctcatcacatcctgaaggatcattattcaatgaatgattgctgctgttgccgtttgaggcgcaggtgcagaagacacagatgagtggtgttgtggagcatgtggaaatgctgggggtggggggtaaggtggtctacaaatggcactgccgttatcttgagctcagccctccatagcatccttcaaagctgatttttttctttttgtaaatttccaaatacataggtgttatcctgtccatttgactctattttctgagagaggcaaatggataggataacacctatgtatttgaaaaagaaaaatactcccagttaagtgagagttccagcagatgaattagggtttaaaacagaactgtatcctcatttcatttcaagggtggcccagcatatctgctagtgtgagctttggcattgctcctctgagaggcaggctggagaatgagaccctctgtctaacccagccattctaggaccctgtcctttaccccattctcaggcccactcccaacccaactccagggcaatccagtaggtttataagatgacaattgatcttatcatcctaccagcatcatattatggtttagctgaaataatactggacagtgattctgttattagttatttccctcctggcttcaggggagaatgcaggcatgttgcaggaaaacagaagaaccatgcacaccaaccatcgactcacaagctctgagaagagaccatttgctggtgacgaagcactgacttgcccctttgctgggcttttcaggggcttggctgggtcttactatgccaggcttctttcccctctgtagaatggagtccctatcttcatgttatgcaaacggcaccttttcaaaataaactttagaggagtaagagagaagaatctagtgccctttctgagaaggaatttagctaggagaaccaaatgttgtcccatacactgggttaaaaagaaccagttatgaactacaaatgcagttgactttggccctgagctctatagggaaaagtagggagaaaaaatagtaacgaatcagcagcacaagcaatatttgcttgtgagttcttccagtcatgggcgtgaatgagtaattctgtcctgggatcctattgcctttgctttgtgccccaaggtatagagtttggaaaaataccagtgctggtggttcttctgtttcggggaataaagaaaaggaataccccattgggagtgctgttctttgaaaactgcagcttacctgagccctttgttgagatggaggccagaatgagtctgaaacagctggtggggaatccaaccacagggatcactcagaccaggacaacactgaagtcaagtttgctatggatgtccagaatgccaaaagagagggcagtctggaggccttttttcttgggggagttattcactcatttatcttctttttattaagtacctaccatgtaccaggcactgttctaagcagtgtggtgcaagaatggcaaaatttctattctatggaatttacattcttatggagagatgtagacaaaacacgagtaaacaaatacaaaaataagtttatttcagtgagcgacaagtactatgaagaaagtaaagttgaatgatatgctcaggagtgacaggggcaactttggatgaggggctcaaggaagaccactctgaggcagcagcatgaaaactgaacaatccaccaggtaaagaccagagagcatgatccaggcagcacaatagccaacacaaaggctccaggtgaggacatctgtggcttttcaatcaacacaacaatggccagtgtcactgcagcctcatgagttcgtggctgtttcagctttacacccagctactgtaaccccaactgcgatgtccactgacgtagccatttcctaggggagagggaggaagggatgtctagaactgctctaaggactaccagaaattactgattagaggactaatcctaccctcatcctcatctccacatttaacctaccattgagttctgttggttcatgctcccggttttctcctaggtaagtccatttcttttcatgttcattaccttcaccctggtccaaaccatctgcatccttcccctggtctactgaaccttgcccattcttcacactgtagtcagaatcttgtaaaacctcaaatctggctgggtgcagtggctcacgcctgtaatcccaacactttgggaggccaaggggggcggatcacctgaggtcaggagttcaagactagcctggctaacatggtgaaacctcgtctctactaaaaatacaaaaattagccaggcatggtggcacgtccctgtaatcccagctacccaggaggctgaggcaggagaatcactggaacccggaaggtggaggctgcagtgagctgagattgcaccactgcactccagcctgggcaacagagtgagattccatctcaaaacaaacaaacaaaacaaaccctcaaatctgatcatgtcagacaaacccacacacacatgccgaatacttcttcatgactccccattgctgtcagcataaagatccaaatccctacaatgatatgcaaagcccactctgtgcaaatccccaagttcttctccagcatgtttctagacatttgtggcttcattttccatgctctggccacacaggctttcttccagttgttgcaatatgctgtattagttctggcctcagggcctttgcagaagccttggctcctaatcttctgttctcctccatgagccttggcctcagcaactacttgggtatcagcatagctgttacttcagcagagaagtcttctttttttttttttttttttttgagatgacatctcactctgttaccaggctggaggacagtggcatgatcttggctcactgcagcctccacctcctgggttcaagcaattctcctgcctcagcctcctgagtagctgggattacaggcgcacaccaacacacccagctaatttttgtatttttagtagagacggggtttcaccatgttagccaggatggtctcaatttcttgaccttgtgatccgcccgcctcagcctcccaaagtactaggattacaggcatgagccactacgcccagccagggaagtcttttttattccttaacatcaatctactccatagggtcttttggttacctgtcctcaatagcacttcatattttccttcatacttcttagcacacttgtatttacctgcaatcttcctgcacttgtccataagctccaggagggcaggaaccttgtctgtctggttcactactttgtcctcagcacttaaaaagtatctggaccgcagtagatatgtgatatgtatttgttggagaaatgaaggaatgaatgctcacaaagatcttggatcttaaatgttccacttgaatatgctacttgcttttgacaaaatgaaataacaggagactgtctgtattttctgttccatttctctaccctatagagatggtgattgatatctggagtttaagaataaggcatagcatgcaagaattctggcagatgaacaacctgcttagaaagtctgttcttgccttcgactatcagaacagcattattttctttggctcaaaggaatctaagactgtgtgtactcagggaaatggtgtagacccacggtgtggagtcagggccaagggtgagacttaaataataattaagtgaaagagggttgtgtgaagcctgggggcgacactgcctttctcagtggctgcggaattagaacattctcccttgtgtcaatgtggaagtgaatgaattaggctccgttttatgctgtgcctggaaaaataccaatccgtactcgcatagtttctgaaagcaaaccccaaatgccactgtctcagctccatgggagactgttaaggaaaaaaaagaggtaacattcacagactatgggaaatatcactgaagtggaaaaagattagcgttgttgtttttttgtttttttgttttttttgttttttttttaccttttttgaagttacatacccctttggtaatgtaacaaaacctatggaccctccttccccttcactgccctgcccactgcaaaacgtatggccgtataacatctctctatccatggagacccctcgggttaaaaatcccagttagtgggtctgactggaaattgagcagaaataagctaataagagatggccaggaatctgaagtctaaaaaacaaaatagaagtagtgctctgtaattacattttttccattcctgaagttcttcgttttttagaacaagtggattggcacaggacgaacacgtgccttagtgaaatcatgaatgatgagacctctaggtcttagaggaagcattcctggagggaatcaaagtggccagccactctcagccactctcagcaccttcctggattttaactgatattttaactgataagcatgcattttataattaagtactgcataagaaaaagtattgtaatgaaaacatgtgtttatttaattgtactaaatttagaggtaagaaacaagaaaattttattgtccctggtctgtagaaaacaattccagacaactgggagaactcaatttgtccactgtgtccccaaataaaaatgcttcaacacaagcaccaaaaaaggaagggcatattcccaagtagacacagatgtattgttcatgctaacagatgtggtgttaagaaacttgaacccctggtttgttttcttatcagtaaaataggagagacaaatggagaattttttccttataggttgttgtgagaatgaatatgaaatacttcacatgtaagagtaagccttcagtacattcttttttcttttcttttctccaatagcatcagtgacatcatcattctttatgttatatgtgcgtgcatcttgcatgaatgtatatataaatgtctccatttgatgtctaatcatctcaaactggtcatgcccaaactggaactcttggtttctcaagttcatctcacagactgtttctcccttagtcttctgcatctttgtcagtggcagcaacacctgcccagttgttcaaactaaaaacctaagagtcatccttcactcctttctttccctcacactcatattcagttgcacatctttgccaatatgttgcaaaattgatccctcttcaccacactcactgctaccctcccagacactaccctcctgtcattcctgtgcaagtgtcctggatctgaccctcctgccaccaccctggaccctgcagtcatctctccatggtgtagccagtgtataggcattaacagatttacatcaggttgttccacttgtttgcttaggaccctccagtgacttttatttccagtgacttctgataacaccggaaataaaatttaaatggcttacaattctgtaggtctctatatgagagataagcaaactttttctgtaaaaagccagatagtaaatattttaggccaaatgggagtctatcacatcatcatcttcttctcctcctccttcctcatccttcctcctcttcctcctcatcctgtcctcctcatcttcccttctttccttccttccttccctccctccctctctccctctctccctctctcctcctcctccttcttcttccccttccccttccccttcccctccctctgtctccttctccttctccttccaaccctttaaaactggagaagctgaaagctgtccttaactgacgggcttacaaaaacaggttgaggactggatctggcccctgggtggcagtttgctgactcttgctctatacaagctggcctgacccttctctcctgctcacatcttcttgcccactgccttgctcactgtgctctagcctcagtagcttgctggctgtttgggggcacactggtcacattctgctcagggcttgcacactcctgttccctctccccgcaacattgccccttcaggtcttccatgtggcttgcttcctgcctttgtttaagcctctgcttgcagaagctctccttggagaagcctctctgagcagcccctccaaaatgctctccccactccaccccaaggacatgctatccctcagtggcttctctctctaggacttactatatcttcacttgcttgtttgtcactaatgccagcctagcatcagctcttccagggcaggtgccagctttgtctgtctcattcctcactctccctccctatcacccagaatagaacctggcacttagtggtcaatcagaaaaaatatttgctggatacattaataaatatatccatataaggacaattttttaattatataatatataattaatacatataaggacaattctgccatgtggccagctggttttcaacccctgtagtactactcatttgcaacaaggccctctttttaaatcctcagcccggttggctctgtgtaatgcaaagaggaatcggatgaaggtgccaagcagtgcttggggtggctgtggactgtgagaggccagttccatgtgctgtcatggtctgaagggtgaatccaagtgtgaacatggtgatgggggtagaggagagcttagccaggctttgatgtgaggggaactgtccagctctcaggaagctgatgtcattagagcatccctggacaataagtgctgagtggagccagtgctgatgtctcttaaggagggagtgaagtagctctcagagccagaagagtgccgagataaactgtccttcccagaaacacacagctgagccaacctgcaaaccaagttggtgtggatgggggctggatggtgcttatcagtcctggatggatcatggtgtgaaaagctggtagttctggagccactttatggagcatggtgcctctcagctccagatgtgaagcctcctactcctgggatctccttctataggccacttgggaatggcaactagagggaagcatctggagcagccagctataccctccttccacctccttctcccaccctgatttgctatagtccagaggcctcaggagaaatgagcttggatttgggtcattgaaaaagagagcctaggccccttcctagggcaatcataaaaggccccttggggggtggactgcaggggatgatcctgtggaaggctccaggaggacttggtaccctacacccttgagttttggctcatagtcagacgatgagtcttggctgaacctgatgccccaggatgggatggactgggtagtgagccaggctataaactgactcatgcaccaggcagggactggaccatccttggcccaggaaccaggtcagggaatgaaaagatacaagaatctcttctttggacttcccctaggatagaaactggggtgtatagatcagggtagcctgtacatatccacatttgggaattttatgtcctagatcatgagagtagctcttgattgtagtaaataagacagctgcataacaggagggaaaatgcagtgatagtacatgtcaaacttcatcacagccctgtctcaggagcccaaggcaggaggtcagatggtctgggatctaatcatgggtctagactgtgaccttgaaccaggcatttcacctttctgggctttagtgttttctcctacacaattataatggtaaaccttgatgttgtcacctcactgaattattaggatcaaatgagagaataatgaaagtccttgcaaagttaaaaatgctctagccatgtataacttgatccctagtcaagttgtataaagcaataataccaataggaacaataaactttcaatgagcactgatcatgtgacaggcactgtgcccagtgttcgcatgcatatctcacatggtccccacagcaatcttgagagacaggcatcattataatctgcatgtgcagatgagcgagcagggcatgaaaaatttaaataatttgccccaagtcacatattttccagggaagaccagaacttgaattcaagcagcttgtctctgaaggatgcactcagaccctgagggcctgcagtgcagatctccaggctcccagcccagccccctaggcttccttcaggaagataaccatgagtctgtccagtgaaaacagacccatgtctatctcttccctgcagacgggcttgatccctgccaactgcagagaagctgcagagcctgagcagagcctgatgtttaccagctctaagagctaagggttccagctgggacagcaaatcctcagcaatcctgggaaacagggagtgatgccagggcacagggtctcctccaggttatgaagagcagacacatgtggttggaacttcttcatccgggatgggcgtcctgcacgcacgttgagtggctctcaggaaaacatttccttgagaaagcagaggcagggaggcaatctctgaagggcaggctgtttttttccatgttctcatcgggaaggagagaagaaaaagcagtcagcacttcctctctgcagcccttcctctgggggcttctcatcccccttcacagcagcagagccccatggtgcagtttgctgtgcttgcctaatatcagtcagcgaagtagagtttgatgagttcagtcaacaaaaagtagccgataagggcttctgggcacccctccgagaatgcctgaggagccttttcaaggatggactggtatggcaaaaggacggaaaagaggtagaagaagtattgaaagaaccgtggcctttgtcctggcctagagaagatttgggaagccttggcacttgttctcaaatatccaaagggctgtcttgaggcaggctagttctatgtggactccatggggtggaggagggatggcagggactagtctaaggaaatacgcagaaaggcacagaagcttaggttccaggctatgcagtctgacaggcctgcgttgcaattccagccacactatttataagctgtgtgacaattagcaatttgcttaacacttgtgtacctccattgtactgtaaaatgccagtggtaccatattcaaaggtttattgtgaggactgaagatggtgatttatataaagcacttagatagtgcctaggacttttgctaataataacattattgtgtaaagtccacttgtcttgagaacctatgaggagggtatttggataggagctaataggtctaaggcctagtgtgaacctctcattaggcagctgtgcagctttggacagctcattcaacctctttgtgcttcagtgtccttctcaggaaaatgggaccatgccagccattcagcttagttcacagagcagttctaagaataactgccaggataactgatgtgagagtgtttttgaaaaatataaaaccaggttatcatgagttcttgatgttggcatttcactggaatatgaccaggaaggaagctgtggaaaggaattgagtttgctctggaggacctccgtactggttctgctctacaatctgagaaatgcccagaacagctgaggccaatcaacagcagcagtaattatgaccaatgcaatgtcatggacctgcgcagaagccaaaagcaagtcattagcagcacttgaagttttcctttgctaaacaatggcaccttcattttgggagttcccaggttgtcctctctggacttttggatagagggtgattgcagatacactctgtttctgctggtgcacctgtttcctccctcaactcatgtttgtggaccagacccagagtgccagcatccaccccgaccccagtggtgctcactggaggcaccctctcctgggctgggtgaaggaggaagccctggagtagattgtgtccaccgttgtgtatgtgtgcttgcaaacaaccatgtcctgggaggattaagatccctaacaaaaatggagttagtttacctactgtttttgttctaagggaaaggtttcccaagcctcccatcaggtaataattttttaacccacttcaaggctatttgttttcctttaattgttcaatcgggtaacttttagcaaccacattccctacagcaaaagggttattagggaggcactcagttcctcaatagttcccaggaaacatagaccacagccctttgggaaagacactgcttcttaaattgctaaccttaatccctagtgaccagaactggccaagaatgaaagggctgatcccacagggaaaataaaataaacaaaaccacaccaaccctcacccccaccaaaccacaaccaccgaaaacaaaacaaaacaaaaaaccaacagacaaatgcaacccagtgagagtttgagggcaactcctttctaaactgtttctctgaatcattcaaatacaaaaccagaacagagggcaaaagttagaagccattgaacttttaaaagtgcttcaacaatagctatccatatttctgtgcccacagttctgtggcaggaattttttttaagtttaaaaaaatattttttttttcaccttaatgaacccctagcccacctgagtagactagatatgcctaaaatgagtctttaaggcacttcccaaaatggccacaggtccccatgccctgaccctagaggtgcagctcctgggagggtgggaggagggaggaccagcagcacggaggcccttaaaagggggtcagaggtctcccaaagattgcacaatttcaacccttatctgctgcattgaggtggtgggtggggagggggctggagaaggagtcctcaggccccggatgttgaacagagcaaataaattccagaggcacctggcaacccttggattcatgggaatagcatgtctgctcttgggatatatgccctgggttgcttgggaccagtttgtctgcttgaataagtaaaaaaccacttaccctggagctttcaaattagtcttcaattattcattcattcatcctgaaacttattttttaccctgaacgccttctatgtttcgagcgttttgagggctatagagagaaatgacacgtaatcttcactctccaaaagctctccttctggtaatacttaaaagaaaatgtcaagtacatatccagattcccagcaaacaagtgaatctttagcctggtgagggcatcatgaatttctgatttcttcgtgaggtctcactcaagatgcctgtatgcctagtatttttggcttcccgtttcagtgcagtttatattcattacatttttgatggtacagtggaaaggggtctatctaggggactcagattcttctggaaaattagggagtaggatgggatgatctttaaattccctatagccctgacactgaatctgtcaattctatttaattataccaatgataagcccagtactattctgagtacacaaagatgaataagatagagtatctgttcctaagcaacttataatccagttgtaataatattaatgtcattgcttacatccataacaacaaatgaaatgcacctctctcctactataagaggagttgtactgttttaaaggccgtagaggagatagaaacaaagtactaagagcatttacatacttctgatgagtggaaaggatccgagaattcaccagcagttagttttgctctgagtcttgaaagatcaacgtgatatcaattggtagagaatggaaggaaaaaccttccatgctgagggaacagcctgagcaaaggcatggaggtgtgaccatacatgacctactccagaggagtaggcagcccacagggacattgggaggggtgataggagacactactctacccagaaattcttgaccctcatctgaccccccccattagaaggaagaaagtatctgagttgtcgggggagccaggaagtgacaaattaaaccctgtcaagggaacatactaaatgcagtggcatttagtatgcgcaatggggagatccctttacataattctttatctcaagaaaaaagaaaagggaagagaggaaggagagaaatcctttgctagcccaacccagccctttctgggggcgtattcattcattcattcattcgtaggcttgtcagtgtgacattgtgtttgccctcctgaaagccatacatcttactttcaaaacctccaacagccttcaaccccctgcagaccccagtgttccaaggctgaccttttggtaggaggcttactcccctccaaggctggtggaggggagacggcacctcttgtgctcaggccttccttgtcgctggcttgtggacaggagtcctttcttctctaggaaggattagtgcttttcttaaattcgactctgaagttctgaaaagcctaccaactgtgtacttccacaagctttttattttaatttttatacatcttcttcctttctttccaaggtctctgggtacccccagagaaggaaagagactaagtctttaagctacttgcaaaaatgtctgcacacagtttgccttcatgatcctagagatggcatttctggggtttcatttcctgcatgtaatatgacagtaatgcagacaactgcagaaataggggaccaggcagggaggcctgagttttactcctgtttggtggctttcaagtcagatgaagaggatcaatcactctccatctctgagcctttctctgcaaaatagcaaaaaggatccttttcagtattgctgtgatgaggtattttcagtattgctgtgaaaggtgtccagtaccatgctcaataaatagccactactatggctagggttttcatgcggcaggcaatgtgaagctcttctgtggtatttttatattcaagcccagctatttggaggcaaaatgggctccctctgacaagctatctagctcattccctcctccccatggggtgccacagtgcttctgatccttcttttgtcattttaagaccatgtaaaagctgacatccccccatcagccttgcctcatgtgtgggtggagaggcgtcagcccacatcatgcatgggagcagtctagagagcctactttgtctgaagttcccctggccggcccccaccgtgtctgagctttttcccattagtcattgctttggctgaaagagtggaagacccctgttaaactgaaatatgttatctgggaaatacattaagccattaacagctggacacaaattagtttatcagacagaggctgggcttgcagaatttaggagtgagaaggaactttatagatcatcagtttcttagtgaagaaaagaaggtccactgatgagtagctcttgctcaaggaaacaccagtggcaccttttgggatgccaggcctcaaccctgcctcctggcctgaacccctcttcattccaccttgatgagcaagatggacagtccaactttcattcaggagatatttatcatgtggctgccatagctgggcaggtgctgaaaattcagagaagcatgggaggcagacatgggagtgttgagtgattgaacgatgtgggacaggtctcttgtatggtgggacgggaaaggtctggaacagaggacaccactcagtgaaaggcagatccagactctgaggggtcagccccaccaggggctccacagtaccagaacactgggaccctacctcgtggctaccatgagagttcaagaatggtcatgctcagggagataggctaagctggcagtcagggccaggggatgggtcagaaagccatgagctgaaaaaagaggacaacagctggaaggcaccagaccacacttcagggcagaccttcataagcattgttccatgtggtcaacacagactgatctctttccgctacttcacatcaaaggtcttggtggaagattatggaaataggaggaaggagaaaggtggtaggaggggtttggtggatgaggaggttgtgagaagccacttctgtctctgcaaatctacagggtcctgacacctgtgaactcacagccattaccctttggaaccatctgtaccatcatgctggtgatatcaggcatctcttccactcacctcttcttgcttgggtcctcatacccatcccctgcatgatttcaacagacatctaattggtctcccttcctccagtctctacctttttaaagctatcttcttgctgttactaggtcttcttaaaatgggagcttggacaaatcattcccctatttataagaattaagaatagagtgtcctttacagcaatcttgcttgtcccagcctaccaaataaccccatgtgatgtgaacacacagaacctgccatgaactttcacccctctacacccttgcacatgctattccaccttcctgagatgcttctctcctcttgtcaaacctgccagaagcaggtcagcatcacctctgtgaagtccttccatgctccccagccttgtgcattgttcttttctttttgcagagtttgtggaggtcttactctgttgcccaggctggagtacagtggaaccatcatagctcattgcagccttgaactcctgggcacaaatgatcctcccaccttagccttccaagtagctgggactaaggcatgcacaatcacacctggctaatttttaaaattttatgtagagacaaggtctcactatgttgttcagtctggtcttgaaatcctagactcaagcaatcctcacaccttggcctcccaaagtgctaggattacaggtgtgagctaccgcgctcagccagcttttttctttatgacccagctgtacactatacaggcctcttttgtagcacctgttgcattacattgcaactgttggtgtatttgtccattttcttactagactgtgtgtgtgcatggtagggacacacacatacacacagagagagacacataccccagacaaggaatcctccctgattctcaacaccctcggcaaagctgggtaagtgcatcatggtagatgctcaaggagtgtttgctaaatgagctagaatacctatgacctaaggtgtgtgagatctgaagggaaaggtcacaggctttattctctttaattaaagctgaggcaggtaccttctgtatctccctccacaccttcccatctctccttgtaccatgagtggtattttttcacctttttccagcaaagattggaaactagttgctcattcaatgactttctgcagatgtatagatcgtaaatgttgtggctatcctagaaagtataatgaacctaatgatgttttcccagaaaatgtataaatccctgatcttgcagtattttcacacaatcaggattttggattctttatccagccactcaactccaaggaactttaggctttaaaaagctgtgatagagatatcttgtgttttgctctcttagccaataagatttgtcaagctttatttttggaaaaattattttaggatttgttttccaaatatataaatatattttaatacagaatatgctttttcaaatgacacatgctctctcatttctgatatgttgtcctagcctgtgccccttcccttgagacagcaaatattgctgcctctgtttcattcttcagaaatgtgtgtagagatgtacatagaagggcctcttgtagtcattcagtctaagttagggcccgaggcaggatgtgggatctgctgcctgggtctggctcagtcctagctgtagaggaagctgcatggacggacactaggacaatcatcaacagcctttcatttgggaaacatttactgagctcccactatgggccacacattgttctgggtactggggaacagtagggaaacaaaacagacaaggttgttggaatttgtagtctagtgggacaaggcagaaaagaaacaagaatacaggttagctaagttaactcagtaggcaaaacaatgacgatgagacaacagtaatggagtggaagagagtgtgggaacgagaagtttcaacattaggagtcagaagtctccctgaagaggtgccattagacatgagaccatgggcaagtctagggggaaacagtgctccggggagtgggactatcacgtgcaaaggtcctgaggtaggaatgatttggatgtgtttgagaaaaagaaagcagaccactgttgctgcaacacagctggccagagggtgggagaccaggttgcaggtcatagaagagagctgggatttttaaactctgaaaggaaatcaagtcctgaaaggtttaggtagggtgacaagttgatctaattgccatgttttaaagattagaatgaaaaagattaggaccaattttatcacctttcctcattatgaacagttttgactacggaaatgaatatataataaagcaatccatgatttctcattataactctctgccagtgggggagagccaggatttccatcctaggatgtcatggctgcccaaatcagaaacaagttccgaggtctgggtggctagtgccatctttccttggggagctgaaggattcttgagccttttcaggataccgaaagttgctggggacccctggagggtcactgccagatgagaggatgctggacctaggacaagggttgggcaggaaggtggggaggtccccagtcctcaaaggaaggcacccggggcctgtggcaggtggagcaggcagacgaggaaataaaggccacaggctgcctcctctgtcgctgcctgacctctcctcctctccagagggccttgaatggcctttctccagcagcggccaggcaaggtgtgtttggaaatacccaaactctgtccttcacgtggcaggaaataaatattgctgggaacgcagcgtgtgggctggggcaggggtgtgtgtgtgtgtgtgtgtgtgtgtgtgtggttagagttgtgggggtcagaaaatgtgtgtgtgtgtgtgtgtgtgtgtgtgtgtgtgtgtgtgtgtggttagagttgtgggggtcagaaatgcatccatcctgcagccatagttccaactgctccagggggaggcggctctgtcaacttgcgtgagttctgtgcagaaagaaaatgcggatggagatgagtgcgcatagtgaggcgccggctggtgtctgagctaagaacccatggggacccgggagccatgaactgcgctccacagccccttcccccggcctcacccctacccatcttctgcccaaggctctccctactacccacgccctccccgaaatagttaagtatcctcccaccaactccgaccatctttcccccttcgcgcccaccggcggcagtggcgaagggcccactgaagcgccgggtgccacgcggggcggcccgcgggccagctagggggcggggaactcaccagccgccgacccccccccccaccccgccctcggccgccgcggccccagcggcctccgcgctgcgaggagcgggcgcttggacacagggcgagttgtttgatttggcggaggcggggaggccggcggggagcgagcgagggaggcacgagagctgggcagcgcgggcgccggtctccagggtagggtccccgcgcgcagcagcggccccggggcgggggcgaggcgaccgcgggcgccggggatgcctggaggggccgcggccgagaggagacccgggactggacggccagacctgccgggcgcgcgggcaggtgcttcggctttttttttttttcccctcctcctttttcctctgccccttccttcctcgccctgaagtaagatgagcgtgatgctgtggcgctgggaacagaataacaccaccatgaagctggtaagggtggattgcagaccgcaccccctgggcgctgctctactttttaaccccccaccccgccccccatcccctttaggaactggcccgggtggtggaaagcccctgaaatgcattccgcacttggtatttcccttattgttttgaagctagatctcaggggaggtgtgtgtgtttaaaccaggaaagtcgatgtgtgtatgtctctggttgtgagtcattgaaggggggtgggactgggctgcattatctctccgtcccttccacctacgaattcctggagctctcttggattgcacacgctgggattgtctcctacgagcatgtctgcgccctcacagcctgtcccgggacagcgtggtccgcgtcccccgagcccccattgtgtcttgatactttggggtgcacatggctattgatctctactgcggtttggcttgtctgtggggaatacatgagccccgagtgagtgagtatgcaccgggtcctcctcccgcctctcacaatggcttagttctctttcaagcttgcaaagaaccatccagggtgcaggtactttttccctcctccgttttcaaaaataaccgcctatcagtcccgggagagctgaggatagcaggattttccttgctgcccaaagaagcctgagttgtttctccatcccaaagaggaaatgtgatcggaaatctctgggttttgcttttgtgaattgtttttttatcggatagtttcaactggcggggaccataattcccccattaaagtcagccagtgctgtggccaagtcggttaacccccttggatgttagtttccttctcggtaaaatggagcaagttcccaccttgtagaactagtgccaggataagaaatcatatttgtggattgcctggcatataaaaaggattcagtaagaaataggtatgattaataaactggaatgcatacttactggtgtgaggtctttaaagatgctaccaaaaacaaaaacaaaaacaaaaacaaaacacaaaaaaaacaaaaagaaagaaagaaaagaaagtcacagcagctgcattggataccaagatgctaaatcaaccaaagctgggtcttcatataatgaacttatttgttggaaaaatggcaccttgcttttcatacttcttgtgttatgtttggcctgcctaactttaagctactattttacaacttcatttaatgtgctgtaacattagcagacgttatgcacctttgctatactatgtcatgattccagctccctaatcctttcctggaatctttctccaaccagactggtgtggaagaggccagagtttcacataatttctctccaagctgtacctgagatgccactctaacaggcagcataggaaagctgggtcccgatctgaactgcatagggtcaggttgccaaacctaaatgcttttttaaaaagaagaaaaagaatgatttgccaggcagggaaaacgtggagcctcccaggggatggcttctggagcttggtggcaggtggccatggtaagggctgggatgtcttctccactccgatattgctgcccgtttagtctatggagggagctttcctcaacaagggtcaggggtcagcctttattgggtctgcctgaatctttagagctgtctcacttttcaaattaactgtgaggaccacccaaggtagttatggtccaccaaaataccctttccccatgaggtggaggaagggctaggggagctcaagcaactgggaagccctgagggagtagcagtttctgtcccgtgtatcccactgccccagagcccaggcaggaagaggcatgactgggtcttggcgtccagatagcctcagatatcctcagtgatgagcctcagcttttctgtgaatgctagaaaccactgatacatcattagctgaagtatcattagtttgcattttgttcattcacttattgattgatcaatttaccctttatttgttgtgtgttttgtgcagagcacagccttggtgcctgtgttcgttgtgaaagattttgcttgcagatgattcttggtttgaattccagccttgccacttactaatccctgaatcagttttcctcttttgtaaaaggctgttttacaactctctttccccaggttgtgaaaagatgaaatggcataatacaggaacatgatccagcatagagttggaagcatgtttgtctgttaaatgggaactatcattattttcttcagtggtaaatgagacataatctgtccccactctacgttgtactgttgggtgaatggttggttcttctaatgggccctgggaaaacaaacctttcttacctttgaatcattagtagccctcagcaggaaggagctccctgggaacatcttggaagtcaattgtgtgtgaataactgctccagaatgaggcctggggccagaggtgtgtgcccgaacttttatcactgatgcacttcaataaacatgaaatcagttaacccacagcttgaaaatgcattgttttgtttgaatagtagaattaaaggtcttgcttcatgttctattttaaggctaattggatcaaaaataaggcccagagtaattagaggcaaaacttgcatctttatatgttatctctgcaggggaatgtcagaaatgcacctgcccacctaggagagaaggcagtagctggtagatcctacatctgtccaaatcccatctgacagggtcacaggcctttgatgaaagtgagaggaggtgactgcccaggtccaaagcacccactgggaggggataagcttggggcacagccacagagcatactgtgggtggttctgacattcttaccaccttccctccacaccctagttcccttcttttaaattctttggacttaggcagagcaaggagaaacaatgaggccacttatggagcagctggtattatttgaggagtggtagagtccaagaatggcaaaaggaaaggcactgagagaggccccctggcagcctgtgctaatgcacggagtgcaggtagtccagtcagaaagacctgtagccagagctctgcacaggagccactgccttgtgacatgggccagttgctttacctcttcgatctttggttttctcattgtaaattgagactacagcacctcacagaattacagtaaaaattagggaaaaaaatgtatccggatttgagctcagcgttctgcaattagttggtggtcagtgaatggttgctcatatgatgacggacgagatgaaccagtagtgtgtgcatttctccacacacagagaaaagactcaacagaaacattcccaaaagtcaatagtgccaagttcttggggggaagttaccaggactgttttttgtttgtttgtttgtttgtttgtttttggtctatacttttccttatattctagttttgtacaaagctcatatgttacatttatcatcaagaaaagattttttaaattactgctaaaatcatattaatagctaacatgtgttgaacctttactttgagctttatgtgtatgattctatttcatcttctctacaatcctctgaaataaaaactattattatctccattattcagataaagaaattaaggctcagagagttaaatgacttgcctaagattccagagctagtaactttagaagtgctgctttgtctgatggcaaaggctgtaccttgaactgctgtatcagacaccctggatgcctcctagagcgctgcagggcctgctgctgaggtgggtctgcatgagcgtgcagtatagatgcctgtgctcactgctgcagttctctctgtgaggggcctctctgttcactgcaatcccctcttagcccctttgatcagggacatcctgggagggaggtggagaggagagtggggatgggttgggtcatcacccttcagcgtcttggaaaacacttaagggggctcttcctcaaaatgaaggagaaagtggctctgcatgaagaataattgagaataatgatgatgagggaaatgtgcccctgacctttgacctttccccagagaggcattggtcaaagaccccctgggcctgtccacagccaggctaacaagcagattaaaagaggtcagtgggttaaagggctctgtctgcttccctgtagttatattgctccctcccaaaggccaggatgctgtgggccctgcagaactcctgagctcccaggtgctgtgtttaaaagacaaatgctcctttagcttttttttttttaatccctaactttatggaggcttaattgccaaataaaaattgtatatatttaaggtgtacagtgtgatgatttgatctatgcatacattatgaaatgattcccactatcaaactaattaacacatccatcagcttgcttcagctctttacacgtatagactgattcccatcttaacaacttccgttttttttcctgactaaagctcattaacactcacatgaaagtattaccaccttcagctagaaaacaacggtcatttccactctcagggacttctaggactttctcctgctttccactaattgtaactggcatagatttgaccatctcccaggtactgaagtcatgtccattttctactaattccccaaaatctcaagggcaagaagttccattctttccttgagaaagcaggttggaatatacaggaatagttccatatgcatttccgctgtgggtaatgagccctcatagccttgatgtactttcctgaattgaaaccaaagcatgtgaggaaggttttgactttggttaattactaggaaaataaagaaaggaatattgggagggaaggagagaaagcctctgaaattagtaagtgacttcctcttaatgacattttgaggtaacacattttccttcatttttgtgttaatagagaagtagagatttataattggtccctttggtgacctggcagtgcttacattacttatgcaattgtttttgtttttgtgtgaagccagggaaaaaaattgttttgtttctggctcctgtaatgtaatgccagccacccagaaggcatgtggctaagcttttcttcagggtctctaagactctccaggacacatggaccaggctgccattgtctttccagctgccagcccagagatctgggctgggtgacccaggtgctgttcccaagggttgttctttttgattcagagattgttacagaaatgctgtttctaatataagagcaatagccagggaggtggaaaggcagtggaagagcctgacctcccactaagaatgggtgttagagtgaagggttagaatgagttgacagatattgtttaaacagggtaacaagaaggtgtgatggagatatttggctgggctgagatgtagtcgaggattgcccttgtgaccagaaataatatgtctggttataacactgtggagtgggacaagggtaagcacctgcattatacattatctttgtcatagtgagagatgagctgtgtgcttgctgggaacatgataggtcctgtggcacaaatgaatctataggaaagcaaggcactttaaatgggatttatcagctccagtatgtttactgggcttaggaaggtgtgtatgtctgtagagggtccaggagtgagtcttttgtttcacagctatagctttgcctatttttctagcattgttcccgatgtgaagtttcaggattcaagactactgatttctcgttccaacctttgtgggatccagtccattggtggatgaagtccaactcctttgtgggattcaaggccttttagatgatagcagtgttttaggtcttcttcagcagagcttccacatagaacctgttagttccaatcagcatggttggcctggtgatattccaatttcacgcttcttccatctctccatgttatcaccccatccttttgaagctcagattgagtcccctttttttaagaagccctccctgacttcttaaaaggagggcttttaagccctgacaggcagtagtatgaaccctcgtctgattctctaagtccttgagctgctggtggatgtggtatctttgctatcagactttgaacagtggcttcatgcatagatactggggatagtcaaaccccccttccctcctagctctgccaatgatctgtgcaacctggggagaatattgctttatttctctgagccccagtttcttcatctgtaaaatgatgatgatgataatcattccaaattcaaggttgttagggttgtttagtaagatacaggtattcagagcagcatccaagcacatagtaaatgctcaataaatgttagccattgttataatgataatgatcatgatgttaccttaattcatccaacacatttatgaaacatcttctaggaactagggaatatatgagtcaacaaaaaagtttcatacctatattttactggaagaaagagataataagcaaaacatgttactttttatggtgatgaatgctattatattaagaaaaatatagcagggtgagaaggatagggaggaatggtggaggttacctttaatgtaggatggttaagaggggctttattggccagtcgcagtggcttatgcctgtaatcccagcactttgggaggctgaggtgggcagatcacctgaggttgagagttcaagaccagcctgaccaacatggagaaacctcgtctctactaaaaatacaaaattagctgggcatggtggcacatgcctgtaatcccagctactcaggaggctgaggcaggagaatcgcttgaacccgggaggtggaggttgcggtgagccaagatggcaccattgcactccagcctgggcaacaagatcaaagctccatcttaaaaaaaaaaaaaaaaaaaaaaaaaaaagaggggctttattgcaaaagtgacatgaatattgtataataataatagtaattattattattattattgacactccttaggtattataccaggtgactgtatagtttattatcccaaccaagatacttctgagagtgaaagggagtactaatgataattgcattccctttgatcattgagatacagttgtaaattttggtcctgtcttgggcagagtaagttgcatttatagttgcacttgatcactccaagtataagagatagtatggtgtcagacagacctagattcaaatcctgggttccaccactatctgtgagatcttggaatagtcatttaacctctttgtacctcagtttcctcatttgttatgcatacctaatagggattttgtgagaattaaatgagataatgaacgcaaagcgctcagtacaggacctgacacctcataaagagtcaacagaaattcatcatcatcatcatcatcagatcgagagcaagaatcactctttttgatatctctgtgcctgggaaggggttgaggatatacaaggtggattaatgttagggttggaaatttacctgagcagtggacttgggagatgagctgaatgatctgccaagtagttgcctccattcattcttacagaatgtaagactcacacagtgtttaaatgttaccgatcgggtaggtgacttcatgctggggcagccacaggaagagtttggaaagtagagtccaggactaagaatcttgggatgttagttcaagaagaggccccatgacaagtggcctggaacaatctacttcacagtagaggaaggaaggacccagagagctgaaatgactggcccagggcctcatggcctgcagcctgtttcaatgcatctgtccttaaccatcctgctgactggcaaagcaaagattataaagagcgagaagagagagcacttagaattccacctggaaaagccatgtttctttggaaatgggccacagatgacataaccctgccatctcccattacctggtacttggctaatctttgcatgaaacttgttttggtgaaacttgagcctggaaaagccaactaaagtatattattttatcagtattgaatgcctcctagacttgagataacatttaatccaaagagtaaggtgatatttcctgagatagcaatgaattcatgttttgaaattaaataagatgagtttattgcgtcagctggcttttttttttttaaagcactaattgcagtagtaaatgttctgtccacggagtaatgtctggccactgtatggggaggagtgggagctataggcatggtagttttcattccttagaagctgtctcactgtctctcttgttaggtactattccagatttaagtatattttagcttaaggggacctctatttgaataaatagatttccaaccccagacaacttggggacaaaaaggtttcttttacattatctttcctgaatacatgctacatgctttctgccctttctccttcccaaggtgcttatcactcagtaaggatgactgcacacctaccttacaccaggcaaggagggaaaaggttctgtttatagaccttcttagatagccaagttggtcaaaaaagaaaaaaagggcaaagacaggaatttggagtttattgcattatcttcttgacttaattcccagaagtgttttagattctaaaaatgtgaagattaatgtacaattgaaatagacttcttcaaagaggcaattggtgttccaaggccatctacagtgcagttccaggatgtttcagctgctaagcctattatgtcttcacagtggcagttgtggttacagtccgctatttcatgccaccaccttactctcagctcatcttgaccctctgcagacacctgctatagcatcagcactgggaagtcagcactttagtctccatcatttttgtatccctagaaacaacacagctcctggcatacactaagtgttcaattaatggaacaatggtacagttaccatttcagtgtttcaatataatgcaaagttgaatcacataaaatgtggggttgtttactgtaaggtcattgagattgcatacagcttcatttgtgcctttaaacacagtcaccccaccagtaagttgggaccccataagagtactgatttttgccaggtcagattagatacagcttctcctgtgggagagtgacttgggtgtggagaaggaagccagaaatactgatggagctttctttggggaatccaagtgggaacctgggggagagggaaaaggggaggagttccctttcttccctacatagctccctactgtccagtttacaacataattggctagggaggctggactagagggaagacacttctacaaattacccagcaagaactgtgtgttaaggtgggtgtggtagcgtgcacctgtagcctcagctactggggaggtggacgggggtgggtgctgagttgggaggatgttttgaggccaggagttgaaggctgtagtgtgctgtatttgtgcctgtgaatagccactgaactcctgcctggacagcataacaagaccccatattttttaaaaagttagaaacaaaagaagaagaagaagaactgtatgataaccactctgggtgccagattgctgcatttttattttattttttttgagatagtgtcttgttctgacacccaggctggggtgcagtggtaccatcatagctcactgcaacctcaaactcctgcgctcaggggatcctcatgcctcagtctcctgagtagctgagactataggtacacaccaacatgcctggctaatttttattggatcttttttttttttttttttttttttttttggagatggggtctcagcatgttgccagagctggtcttgaattcctggggaaaagggatccttctgcctcagcctcctaaagtgttgggattacagacgtgaaccactgcacccggtagagtgctgcattctaaagcaggatgtagaaatcatctaaaggctgtagattaagcactgttggagatcagagggaggccatttgtgtaatgcattgatttcagaaacaaaaagaacttgatacaaatcattgtgaccctgggcaagttgtttaatttgtctgaacttccatttctctatctggaagattggtggagtccttttctcacagggatatcagatatgtttaagaggtgtgtatgcgatagcatgatagtaaacttagagaggtgctggaaaagttacctcctctgaattcagacccaggaaggatggttgtccttcaggaagcctcccaaatctaggacttggagctgggctgaaagaataggcaaaatttagagtgggagaaagggagggtcataaataaggtgaatggcaagtataaagagccctactttcttgattttatgaaatttctttcataatttagctagcaggaggggctcatgagtagctagcttttcctggctcagagagagcacatgtactctctcctctccaaaagaacctggatgcccgtcccacatgttactttctccattctaagcagtgtggttccaagtccaatttagcatgaatatttcaaatgtaatatgtcccagatgtagagctaagtaacccctcaaactttcccccacctcagtcttcccacttctgtaagtcggggtttctcagcctcagcacttttgacagttggggccagatgaccatttggtataggggctcttgtgtgtattgcaggatgtttagcaacgtccctggcttctacccattgtaaaatgtttagtagcaacacccagtcatgacaatcaaaaatgtctccgtaagtttccagatgtccccgaggggggaaaattgccccagttgagaaccactgtagtaaatggtcccaccacttaaccagctgcacaagccagagcttgaggcatcatccttgagtcctcctcttctgcattcattcatcctaatagcaaatgcttccgtttgagcctccccagtagatctaaagtccaacaacttctcatttcatagacgaggacaccttcacccttcacttagagaactgccataatctcctaactggtctccatagtttcactattgcctgcttccagtctgttctccatacagcaccagagaggtgtcaaaaaagaaatgtcactgtacctgtctgctgctttaagcacatgtcagtctgctcccttccctctctctcctgtacctcctttggttgctcaccaggccccggctgcaccattcttcctctggttcctcgaactcaccaagctcattctcacctgggggagtttgcccatggcattcccttgccctggaatgctcttctcttctttttacttgactggctcttatctctcaggaactctacctaagtggagctccttcacagagaccttccctgatccctctgtctcatgtaggtaccccctgcaaaatctgagtccctcattttatcccttcataacatctatgccagttagtaacaggctgtcttcttgaaatattgctggctctcatgagggcaagaatcctgctgcaatgcttttaatgcggccccactgagaggcataagataggtgctcagtaaatattcatttatttgactaaatcaacaaatgaatctcttcatctttcttgaggaagagagacaccatttctctagtttaaaattggtaattgcagacctctggaattattcttccaataaaatcagtaagaagctagttttcttctttagcttctcagtactgttagtacactgcctactaaagagtagatgcccaagaaatcactgttgaatagatgaatggttcatacttatgtaatagtttgtgaatgctaaataatgaaaataaacagattttaagcaagtagtcgaaatcccaaaatccatcctttgaccttctcaaactttcagggagagaaggtttgattctcctcttccactcccagtctaagagactgatgctattttcggccgttattgttattgttagcttatagaagtaaccggaatgcatacatggcatactgcatggcccatagtacatattcagtaaacatttgttgacttgaatcaaagcacttaggaaaaagaaaagagaattagactggttggtgtacagagacggtatattcaggtcttatcgtgaaaatgaaatcagttatcaggtcttgattagaggcagaaaaatttcatatcctgtgagaatttattgtccagtggaagaggtgactttggagaacaggatagcatataattgtgctaaatagcatggcactgttttgagtatctttgtagttgctttgaattagtgctggggcttcctccccctttctggaccagactcggctgtaagaagcatggagaagtaatgaagattttttacattctcagactgctttctgggaatcctgcaaagtcccgacttcttctctgattacccttctcatggctgagttcaagagcattttgaaacccggactttgaatctgggaaaatgctttatgaccatttttatgacctcaaagcaacccgctaaggcaagttatttccctctctttgccaagggggaaaaaccaaggatctggtaaattgcccaggatttcccagcctcggatgctatcttgtgggcggctctcatgctcccggctgcatgctgtcccttccattagacgtgctttggccgtttgaggaagggcctggtcagtaacctcagcccacattttcatggatttcatggtcttcctctggaaggaggaaagcccaattcagagaaccatatactgttagaactgcaagttttcaagacagagttctagtccaaaccaatccttttatactcgggccaactgacatccagagagggaaagtgatttgcttaaggtcacagcccaaagtctctgacttccagcccagggcattttttgttccaacacagttgtctcttattagaagagtgtcctcagcacccacgagtttttattcttagagatagggtagtacagtaagcacagaaagggctcagagcaattccttacacagcataagggctgtgtaaatgttgctttcattgttgtgaaactgctgcttattagctgtgtgacccaggacaagttatttgatatgtctgagactatgattcctcctctgtaagagtaactctggttcatcagaattgttgaatagattagagattatgtgtatgaggcacctacctgcctgtatagtaggctctgagtaaatggtcacatcttttactgccccccaaggtgtgaggcaaccagcacatcatgcaacaccaagtcgctaacagttgttcctttctgtttgcaaaaggggggaatattagggctggatctgctgccacttccagggaagaactgcagcttcaattacttttcacttaaaaggaatattgcttgttttttttttttttatttgttagcatttattgggcacttactaggtggcaatcactgttctgtgcctttacacacattatgtaatttgtctgcacaacagtccctgtgatgtaagtactattattatcctaatatgatagataaggaaactaagtctcagaaggtgataatttacccagagttagttagtaagagggaaagccacaatttcaaacccagaacaatctggcttgaaaactatacccttaaccattctcggccaggaactgtgccaggccctggttgcagacaagtcctgcccacgtggacatcactcacatcaaggacagcagaggaggatggagcaccttcccaggttaaccattaccacctcaccagctgccaaatggcaagagggcaaggcgttggaaccgcatctttgagctcctccccttccctatccagcccgccccttgtactgcacccaccaatctgctggggcctctgaacacgtcaagcccgccaagttcctttcctttcctggcccaggtgtggagcccctggggagcacacgctggcatgacaggaagaagctgtgcctgagagctgttcaaaggagcatcttaatctgcacatgagagagacctcatcccattgctgttggtaaatacacttggtagcagagttggggtgctgcagagttcttccctccctaaaaagagttagttccatgtgagaacatctgtgactggttgcctttctcaagcttggtaagcacttggggcaagccgagtgtttgggttggaatctcaggccataaccatccagagagcgggcactcagtctccccagaagaaagcctggcaggagaggaaggcagcaaggtgtggggaaagcataggacttattcaaatttcagctttgccaagcactgcttacatggctctgggcctcattcactccgctgtagtgtggagatggtcattcctctccacctaagatgatttttagaggggctatatggtagacatgtgtgagcataggtgctaacagagtgcctggccccaggagatgctttgcaatgttcagtttcttccaccatctctgtgcagcaccaatgctgggcccccatgagaggactgtcctgggcatggtgggggagagaagggtgattgttctgcacatgtgtgacagtttatataccgttatatacatgcatggcaatttatataccaaagtggtggtgggaggtaattaaatttagagactgacaggagatcctcttttctgcatgtctctccaacacacatatacttaggtccaggtcccaggctttaggagctctgtgccagtgacattccttcctgtcatgggtccctttgcctctcccttctcccataatttcttctggaagtcaaagctctcactgccagggggattttgttctaagtagtggggggcattgccccctcctcctgccctccgaaggatttggccagcccattggctcctcgtaccaagcctgacaccctggtctgctgcaggggagagcactcttggtaaatgagaatggtttttctgagcccattgaagatccgtgtcctaactgtatgcacctcacgcttccagagggaaagagaaaacctctattcctccttgctgctgtgacactgctgctgtttgaggaagctgggaggaaaaggccttctctgcaaacctgccagcaattacagaactcactcagactctgcctggatgcaggctctggtttatgtctccctttgggacatctcttctgctttatttgaaacttccggcttcattaataggtactcttaatactcttatctcagcatgccttctgggtttactgaagcatcatgccagagcacattcttccttggaagttacagtttgttctgggggaggttttaggtgcttaactttgagacttgggttgtgagggatgggggatggagggaaggcagtggaagacagggagcgcctgacagctcagttttgagtgagccattaaaaaaaaaaaagaggctggatgcagtggctcatgcctataatcccagcactttgggaggccgaggtgggtggatcacctgaggtcaggagttcgagaccagcctggccaacatggcgaaaccctgtctctactaaaaatacaaaaattagctgggcatggtggtgggcacctgtaatcccagctactcaggaggctgaggcaggagaattgctggaacccaggtacagaggttgcagtgagccgagatcatgtcattgcactccagcctggcgatagagtgacactctgtctcaaaaaaaaaaaaaaaaaaaaaaagaaagaaagaaagaaagaaaggatggatggaggtgctgccctggatttgtctcagtgcatgtatcacaacagctgattattgtcaagtttgaagatgtcttttgttttccatctctgatttagagccattggatatgtgtatacttgtcttaacttttatgatgattgaatttagaaaagccaatcaaatcagctaaaattccagccaagttataatgtattcactggggaagcattgattcggtgccaaagcatgcccagcactagcactctttgtcaactgcttttcttcacttccttctgtctctgctgccgtcacctagcctgggcctcttgcacctggactgttccagtagcctgggcttcctgcttctgctcccagccctgcctctctgttcattctccccataggtggccagagtggcctatggaaaacttaaatcagattgtgtcgtgccctgttttaacctttccctggctactcaaggaaacagaataaaatccgattcccctgtcctggcctggagtgccctgtatcatctggccgctgccttcctcctgatatcatctcaagtttcttgttttctcagccacaggcgcccacctcagggcctttgccttggctgttctgcttttccagaatattcttgcctggctcttcacatgatgcttccttctcattttatcctcggagaggccgccgggacccccaaccacagtgtccacttcagtccctacctcatgtctaccacacacttccttcagggtacatcacaaactgaaatcgcctcgtttaggggtatgtttacttgtttatcatctgcctcactcaacttgtagatgagccccatgacatagggacatgtctgcattattttctactgaattcctggtacctcacagaatatctggttcaaaggtagggcctaataaatatttgtcaaatgaatgaatgacaaatgacttgagcagggtcctctgaaaaggaacgcctgtgctcggcgttgtaaggaggctttcttctcactccatctaagccagcgatggttcctcctccccctcaactgttgttagggtcccacacgccatatatcgttgtcacattggttataatgtatcatctttctcacttcctctctgagagcctactcttatgggtagatttccagtctcttacatctttatagctgctgaagaacccaactcatatcttacaaaacaggtgtgatcccacccttcaaaaactgttttaagtcaatatggtatttacaatgaatataacaactattttccccagaagaccttttcccttctcaaacattctaggatatattttgtgacatctgagctaaaaatgaccatggtaggtccacagagaatgtggcttcatcctgtcctgttagcagggagttacttccttggctttgttcctaatctttcctgttatgccctcttgtgatgggtttagggggagggacctaagtgccagtagcatttttatgggatgtctagagagaaaatgccaacctcctttccctcacataattgtgaatttgtattcttgaggtaaacttacctctgcagccatggctctgtggcttttcccagttaatattcatttatttgaataatttattgcaaacctttcccctccctcaactccaggaatatatatatctcgaaaactgcatttaaagaaaacaattgcaataaagacaatcatcgaaattaatgatttaacttaaaaggcctagcggcatctttctgccctactcagtaccctatggagtaagcatactcagtggcttcctttcccaggtacaggagtgcaggcaaacaaggttgaataacctgtccagtgccacagtctgcgcaaggctattgaaattcatgactctttctaacagttttcctgtaagaccaaactattcccaagggcctgagaagagaaatgggacagaagttatttaaaatgagttgtgaacattctcagagccatctcatactgctgtcctgataagccaaatagattagatatttggaattccccagaacatttatttgtaagatttgatttaagtcaatgtcacccaagcttatcattctcatggcatatttagaatttttgccatatttgcctaccacttatgtcccttatttacttgtttccttcaaattgactacctaatctgtataaatttaaataaagaggaaacaaaatattctaatggtaaatgcaaaagcaatattgggcaaaatagaaggtaatcataaaaataaatatatagctattaagatgttcaccagtgtacagtctgaaatcttataaattataccataagtagttcatctactgcagtttgtgaaacagagatttataaagtaaggctaactcttattgatcagagagaaaggaagacaggggaatgggaaagcaaaggaactactaaagctcacataatggtcagaaagttttagtctaaacttcgtgataaatttgcctcctcatgttgattggaaagtgtgatgaaggtttgtctcagtgacagatctgcctttgtccttccagtttgccatgggacaaattgtggctatttctttgcccagcaaaaggttttatagatactttgagccctccttggccataggcatggttaggcaatatatactttcatttgtcagttccacagactgtagtggctttgagaaacccctttaggtttagctggctcctgaatgaaaatgaatctggattcccatggactcaggtagtgagcagctcctaagagtagggctaagcactaaactgcatatatataatgtgttatatagttactgagcttaaggagctaaatagtaaattagggaattcatcaatggggggatagcccaggaactaggaaccattcttggtacctcaaacaagaagagatttcatacagggaattggatacttatagaatttctggaagaaaagaaatgagaagttacaaagaacagaagttagatctaggggtgctcagctatagtagtttggccttgaaaccaagagttcaaccagaccctcctaatatgtattattacagcaagaaagagggccctctgcctcaatcctcatgcaggtgcaccttattgacagaacccaaattaaacaaacctgtctgctgtcatgagggcttgaaaatcctcaaccttctttattgtgaaccctttcttggtgccatatattgtactgaaaacgttttacatgcagtaatttagttcttcatctgaatgtgatttcttcccattttagcctcagagaacctagtaatcttcctccctgacaaggtcacacagctgttaggaagctgagccataatgctaaacacaggtcaggctgaccctgaaactggtgtgcccagtcgctaagccacaccacctctctgtggagggaaggctggtggagataggttggtagcattgtactactccatctctgactttttctcatccaaaccttactaccacatgcccctacacaccccgagcagaattctgcaagattgttagattaagccaattttgttctcttcttcctgtggccttgctggtacttgctgcttgttaccatgtagctgagatttgcacgctttctctgattaggtagtctccccatggctctattgtctcttggcacttggcatgcatttcggcccccactttccttcttctccatcccctcccatttccatattgctgaacccaggtgaggctgaggccgggatatgatgagtcctgagtgccaggctaaggatgctgaactttatctcaaatggtatgaggggtcactggccccccacacgggtttgagagccagagagagagtgatgtgatggaggcatgtagaggatcgagcaggagaatgtgggcctggtcggcatgagaaaaggccagaatcagagagcagctaggagacaagagcagtagatgagtccccccacttcccctccacccctcctggtctttattggcttttcaaagagcatgaactctttccctaacaattcctgaatctcaggtggttttaggctctcagtatggccaccagtggttttattgtctgttggcatttgccatccatttcagctgcagttatgttctccacctcctcccatccccatattgcacagttcagaaggctaagactaggttcttaaaagcatttttctctcacttgtggagagttttgatcttagactatttccaagggtcaacttgtaaatgccattcattctctctttttcttttctgtgctattttttaatgccttgaccatgatgtggaagatttgattgaccttctgaccagagatactctggtcatgacagtgagtgggagcaagccagcttctgtggacacagacaatgagatatggcagctctggttggaacgagccagttctagcacaatggatggatttttgaattcagaaatacctgctttgaatccctactctgccactctgtgtggggagcttatagaacctggagatctttcttagcttccctgggcaccagttttcccttctgtacaggagggataacagtggccctcctcaggtggtcctgaggactcaatgaagtcaccggtgtaaagctttcaccatgatgggcatgtgtatggtatgagttctggaaatactgttcacctttccttttcagcttgttgggatctgtaggagatggttctgatcagcttaagtcagttgatgtttgtctgatgatttagcctctagggcttttctttcctagtggccatggtgtgattccctccctctggtctccagtaaaggcctcagcatagacagacacacattccagacccacccaggagaagaccagtgagccaacccagatcacagttgtctcccagtgaattgaagtccacaccaaacaccagttgatggttcatctaggagatgcagtgtacctactcagtctagttaaaatgtgtctcttctttcctgtaatagacagaagtgcactcccttctcacctcaccaagagaagtgctcagacgtgactgcttgaccgctccaacttctctgccagtgcagagagcttgaagcttttgcagttctccaagcatctggcccatcttatctagatgacatttggaattttaatcttctagttatgggttttcataaatctagtttgaaatcatcactgccaatctcctctgctgtgggaaaatggctttaaaaagatgtggggaggggatggtttgtgcatgaatgaagatgacgagaaatgacacttgttgttggaagggaggctggccacggggagccctcatgcttgtttctgactgtggataaagtactgctttagtttaactcgactttggaagcctgagttggggttttggggatctgcaactgataccgtgtcaaatactgtgtcagatgctttacatgggttatctcatagctgccttcatgtgttcccattttacagatagagaaaaaccgaggttctgatatattatgtaacttgcctggtgttaccaagtggatggtggagattttaaaatctaggtttagctgacttcaaagcttgtagttttcctggcaatgcctgacttcgacctatgaatctatggactcttggaaacaaaatccctaaatttacatatctgaaatatcagcactaccccagtcagtattcttgtaacccctttagcacacatcccctccactccgctcagaggaaatgcatgaggtggttaaggagaagaggtgagcagaggctgggtcctgcaagaccatgccaaggtctcaggggctgggactttatcttgaggataataggatgatattgaaagtcctaacagaagagtggcatgaagcaacttcagcaactattgagggccgacactagcagacgtgccttttcccgctgattgattgaaagcgttcttatgcccacatgaattccaagagaccctgctgcttcatcttcaagaactccagggattctgggccacaggtggggaactgccagcatagaacattttcacaggacttagaaaggtaaggaagagtgaggagagcgttccagattacagatcttcactgagttagttctacaattgctgagtgttgtgtccctgtcaccaaaacctgctaagaatcaacaaccctaagtgagtagacagaactacccagtggatcttagtgtgggcagatagcatgagatttggaatcagttgccctgtacaatgaacccggtatctcccaaattaggtgctgggctgcaactggccaggacgcccgttatagtggtgcggttgggggcagggggagggtgggtggcggggtgaagaactgctggttcagaagctcctgggcagcccttgagcttcagaaagtctgtcacctgcccctgccaggacagtccagcatttacttgtttttcctgcagagcatgtgcaaactgttaagggaatagagtcccaagtgcagtagagataatgaggtcaagtgtgcgggtgcttttcggaacccaccaccccccacacctgccctgttctttcctttctttgcctcccccttgctatattccacatatattggtggggacagcagagccctgagagactctactttatatggacttaagtgactttcatcatttaggaggctggaatatgctccttttcacaagagtaatttgatggagaaattattttaactgtccctgggtttcagcccagggctgcaaacttgaataggaaaatgcatcttggcagtttcctggagctcaagggagcccctcatcttctattaaattgacacactttgtttgattaatgcaggtatgacattagtgatggtttcacagtgcttctcccaacctcttctatccatcgcccccactacacctctgtcctccccactagctagattgacgttcctccctgcacactagagtttgctgtcctcgctggcagttctgtatagggagagtggggctgggcccacttctgacaagcctgggctttgtggggttctctggatattctagcacttggggagcagcccacagtctcacatagaggattccagttggcttccaggaggccaggcaaggctgccccctcctgggaacatgtatgggcttcatagaagttttcaagtctctcatggtttgagaagcaagaaaaacttcattctcttcaacatatcaaatgtaaaataattcttcttcccatttctaagtagacaccctaggacctgctcaaaaaaatccctctcttgaccaaatcatgttgctctgaaaatccaggttctgaatgaatcttaaaccaaattatcttgaaatgcaagcttagtgtgctccaacttgatagcttggcgattatttgcttttccaaaaagagagaaaaaaaggagaatgggtgtgtgtgtgtgtgtgtgtgtgtgtgtgtgtgtttgtatgcatgtgtgtatagatacatatgtgtatgtgtgtgtgtcttttgggaacttttgtgctttcattacaccatgattaaaatgtgaaggtgtgtggaagcaacattgggttctccaaaaacctgggatcccagtctggtctgtagccttgggtcatttatttaagcttcagaaaatttccccatcctagacaaggcatgaggccaaatgaacagtaggtcttacctcaggacccagatgtattctttaattagttcctgataagtttcctcatgaggttgttaggactgaacatttcagaagcaagcacaacagataactttatttttttagggaggttttgtattttaacccccgaagtaaccttatagtttatttttccttgtctgattacaatctcccaacttgctgacagttcacctttgaaatgagtcagctttgatcagggatgtggcagccagacaggtcatttttactgtctgtgacttagtccaaccagtttggcaacagcaggaccccatcccaatttagggaatggaaaatggtagtcagtctgtggtggtgcggcctgccccctgcctgtgggcagcagattgcccctctcctctttgcactgactgactgggtctccccaaaggcagagtcctttgccagccctttgctgtcctccttgggcacctctccctttgctgtgtcctctccaagcccagcattgcttcagattgctaaacgatacaaagtgtgtcctcactgcctcccactttccttttcctcttccctctctgaggcttacgtctgcctggatctttttcttttcagtagagcaaggcagtttcggcctccacctgaaagtggaagtatagggtcaggcacatggacctcctagccctgaggatcatgagccaggctaacaccattggggactactttcggaggatgtggctgagctggaatctgcccccatcttctggaggcacagtgacaaagaagggcagtctctggctgaatctgagttcaaatcccggcactatcacttactagctctgtaaccttgggcaagttacgtcacctgtgagctcctattttttcaaaatgtgaaattaagaggacaatagtcttgaactcccagggttgttgtgaggattcagtgataagtgcatataaagcatgtagtacggtgtatgccacatagtgtgtgcttaataagagctaaaatcattgcttttattttaataattatcattgctgaccttatccatcatcacccttgtccggaggagaatagccagggtggtgagagaaccaaagctttgttctatgaagagtatttataggaatttgaaactcttttatgatattatgactcgtgaaagagacactatgccaccttttatctccgaagggctagaaggattaatcactgggggtcttcaccaaactgggaccaaaattcaattcagtgggaggaagagttttctgagattagtgtcaaatggctcttataggaggtcagaaggtctttacccctggcagtttagggaaacttggcatggagcttgtgcaagggattcatgcatcaaggaggggtgggattgggctagagggcttggctggcctcttccattcccagaattctctgattctgggttccaggagcgcctgtgctcttttttctaaagaaagactacctagaggaatacgccacactgtatagcaactttatgtgattgctgaggcctccccagccacctgtgatctgtgaactggcctcttgttcttgcatcttttaaataagttaatgtccatgctcttaattttggttttggatgagttattatttctagatacttaaagcaattaggccttatagtgccagtattggttaagaatagtacatcaccaaggcaggagaatcacttaaggccaggagtttgaggctgcagtgagctatgctcatgccaccatactccagcctgggtgacagagtgagaccctgtctctcaaaaaaaaaaaaaaaaaaattacaccaatgttttttcatcctggagaatggttttgtggggatgagagagtcgatggggacaggcaatttgcaggacctctgctctcccacacaaatcagccttctaggaaagcctcagatgcacaaatttagaatgtattttctttcctaagaagccattaaccctaactaggaaaaacagacagaggggagcagctgcttcctctctgttataaacagccattttgatcacagaggcctcctttccattcctttccaggtttgtcatgttcttgcacagagacggttgtgtgttccaggctggggtttatttttaccagcaatacagatgtttctgctcttgtgcaaaatttcattaaagttcaaccagtggtttgctgtgggaggaggctgccaaggttaatatttctgcgatgtattcccttctgttcattcttggcaccaaaatattcccaggtgggcaggttgtgctggtgctgtatatcaaaactaaacaacagaatcaccagtttatctgttgaactcaggtggagtctctgatcacacagagcgcatcagctttgtcttgaaaatgcaggcagggagatactccctctggtgagtatctgctcaccctttaatgccctttagcagagaacgcctcacactgcagaggttaccttgggggccaagaaagcatttggcagcatgaaatgctacatccttccactttcccactgaaatggtgggagcagagcttcagatatgtgttcaaatcctgtctgtggcttaggcaagttacttacctctgtagagtgtcagtgtcttcatctgcaaaatggaattagtcatccctgcctcaaaggatattgtgaggcttcattgagatgctgcatataattaattgagatagagcagaatgccctggggcagggaagatgcttgtgagaggaaactgttaaatgagcacttgggggattcccccaatggtagaggataatgtatagtccagggaagcccctcattcttctccctgcttttgcaatggaaaaattctgcatgcagcagaaccagttcttctacctgagagcttgaaaaaggcaagttaaaagtaatagcaatctgacttgtttgacgtgtgtttcctctgcctcgccccatctgtggcttatcgaattggaaagtggtcaaacaaacatggcccttgtctaggaacaattggcaagggtagggtagagcttgaaaggggtgtggctaggattaaaggtgagacaaaagtgatatggtataaggtgatctgtggccaatttgcttaatgacttttactacttactttctgaatccaggtctactcattaggtcagtgagaagagccagacctcatgcactaaagagagcaggtgtgtgtgtatgtgtgtgtgtccttcaggtctctgcagatttgtagggtcatctggttaaaaatagataatgttcatactcgttttataagtctccattgaagaagggaatatggacaaaattattcattttcaattacaacgtcaccaaacgtatgtctagttatttaggattattttaatcagtactctttgtaagctatccctctcacatacctcagtgcagtggcaattacagttcccaaccccaagtcttgcaaggtatctaagtgctgaatgaatcatcaacaagagacagtcttttttagtccatttgaaatgcagggtggatcttattttaatcttgagaaggtcagttatcagtggttgaatctgtggatggtcttgtgggaggagcattctgttaatcagcatattgtgataaccaggacattccatctcctggctgtgttgaatgacaatgacatagtggataatgtgttcccttggtggtttctttgtaatccatcaaatctgtccagtcttctgtctgtccttccatccatctatttatccatccatccatctgatagacatttattggcacttgagttgacatgaaacttacaaggggatatggagataatgatcatagatcctgctgttagagaatttaacatgtgaaataggggataagacatgtaagaaactggatgaaaaagccaaggaaaacttgggggtgaagagtggcattctaacccagtgcttttgagaaacccgtaggatcccagtttatgaagactgtgcattcccactgcaggagtaaaggcccagaggctggaaagaggtgggtctttatgaggaatcaccagtagttgaattgggctgaagtgaaagggaggagtgggaaatcagggcacctgcttaagtggcagttcttgaaagtcaagttaaggaagtaggacttggttctgtaggtgcttgggaatggtttcgtggcaggggtggccaaaggaagactttctggccctcatttgaatctggatgcatgctgacagattctgacaggtcttccaatttttaaagattaagtgtcagctgagagatgaggcagtcttaatgatgggtgatggctgattcagcaaagccaggcatatgtagcaccacttacattttcttctctcatggcttctttcttttcagacctcttcttatttttagtttttgtcacttttattaacagtttctccactgtcacaggcattcctctaagacctactctccagcctcacgtctcagtcctctaggaatgagaattttgagatgggggtttggcgtccatggcttcttctatctttggaatctgtcccttggctataaataaggctgttgcttagtgccagtattgatggtatttgcagctgtcctctgggagatggactcagacgaataacccattttcaagaggacatggccattaggtgacagctatttatggttcctattgactagggccaaacctgaactgtcactgacattaaaatttcatgagctgtgagctgcctttccttatcaggctgtctctttccatttatttgaaatatctaaccatgtttatctaggttcttcaaaagataatcttgaggaacgcttgtgttgtggctgctgggactttaccaaacgtacttctcatccccgcaacatccttccaaaccagagcattcacatctccatttcacagaagagaacactgagggtcaaaaggttaaactgctatcccagagtcaccaggtcagttcataagtgacagagccagaattcaaaccgacttctgcctagaatcaaagcctggataatttccatgaaaccatgcgtgtctgatttctgaacctggaatttcactacagaggtttttatttatttattttgtcccctgatagctcagtcacttggagttaagtagttgattgaacatgcaatttttaaagctcattcatgctgaatttgctttagtgtggtagccagtgttccatctttatagagtttctttcccacactcttatatgaaaataaacaaggccctaaaatgtcaggcaagattccttctggctttgtaacctaatgtattttatagatggttgaattctccagtgaacatttcattggaaaatattcctttcctgacttctgtttctccatcaaagggatattacattgtaagtgataactatttcttagtggccttgacattgcagttctgtgtaggaaattatcctgcatcagtcacttctgttgtcatcagattcctttcatctcaagtacctgcatttcttcaacttaaaatttggaacatgatcaggcctggggccagggagatggaacctcttgatctctcatatcagtgttgattcttagaaagaagaaggtatgatgattgataacctggtctttgaaagcagaaaaccttggtcgaatgtcagctttgcttcttgttaactactagaccttggccagatcgtgtctctgaatttcagttgttttattttaaagtggagattcatttctaaagaggggatggagaatttcttttggtattctcatagaggctttgtatgctgatgctttggtgaattagaaaaagcaatgctagagaccctcctttttggggaacacttaagcctcgctgtcccactcaccatataatagattttctaaatatcaagaagtaacttgggtgtcagtgaaatgcccctctttcctctttcggagataattatctatatatctctatgtagagtgtgatatgatagctaaccctgcctgggcatcagaatcctcttgagacccttgaagggaaaagaaaaatgggcatccaaacctactgactcgcacacttcaaatatgaggcccaggcatctgtgtttcttaaaagctcccccaggaactctgatgcacagctagaattgagactagtcatgtaaccagcatgtggggcaaatgtgatgtgtgcattgcggacaaagcccgtggagttttcctgccatgggggtaaatgcgttagcaacccatggcctttctgttcattcatagaaaatcccatggtcatgataatttgcaaagatagtttcacatgacaaattagaatatcccttccacaatacaaaccaaagctccaaactggaattctggtcagaaccctgaagcaggagagtgaaaacagccggcctcctccaccctcaccttcctgctccacccccagggagctacacagaagacaaagatgcttatttagatgctgccttcttgagctggtttcctgttctgctaaaagctgggcctttcttttttggggcacatttagggtccctttttagaacccaaaatgcacctatgtgcacactctctccaatgagacatttgaattccttgccccaatggtgggggctgcaggccaatcccagcctggaaccatcccttggtgctaccactgaaccatcagccatgctcttctctctccctctagattctcagggcaggagtcaggccccaggccacagcatccctaactgcagggatatccactgcaggctccccagtgaccccactgaagttctcacccacccactaggtttgattgggtgagcaaaggatgtgctcatagcagtgttctccaatgataacctcctctcaaaaaattctctctctacacgttcacctgtttttctatcctccgtctgatacagcaggaaaagtcgtgaaactgactctttgatattccttgaaattctgcattttgcatatttgtcctgtgcttgcttactttggtaaccactaactgtggtattggtgcctcagcttaagccaacttaggagtggccactctgtcatgctgaattaccttcatagtggcaggtggctgtcaggtgagatgagcttggtattgagacctggctatgcgtccttaagcaagtgttttaacctctcttaaaaacaggactagtcacagaaactaagtctaagattgtgaggattaaatgtggcaaacacatataaaggacttagtgtgtggcacataggaagtgctcagtggtacccattatccagcctcagttccactaaaactccagccatcttagctgccctctttaaaacttcattcactgaggggcaccagctggagaggggttgcatcaccactccatgggggaacactcctctagctcagtcagctcctgactaggagctgtcagaagccaccaaggaaaggtcccattgagaactgagcacaaaagcggggtcacaagagctaactgaattaagcaagttatcaggcagtagaaaatgcagttagatttgcatccatgaagcagatggtctgcacaaaatgattaaattagttttattaagtttggaggaattaatttgtcactttattttttcttttatttattaaaaaaagaagagatgtgagtttgttatctctggcaaaagagatttatagcaagtttatctgctagtggaaaacaagagttatggtaggaccttaaaaaacaattgtctttttattgtctattaatagttggtacaattatgtagaatgtggcccagagaatagaaatgctgccacctattgctggtaaaacctggcttatgtttccagtcatatgggggatatttttttccccttagaaataaatcttcacttcatgggttattgagtatttaattcattttggagacatttttttgctactggtgttcttaggatctgatgttttctagtttattgattattaattacaatgtcttacatcaagtaaacttgagggaacctctggcatttttgagtccttcttttaatggtgaggaagaaccaaatgcagaatctttatctaaaaacaaatgggagcttttgagttagagctcagggttgttaactggagattcccaatacttattgtttgggcacaaatagttctttcatggcccttttgaatggatcaaagcaaaacctggagttttgaatggcttcttttttgttaagtccttttatcctgaacagttactaatgagtattctaggaaattcatgcatgcaggaagaatttcttgtgcataataactagggtataaactttatattcacatacccatgtatgttgtttgtgtgtttacacacacatgagagtttctgaaattttctgatctcaaatcaaacatcaggctagcattctgcccttgaaatggctaaatccacatgttatccatggaggattaagaattgggttttcaaacctggttgcacaccatagtcaactatggagctttgtaattgttcttttttaaaaaataaactttaagactagatttaattttacagaaaatttgatagtacagaaagttgccatataccccacccattattaacaactaatattcacatattagttagtgaacccatgaacccacactgaaatattatcaactaaagtccatactctattctgatttccttagtttttacctaatgacctttatctgtttcaggatcccatccaggatactacatttcatttagctctcatgcatccttagacttctctgggcttgacagcttctcagacttgccttgtttttgatgcttctaatggttttgaaaagttatagttagatattttgtagaatggacatcatcgctattgccccccaattgggatttgtctgatgcttttcccctaattagactgaagttgtaggttttggagaggaagaacacagaggtaaagtgacatttttcatcccatcctatcagggtcatgctatcaacatgacttgctaatgtttatgttaacctcgatcacctggctgagatagtgtttggccggtatcttcactgtaaagttactctttcccttttttccatgttttactctttgtgcagcccacacttaaccttgagagcagaacatctacatactttatttgaaattctatttacatggaagatttttctcttctatttatttagtcaatcatttctttgtggcagtatcaattatttcacactttgacttataatccaatactaccttattttgttgctcaaattattttgagcttggtcagctttggccattgggagctctttcagttggctcctgtgtcactttgacatactccatcattgtgttttggagtggggatatatgcctacattttggcactatactgtgctccaggcttattttaaattcttcctgccccagtccaagaatcatttctccaaggatccctggttcttttggttggagaatgctattgaaaccaagatcaggggctagatctgcttgttgctactgggctgttgttatttttagaacttttcagctgaaagaacaaggatatgtacacgtatctacgaatatcctatctagattcctttacgctgacatgctatatagatcagtatgtaatttatactgataaactatactatagtttataaactgaaagcagtttttagtttctatagagtcttcaattctaatccattaccacatggctcatcctagccttccatctttgttcatctgtaagctttcactccaacagtgagaacatcctgtgaagcttgttaataaacacacctgggcctgggccttatggcctgaggttgaggtagatgcccacctgggattttggcatctgtattttaataagctctacacagattgaactctcccaatataggctgtcacaatgccatatatttctcctttgtaccttttgtcaccgtttccctttggcatctttttataatatctttatttgacatccttatttgattaatatctgtcaactccctcaagacaataggctctgtgtcagttttgctcatcattctgtcctcagaaagggtgcattgtaggtatttattaaatatttgttgaatgaatgggtggaatgacacacagcaacactgaggaggaagagaaaaatgtgtgtgatttatcgaactcttcctacatgctaaacggctgtctagttgctttctaaatattatccagttcagggatttgaatcaggtccggctgacatcagaatccacaccctttctgttgtggagttcctgctggtaggaagcctcttgtcttctgctttgcatgtcatgggctctcctactggactggatggagctgtgtgggtggccaaggaggaggtcagagggggagaaatggcagcacccatttagagtgtcacccaggcctcattaggaaattgactcccatttggtttgggaaggggggtgttttttcctgccttttcatgctcacaatgaaggtgacattgatttacaagtcagtgggttggagcagggaagggaggcttctatgggtggaaaagatcaattaaatgattatcccagctgccacacactaatgcctttcttactgagtttcaaaatcaggaagcagaaggttaccacatttagccttttacaggaaatctaattgccaaccttgtggtgccaaggtttattagattgggaagagttgctcttagtggctggcagtttctggcatgacagaaagctttccactggccacctggaattgtaaatgactgcctcctcttcctttttgcgtgcttttgctaaagttttatgcagatagccttttgtgatttttatctttttgtgatttttatctggattctagggggatggtacttaagcttggtaagcagtcaaaaaaaatatttattcaattcctactatgtgctatgccctggtctagtggctgagaactgcagtggtgagcaaaacagatacgcgttgtctttagaatcctttgcctggaatggtcttcctatggcttagtggttcccagactgtagtatgcatgaggaccaccagaatgcttgttcaaacccagtctgctgattattttttccatcgcctttccatggtcctgtccacattgaaaaaaggcaatctcaagagcagaccagaattcagtccagcaagcaactcttgcacaaattgcacggctaagctgccaccccccacaatttctgattcaataggcctggagtggggcctgataatctgcatttatgatgagttcccaggccatgctaatgctgctggtctgggagaaccaccccctgagcctttgcatggttgctctcttcttatcagttgggtctctaatcaaatattacctgcttagagaggccattcttgatttcccaaccacattatccctccactcctggccattcactctctaatgcatcttcatagcatttattattctctaatattagtttgcttattttttattaccattttgtctctctctcctacctctcatcctcagtagaataaagcctcatgagagcacttccttagacactgttgaatcctctaagattatcagagtaccagagtatgtgctcaataaatacctgaatgaattaaataattacaagagtaatgagtcatatgaaggaaagacctaagatgccttggtagtgtaacaggtagacctaaggtggagcaaagatattgcatttcatcctacttggagcagtttctagatgtggccttaacacctgatttaaacactgcataccagagttttgtcttcaaggttacaggctgtgggatttgtctgcgatcatagcaggccactctggatttgcttagtttttccatcgcctttctatagtcctgtccacaatgaaaaaaggcaatcttaagaggagaccagaattcagtccagcaagcaactcttgcacaaattgcatcatgaagttgccaggcccctatctctgagcttggcaggaggcaaggcctgaaatttacttcttctaataaccttccacctgaagcctatactcattcccttgttggaatctggaatccggcacccatgccaatgtctcggtagccttttcataacctctacaaagttgaatgaaggctcaaactcttctttgcaggagtgagacctttcgatgaaacatgtagattcctctcctgcactggccttttagagaaatgtaagggcaggcactgttgttttttcttttcaacagagtcaagcaaaagatgaggcacatggaggcaccatgcgactaaaagctctgaggatgattgtcaaaaccccactggaggagttggaaagcatgtaaggttttgctcttgtgtggcctcagcagccactgcctggttcaagtgaagtttgcacagtcccttggcctagagcttcatgcccagcttttgccaagcgtgggccaagtgggggaatgattccccaggtttgtttgcctggggcagccaaagaaacagtgatttatttcccctgagtgtgtcatgaaaatgtaagcaccgagagttggattattttggagggtgagaatttgatgggggagatggagatggaagaattgcagcagtttggagtcagggctgggggccagagggccgcccagtgggttggggtaacataagctgccgctattcaggaggtggcctgtgtaagaaaatctgaccacagcgggtgcgtgacttcagctaaaattaaccttggaggcttcacacgcttccacagtgctttgaactagacactcccagagagggcatgggacgttgactgctgaggactgcgctgctgctgtgggttgagccatgcctgtaagcatcaacttatgggttcccgctcggggtcaaagtcgggattcctgtgaccattataaagtggtaagcaacctccagggatgttggcagggtctctggggagagacaatgaagtttatttgaattggacttgtgtttagagatggtttcaatttattttctatgcagagcagagaccacgagccctccaagcaggactttcatctgtggaaagctagaagagctaactgccacctttgtgctgcttttttgtttcatatgtccgcccagggtgagggctgggtggtgtatttttagagcaggtagagaaagatctgtctggacattgttggtggcctgagaaaatacaactgcataaaccaaaggccaagctgaggaagctgaaattgggaaggtcctggatgtcaacaggtgtggcaggtttcgcttgttttcttaattgtgggcctcagcaggtgcaaaagagttggaggagatgccagggagtactcctgagggcttcattgaaggagggacttgcttgggggaaactggaagcaatttcctgttcagtgagacccatggatgtcccgggaagggcccactgccctctccctcccctggccagggtgacctgaatggtatcatttaagctggaaggcatctgtacccatggctttccacttgctgccgagaatccatttgggagcatgcattcacagagcaaaaaggcaagatgcatttttattcctttatgcctccttaaccttcagacagttactgtaactcaggggctaatggcagtcctggtgcctgcagctgtgtggcgctctggttttacaatcagaatggccacttttttgtttgtttgttttgagagagtggatctcactatgttgcccaggctggtcttgaactcctgagcttaagcaatcctcctgcctcagccttctggagcagctgggactccagacttgagccaccatgcccaggtagaatggtcactttgatgtggtcagaggcaatggctttatgacagagagagaaccttcttagcctattcttcttgtaaaaatgctgtagtttaccctcccctcctaaaacttatccttctcccccacctatctaacccaacttcctaggcaacattagcattattaggtggcttggcaggtgcttattttctaggaaagagtgtgcttctcttatctgcttaatgcttactctatacagctgaccttggagtgatctattataaaaacgtttaaacccgcaaagcatttgctttggtgagcagatattctgtgtggccctttatgtacaaagataagaacgatgtgggtatgaaaggtgtagggaaaaaaacccctgcatgaagatacgttttcacacagttttgaggtcattttccatgtgagccactttactgagtcctctgagtatttgatatcctcttgttccttcatcctctgggtgtgtggctcattaaaggtggaaggctgctgggatattggacatgtgtgtcgtttgctctagatgtgtagcactacccaggccaagcacaattaatggggatgtccctgagttctcattattatttttaactcctggggtctaggctcactgccctgtggaagagatttcttttgagatagaatgttaaaaatagacatttcaataggaggcagctattgtatgtggttctgaagttggatgaacacatcttatatgcctgcatgggaattcccatcccatgctggacctgggtgattagacatagaattcaaattcccatcttcataggaacacaaggctccttccagttccatcctagaacttcttcttcatcgtggtcatctgaatgacctggcctgatttttgtaactgccttgtggcataaagatgactggactgagttggaatacctggtctgttagctggacagatgctaaccttgtccagctggtatctcactggcttcatccatgcaatggggagaatgcaagctgccaccgcccatgtttcccaggattgtggtgaggctcagattggattgtatttacaaaagaactttataaatggtaagcactgcagacaggaggcagagacagcactgttgttaggactttattattcttcttgagatgaatcaatcagggccttcttccaggactttggagaataaatagtatctttgtgcaaattgttcttttgtgctctgggccaggttgtcccctgggtagaggagacaccccttctttcctaggtgccagcttggtgtttggtagtcttcgtagtaaacgcctagtataataaaaataataaacatgaaaaacccgagatgccctcaggcctgagagctctgacatctgggctggagaagggcccggggcacaacggtcatttccactgtggccaagtctcttggccatggagttgccgagaaaggaatgaggctcccaaatggggaaggagcaggcaagcgcattcctagggccgggcagcgccagccactgctgggaattgcctgccttccagagttttttaaagcctttgctacacaactttcccacaagtgacacaacagtctttgccaggttctgtgcctctctgcccaacgggctggagggccatggccatttatgagaatgtcagatcttctctagtccctctgtaccttccttcacccctctgtccgttacccctccctgagtacttctgcaagtgtgctcataggtgcttcacattttttcctcattcaattcttcatctaagttggtgcagtagatgctattatgatctccacttcacagatgaagaagctgcatttgaagagtttaagtgacttgcctggacttggatacattagcagaaaattcagggaagtttatggctatagaataacatcaacacagaatatccgccctcctaagcaaaagcttccagggtttaaacattttgcaattgatcattctgaggtcagtgctttatggtccattgtttgtggttggcatcattatgtaaaaatatgtaaatatacctataatatctattatttataaacaaaatctaattttcaggcccttccgcctccctcttcaggtgaaaccagaggaggctcccaccacctttttttttcccctctgtgccttcggtcacagccccttatgcagaaaaagggactccacctggagccctctctggatctacttctcccagataaatcagtcggctgtgtaatctttcaggaaacctgacccctcatctcccaggggaaatccttaaactacccaccaccccactgctcaggtttcttgggtaagaaacatcctcaaataatcaccacgagtgcacacagtttgcctttggtgttgggaattttaataagcaatgtacaccttatatagccactcacctgccctggtctgaatggccctaagaaaacaaaaacaaaacaacaaaacaaaaatcctttaccattaaaaaaaatctcccaggctttccagagtgattatatagcctcacatcagtctcctggggttaaagcattgaggatcccattggaaatgtaaatgttttttgggaactgtgactcacctttctctgccagagctgtgtgcctgggacctagtaagccctgatggaatggaatgtgggtcaggtgagttttgatccccaagtcaggcagagacagttaggtccagtgtctgggaatgggggaacacctggagcggggcttttgggacgcctcagtgggtgatgaggtccgagttgggggagggagggcctgggcaaattgaggatggtcagtgtttgggagaccagtgccaaaaccaaagacactcatgtgaaaggagggagggggtggccaagagggcctttgagccagcagtccttgagcaggtgctctgtaacaagcacgctgagaggtcctgcaaagggaaaacttgagctcatgctctacccacttggccctgtaaataaagccgggtcactctcttaatggggagtaactgaaccttggctccagctcacttgctcctgtcccttcacctactaggaagcggaacttggcacctcttgtcctttctgagaaggattccacttgccctagaaagcaccagtaagaatacagattgcactggagatctccaaggggagagttcggatcgtattcagtctccctaaaggcccctcgatctcatctccaagccttcttgcccacccagatagcctctttgcaccccacaggcttcccagctccagatcttacctctctccctgaattccctttttttcatgcaaagcattttagcacagtctactgccccctaaatttgcatactcttacccatcattctacaaaacaaagagatttccagtttgggggaggggtaggggtaaggagggaaaataataactcatgtttttttcctgtcccacctgtgtgtatttagtgatttttttttttttttttttttttttttttttactccatctcacctgtctatactcagtgacgtttaacagttggctctccaaggagaaaagcctgataggtagtacttgccaattaccatggtgtaaatccttctaccaagactgattttaatttacccactctgagctgggaagagatgtacagtagtgcattattatatagtatttccctcatacagatataataggtgtaaataatctcatgaccataaacaatagtaaaatacagtaaaataattagaaagtgatgagttttaaatatttactatcactttaaaaatataattttaagtttatataatttaattattaaaatagtggctgtagttaacaatcagctccaaaatttactgaaaatgttacaaccaactctcttgagccagtccatgcctgccctggcataccactgtatgtgtgtttgtatctttgaaaatagcactttagcatccaccgtcgggtgggtcctactaccaagctactgaaattgtctcatggcagtgttacttaccagtgcctgctgtgggccttttgctatgactggtctaacagctacatgaaatatgttggttttatggactttataatctaggcagtgaaggggaacatacttattcatctgtcccacccattagtccatctgtctatttgtgcatcccccaccatttaatcattcatctctttttttccacccactcatccacgcttccatccatctgaacattcaccagtctgtttacccagatcttcctccctcccttcctccatccatttttactttcttcccttcatccatctacccacccaccagtaaatcaatgagtgcttgtttatcacgctcctgtagtgagtcaggtgttgtgcttgtgttttaaatatgtataaaacttgttctctactctatagaagctcctgattgagagagatgtgagtagttacaacagccaggataaaggcagatgcaaagtgctttcagaggtgagaagaaaaaatgagtaattctgttaggagtaggcaagcaggttgggaatggctttacggggactgacatttactttgcttttcagatttcaagtgggcatttcctaggtggtgggggaagggcaccctaggcagagagggcagcgtgtgaaaaggcacagaggctggggagcctgtcccacagggttgttttaattgccttctctgaactcccagttcacacagaagcctggcaggcagggttggcttctaggagaagggggagttctgctaagtggaggggaccagggaggcacatgggaccagagaacctgcccatagggactgagggttagagtagcatggaactgtggtgtgagggatgccaccagctgatgcacttgaaggcattttttagggacatggagatgacggaaataatgaaaggaaactaacagtaaaggcaccacctatgtgctaagcactttacaaacactgagtccccacaatagacacattagtctttacaacagataatagagtattatcccattttacaaatgtggaaactgaggcttagagagtggtggattgcccaaagccacaaagcctcagtgtagtctgtgtctaaacatgtgcagagttctgcggatctaatctctcattctatcccctcaacaatcctgagatgttaagcaacctgtcagacgtcaatcaagactccaaggtcttggctgggcatgataaggccagacgtcctagggagcctgtgcctagaaggtggagctgaggtgtttggctggatgaggacagctgacagtccctctgtctgcagtctgcaggtgaggggagctatggaagtttgaacaactggatggaggctacgacttaaaaggtcagtttgtgaccagaccagagagaggccttgtagtggcccaggttctcactacccacttaggtgtggctgccctgtcaggcagtggcactgattgatgtctgctgtcaataagtgtgcttgcagctgctcccaagcctttctgcaagggcctgattgccatcataccagaggaagcacttggaaggagaatgcatctgattagtcagtaactaatgaacacagggagaaaaaacacttgaaaaattcctagcagggctctgacatttggctttctggcagctagtagagattgtggttaaaagttgttcagatctgggttctaaggttggagagagtgggaggaagtgctgtagaaagggactcaattttgttctgaagtgaccagtaagaattccagttttcagcctcacttggacttatttgattttccagggagtttacagggagagctggagacatattttgccgtggtgagaggtggtagccgtgaggctggtcagcttgagtcagagggagcttcaccttttattagctatgtgatcctgtgcaccttaacctcttggagcctgttttccagtatgtaaaatggggctgatcatccattcaacaactgtttagtgaacacctactatgtgacaagggcagctctaaatgtttggtcctggcgtattggagctgttactccagtgagtgagagattgtagatgagatcacaggtacaaaacacctggcacacagtagacagaagcacagacttcctagcacataggggatagtgatcaaatgaggaaatgaataggaaagtactttctattatatgaagtatgaaacggggcattgagaggaagatcgagggccgggcgcagtggctcacgcctgtaatcccagcactttgggaggccgaggcgggcaaatcacgaggtcagaagattgagaccatcctggctaacacggtgaaaccccgtctctactaaaaatataaaaaattacccaggcgtggtggcaggcacctgtagtcccagctacttgggaggctgaggcaggagaatggtgtgaacccgggaggcggagcttgcagtgagccgagattgcgccactgcactccagcctgggcgacagagcgagactctgtctcaaaaaaaaaaaaaaaaaaaaagaggaagctcgtaggcactgaatgtgggttatcctgaggtgtggatgaagcaggcacctacaccctcatccttaaaatatcacctgtttctcccagcacgttcaccagcctggtttattttttttaaaggcatagtttcaaaacctctggaggtgctgtgtacacccacctgtggcttgttcatgttcccatcagacaatgtcaccattgtgtggctgtggtgccattcacaggcatgacccagtgtctgctgctgcatggggtcccagatcagccttgcacaccacagactggaagaactgggggactttgcccctgagtgtttccctacttggatacagtcctgcaatggtaactcatgttatattggcatttttgtttttgctacagtgagattgttgtgaaactatgtttgctttgtgctttggtgacatgggaaagtgtcagctcccctcttgggtctgttagtcctgagtgacaagtggccagccctgttcccagggtcaggggaaacactgtgatgggtattatgcaatatgcctttccctctctctctgctttttccgcactgctgtagcacttgaccttctgtggtagtggtttctgtgtgggcccctcagtaacagtgtggcatcattaggagccagttattgctttcaaaccccgcgtacttgtcacataacattgggaaagtcactttgcctctttgagcctcagtttcctcatctgtaagatggggaaaataatatctcccacagaggtgggttggaaactgaaggaatcccttgtttgtaaagtgttcacgttgcatggcatcatcttcatggtaattataatcacagctaacctgttgagcccttgccgtgtgtcaggcattggtagattatctcatttcaatctcacagtaaccagaatgggtgatccattttacagatgaggcaactgagtctcagatagggtaattctgggcaagttactaaaactatcaggaaatgcttggagcatgtttggaactaaattatctgactctaagaagtgttctcttaatgatttcaccgtagacatttggcagatggtagttactatcctacataagactggagcaagcattgccccctgcacaggtagatgctcaggcagtgttttcttcatgcaccaaggcacgcatgcagctctaagctacttaacttgatattcagaggcaaagttaggagtagggatagtcccaggatgtggaaaaagatgaaaatcctaattaatgagaagctgtgccactcttgctggtcacttgctctgtgtgagtatccctttgaaacaaaggcttctaggtgggcaggtattagggtttatctttgtttggtggttgtgcaggcaagtaggttactgcagataaaaagagaagaaaccagcagatggctcttcccctccccctgctgccttcttctgggtccagacagggatttataccctttggtataaatgttcatgttagccatattacaaaacatatgtcaagagcaaaggctggcaatacaattcctcatatgctcagatggggaatagagaacccattcacatctcagtgctcctggaacccagctttctaggagtcttacctggctcaagatcagctgagaaccaaagagccttccctgctgtaccctggggcagctcaaaggcgtgtcacaaaatccttctacttatgggttttccttgagggaaaagttccagcatggctcttgcttaaacagtatgtgctcttactttatacagagttttgtttgagacagggtctcgctctgttactcaagctgagtgcagtggtgatcaggggtcactgtagcctcgacctcctgggctcaaacaatcctcctgcctcagcctcttgagtagctggaaccacaggcacatgctaccacacctggctaatttattttattttgagatgcattttcacttttgtcgctcaggctggagtgcaatggcgtgttcttggctcactgtaaccactgcctcccaggttcaagtgattctcctgcctcagcctcccaagtagctgggattatgggtgcctaccaccatgcctggctaatttttgtatttttagtagagaaggggtttcaccatgttggccaggctgttctcaacctcctgacctcaggtgatctgcctaccttggcctcccaaagtgttggatttacaggcgtgagccaccgtgcccagcctatttcttatttttgtagagacagggtttcaccatgttgcctaggttggtcttaaactcctgggctcaagcaatctgactgcttcagcctcccaaagtgctgggattacaggtgtgagccactgtgcccagcttatacagtttctaaagactctggggtctcttaaggaaggtcgagcaactcagtaggtcctaaggacacatccttgtaaacatcaaaacactatcatttatagtgacgtccctggggccggggcctgtcggggactcgggggctaggggaaggataacattagaaatacccaatgtagatgacgggttgatgggtgcagcaaaccaccatggcacatgtatacctatgtaacaaacctgcacgttctacacacatatctgagaacttaaagtattaaaaaaaagacaagaaaagaaaagaaaaagtgcaattgtgttaattaaaaatcagatcattataatctgtttggaaaaaaatcccagtggaattgtttaaaatgtgtggctctcagaagtgtaaaccttcagcaatctagaatgacttattcctccaaaactcagtgttattcatttgaatattaataatggttgtttatttactacatactatgtgccagacactgtgttaaccacttatatgatctcatttaatctgtaaagcaactgtatatcaccactgcacaagttcagaaggacactgatgttcagaagggatatgactccccaagggtcacctagcttataaggcaaagccagagttcaaccctggtccacacctacacctgagactgtagacacttgcctttatgattttgtggttgcagaaagcccacaaatgtcccaagtaatacatcagaagatggcaaggatggggatagaatgatggtcattgccctagaggttgggcatgtggggcactgcagggacattgggcagaaccggacttttctgagaaaccggagagcagaaacccctgttgtgctgtgcagccttgagcaaaagacttgcttctctgtgctctgcctgtttctccagtgtgtagggctggggacaccatttcacctatttgactattgtaaggaggtggtttttaatcccaaggtgggggctacattaaaaggaggatacattaaaccgttaaggagagaggaaagtgggaaaaagccaccagctaatttcggtttcctcaccccatgcagctaaaaggttatgtggacttgtggttgatacctgtggggatgggtatcatactccttgctagatgctgcagatgcaggaatgaatgtgtcaccagcttagctcttgataacaaatggtgcatttcgattttcttaaaattgtgaacaattgaataagcagtgacattctttgtggtgttcaaggacagaatgaacactctactattgttgcaaaatcattttttatactccagagcattcagaactaaaccatttaaccacgtactgctcagtcttagaaatgacattgtgttggctaggtgtggtggctcatgcctgtaatcccagcactttgggaggctgaggagggcgatcacttgaggccaggagtttgagactagccaggccaacatggtgaaaccccatctctaccaaaaatacaaaaattagctgggcatggtggtgcacacctttaatcccagctacttgggaggctgtggcaggagaatcacttgaacccaggagatggaggttgcagtgagccaagatcacacccctgcactccagcctgggagacagagtgagactctgtctcaaaaaaaaaaaaaaaaaaaaaaaaaaaaaaggcattatatgatgacattaccaaagtctagagtgaggcttcctgaattggggccaaacagtagcattccccttacaatcaatccactggaaatgcctcagatgctaaacgactggtttactttaaacattagtctccacactggcatttccttctaagaaatacagtttgctctgtttctcctggagctgctaacctgatgccatctgcctctggatccatcaggctgcctggcatatccatctgcatttatagtttggtagctaaggctccattctagcactttcagtgcagttgttttgcagaatttttcttgggttctttagtgctacccggcttcatttgagggctaattgcagtataaacttagcagtgttattatcccctttggtttaacatggtacaattattatcagtttttgttattacaactaatgattaggttctttacttgaattgatctgtcaaaatgttctcttttggatttcagcctgtttgatgtggaatgatgtggagttataagcaaacaaatgatgcactccttaaaattctgtcaggggtaataaagtgaatcaaaatgaattcactgtttagctgtcttagctttccttccccttttatcttgtcaagcctttgacagcagcttctctccctcacagagcagttctggagcactgagtttttggttagaagggatgggcagaggggtacctctgcaagatggagtgattggagcaagaggatggctggactcattcttgggtactagtgtcaaaggatcctagagactttctcgtgaaatgacttgatgatttagaattggaattggggatgggatggtggttttggtctttcctgctgttctttgtccaatcagtttctactgaaacttcacagctatccacctgggggcaaaccaggatgaagaatcaatgggctcctggggaaaaagcaacagcagccctcaattttccatcattttagggaatgaaagcctttggagaaaacaattctggatagctgaggctcagacaggaagcctgcttgctttaagcccttactcaaaatcttgagcccttactcaaaacgcacattgctccgtttttgctgaattgctggacctgatgaaatctatctttgatgactaaagaaattataagtttatttttcaagggtaccccttggaagaatgattttccttgcatgagctaatgaaacagcaagtgaaggagatggggctgaatttatgtccatgattagcatggcccatgaacactgacttaaaaaataaatctaggtgttttcttgattcacttcaaaaagttgagagctggggacagggagggaagggagaggaaactccagataattaatgatccttgtgaaatggtttctgattaatgagcctgagctatggagtgatttattttccctgctccctgctctttttaatcaataaagagattctgattggaggatttgctgagagcccacatcatgtaagtctcaagtgtaatcagtttcccaagatttgccctttttctccatattcagctctacctggcgaccacttaccagcctcctgcggtgggccagcccctgtgacgcactaccaggagtgcagagatgggtgagtgggagtggaaaggtggtgccagcatacacgttctctacatctgctatatcacaggctgctgaggtttgggtcaggaaattaagagggacttgatgggggacaggcattggaattaagctgggtgagatggcctcaggcagcagaggcacctgggcagaggggatagactgagttcagagagagggaagtgtggggtgtgtccagttttcctgagggttatcgtattattactactgagcatgtggtatgtgtaggtgtatcatttcatttggtccttataacatagactggcagactttctgtgaagagctggtagtcagtacttgaggttttgtgggccacaggtcactcggtcacaactgctcggctttgctttgtagcacgaaagcaaccagagaccataaatggatgagtctgtgtcctgatacctgtcccgaggttgttgaccgcctatttgtttacataaataggtggtcagctagaattggcccgggttgcagtttgccagccgctgccttataatatgtttgatataatccctgttttatggaggataaaaccaaagaacagaaagattagtagaaactaacattgcccagggccaagggccagcttgactagctcagattccaaaggctgcattcttccacacacgctgcctccccttcaaaggctggaggactttctgggacagatggatgataaggctgccttgactgaagtgtgaagagttagcctttattatttttattatttttttaattttaaaaaattgttttaagaagtttaaaaacaggcatgcttaattagcataatactgaatgacagccaatcacaaactgaatttttaaagtgggaagtgtttgctcctggtgtggtgcaccggcctgtaatctgggaatcccagcattctgcgagcccacgcccaggcctaggagggaggatcctttgttctatgagtttcacaagcctaggtagtagagcggaatcccgtctctaccaaggggaggaaggggagggtggggagggaatcaacaatgagctgggcgtgatggcaccatctgtagtcccagctactcgggaggctgaagcaggatgatcatttgagtcagggaagctggctgagttcgaagctgcagtgagctttgattaccccactgcaccccagcctgggagacagagtgagaccttgactcttaaaaacaattttttaagggggggatggtataaaatagatataaaatttaccattttaaccatttttcacatatacaatttagtggcattatgtacattcatgtaacaaatggtatataaccatcaccattatttatctccagaactttttcaacatcccaaaccaaaactctgtacccataaaacttccctttcctccctctgcccagacccttttaacccctattctacttcgtctctatgaatttgattcttgtaggtacctctgtaagtggaaacatgcaatattgtccttttgtatctggcttatttcacttagaattacgttttcaaggttcattcatgttgtaacatgtttcagaatttcattcctttttcaggctggagtgcaatgatgcatgacggctcactgcagccttgacctacagggctcaggtgatccccccacgtcagcctcctcagtagctgtgactatgggcacgtgccatcacacccggctaattttttgtgttttttgtagggagggggtttcaccacattgcccaggatggtcttgaactcctgggctcaagtttgcctttaattcagtgggaagtggggagccattgatgattttttgaacgggtaattagattagagctgcgccctaggaaagttcgtttggcattggtgtgtaggtaaatcaaagttgagagaagagctcttgtttcagaatgagaagttcactttggcagagccgtttccaaccactctatcctgtagaagttcttgtgagtgtacctgatacttgtgtggcctcaccgtggctctataatcgcagtgtgtgtgtatgtgcacttgttgaaataagtttaaccttggcttcttgctgtgttgtgcaaactcacaaagaaacctagttgtagagacagtatgtctattttaaagaaccttaatcatctaagaagggatgagctgaggcacagcatctcatcccactcagctgtgcccttgttgatgttcacttctcactcagctgatgttttaggtgcacgtggctttaaactgtaaacttcatggtccctcccacgtggctgaggaaatccctccagggtttgagagagcagtgtggtgcatcccctagttagggaaggaagccttgctttatataccagcctggccggtttctgacttgtttttctttgacactgtgccatactttgttattccaggtaggggatattccagactcttgaaatttggctgtgagaaggggaagaaatccttgagtcatttgtatcctggagattcagggtggaggctgtggccgattttgttatgtccatttcacgaagctgttaataaaattttttattactaacttttatttactgaacacttagcatgtgccagattctgtgacctttgtatgtatgagctcatttcatcttcataataccaatgatgtaggtatcattatcttgcaaatgacaacacttaggccagagggcacagagggaattgatagcatagaagctaagattaaagcaactctgtcagttccagagcacgcctctttattacccttctccccaattgccttcacttcctgagccccagcatggatcaggacaggcacttccatatagtcccactctgagtcttcacatcgaccttctgaagcaggccttattgtactcattttacaggtgagtaaactgaagcccagaaaagtagagtcacttatccaaaggcattcagatagcaagggaaagatctaggtttgggttttgattacttttaaaatctgggaccgggtgcggtggctcacgcctgtaatcctagcactttgggaggctgaggtgggcagatcacaaggccaggaattagagaccagcctggccaacatggtgaagcctcatctctactaaaaatacaaaaattagccaagcgtggtggcatgcacctgtaatcccagctacttgggaggctgaagcaggagaatttcttgaacccgggaggcggaggttgcagtgagccgagatcacgccactgcactccaggctgggtgacagaacgagactctgtcttgggaaaaaataaataaaaataaaataagataaattctttcactgagaacataatagaggcatgaacctagagtcagtaggaggatgccacggaagggatgaataactcgattaacattcacatttgtattcagagaggcattgcaggatgtcaaagggattgtaaaataggttagtctgggctcaaatcctggctctgccacttatttgtgaccttggacaggttactttacctttctgctcttcagttttctcctctgaaaagtggacacaataataacctctgccacatagaatgaagattgaatgagttaacgtgtgtaaaatgtttatgtcagtgcctggcatgtagtaggcactgtatgttagttggatttattaagctccttctctgcataaggcactctttcaaaagtgctcttgtaggtacttggcatacgtcattaaacaaaacatacccaaatccctactcttgtggagcctacagaaccgggacctgaacccatgtctgcttcttttccttttaatgtttattttccttcctctctccctcttaataattttctttaatgatcttttaaatttcaagttggctattgtcattacaaaggtgatggggtctacttcctgagccttctttgtgcttataaaattgaaaatactcttgctttactggatcgttggtctctgacaactggagagtcacggggaaggagactagcatggatttaaggattggatccttgggctgtgttgtgaaatagaaggtcactgtgggtgcacctttgcagtggaagacagagcttctaggtgggtgggtggtggacaggtgctacagctctcatctcttcaggaaccagaagatgcagctccacctcatcacttcctggtatgaggccctcatggtccccaggtggagtagccagagatgctacctccttagaaggtctctgcttggcaaacctgaccccggctcctgttcccattccaggagtgttgcggggggggggggggcgcgatggggagtggggggggatgaccattgtgtgggattacactgggaaaggcatttggaagaacaggatggagggtgaggatgagaccatatgctgctctgggagtcacatggatcctcggagcaggcctactggttgaggtagaatgatcaccttcatcattttggtggagacatcatgggattagtacttgagcctgttgtcactaaccagttgaggcaggacattctccttttgaccaatcatttgttcctatccatttgaaaaaaagaggtgctgataccctaaggcctacatgttcacatatacactcttctgcaaactcacaagtccatgcatggaacttggcactcaaaatcagaaggttttttgttttgtttttggctttgatggctggggagaaaattttcaggcaagagttttcttgtgcttgttggcctgtttcgaaagaaaatattcttctttcctgaccattctgtgaccaggaagagcaggtcagatatgttccccaagggggtctgttctcctgattccatgggtcagccagtctttgccttctaaaatgctgcacacaacagtgttgtgtttaaatatgttggaatttgcttggttttgttcacagaatcccaacagtgaaaatgatgcctggcttttaaattaaaccgattaaatttgagattattgtgaggccataaataacttcactcacacaagagtaattgaaggggctctgttttcatacttggcttcttttcaagggacccaggctcctgagaactcagaatagctcaatagccctccttaccctgaaatggcccattaagagatgcctgttgggtggtaacctccccatacgttttctcaataaagagaaaaagatgggaaggggtgggggagactttgcttgcatctagagtcgcagcctctcaaagctgcagcctctcaaagccgtctggagcagactgtttagttctgtgtcccctgtctcattcagccctctgcatgttttgaagctttctttagtttttccctgaatcttgacggcagtcctctcaataggctaaggcccagctatggttagctgaatgcgtgatcagcacaatgcactgaattttaatggtgctggctggccctgaaagctcaccaatgggacagtggccactgtgccggcccgagcagctgcctcagactctgagaggggatccgactggcttcctaaagttgcctgtttgctttttttacagatctacacagactgggccaatcattacctagccaaatccggccacaagcgtctcatcagggatctccagcaagatgtgacagatggcgtcctcctggcccagattatccaggttgtgggtaagagcagattttaccttgggggtaatgagttacagtggagccatctcaaaaggccggggtgaggggaacagagcactgaaatctctcagaaggcagctttctgtctcatgtcttgacaatttatttgatttgtgttttgactaagttgtgtgagtaccagcttgattttatgcttttcctgttaaggtcacatacacagaaatatcatcttgattctcttagaagaaaggctggccaaggccagagggaaatgctggtggtttggggaagatgtgttctgcaccacttcttgcctcccattatctttctggctctctcatttccccctttggatggtacttttgtggattactctggaaatatttccaaaaaaaaagtaacgtggggctggtttaatcctgccaactctacttgggtctgacaaatcaaaggctaagactccagagaggattagatggtccgggttaatactaggggaagggaacttgagcagtggaatttgtcatgccttgaccatgtgctgggaggagagagttcctccagtgaaggcacgtgggtggatactggccacagctttgccttgggccttaaggtaaccaccccatgggcctgactgagagcccagagcagacagaggaggcttacaggtcaattggacagcattagcctgattattgttactggtagccttggccaagggagaaggtgcaaggagaggacagggcccagcctctctggcatgttgttgtggaaaagttgcttacccttcaagtgtgagaagtagtctttcatagttggagctctgctcaaatccgtggagtacgtacctgaaaacacagaaggttggccttagctgaaactgttggactactgctgccattcaaagagaaaggagtttgttttccctgttgtcttgtgattgatttcttagactacctgccattgattctcctcttctcctttttcctcctctccctgtattagttttctgttgctgtataacaaattatcacaaacttagccacttaaaacaacatgtctttattatctcacagcttttgtgcatcagaagtctaggcatagcttagctgggtgcctctgcaaggcttcagtcaagctgttgcccagggttgcattctcatctggaggcttaactggggaagggtttgcttctatgttcactcagtttgttggctgaactaattttcttgctgttataagactgtgggccctggcttcttggtggctgtcagctggaggccaccatcacctcctagaagctgctctcagctccttgccacatgggcctcccaatatctgcctgcttcctcaatgccagcatgggagaaagcttctggaacaagtctgctaacaaggtagaatcttacctaacttaacataatcatgggaatggcatcttaccagctttgcaatagtctattggttagaagcaagtcacaggtccctacactcaaaggggacaggatgatacaagggcatgaataccaaagtgcaggcatcattaggggtcgctgtaaagtctgtctgccacattcctttttccaattcttcctcttcctcttactcttcatcattattgtccaaagctcttttaaactatctctcattttctcaaaacccttttgaagtaggtggtattctctccattttacagatgcagaaattgaggcccggtgaagcttagtagtccaatgtcacctgactagtctccatgggaattctaacccaggcagtctgcttctaaagcttctgttctttgctctgctgtattatattactttttactccagagatgcttaacttagtgcggggccttgtcctccttcactttagtaaccacttattgagcaccaatgtgttccagttctgtactccttgctaagaataaataacaaatgtggaaggctgagacctcagaagaaggggtaccttttttttttttctttggtaggatggtcatggaaataccacttgcatctgagctgggttttgaagcccacatcagcagaatcacattatgcatgtgggcctactttgactgagttttgcagctgtgcagagtgtttctacctgaaaacttcccaggttttagcacaggcagcaagagagggaatataaaaaggatcatactgagaggtcttatattcattccagctccatccctcctgactgtgggatcagctgtgctgcctgtttctccatctttaaaatgaggatattcatgcttgttttatctgatcttacagcagtcttatgaaattcaagttaggtatcaaatatgacataagtttgaaatctatggcatgttccagatagcacttggcagcagctacctagaaaggtatgtatggaaggatgatgaggtctcaatatctgtgtcagtatgttgtgatagattagtcatgtctgccttgggctcagaagaggcaaatgggagtatgtatgttgtgcattttctaaacatagtgctatgaaaatgtaagttagcagttttatcattgctcaggatgatgcttccctgaatctattcagatgagatgaacttccctagacagtggcatctttaggcctagggtactggtctgcagttccagagacccaagttagcaccagttgtccaggccacacctgaggccactaaattgcttccctaaaccctccaccctccaacacaggatcgctttgtccagagactcctcaataaggctggatatcagcatgtgactctctcgccagactggctgtgctggggcttggaaactctgctctgtatgtagagaacaggctaaaaggagtgagaagacagcagttgtaggcatctcctgtgtgacttctttcctcagttgtctatcagccagctcagagcatttactcttagattgtcttatgaacacaggtctcttggtgagaggggggagaagcatcttctgactaggatgctgaactattggccatttgaacactttgcttttcaagtccatgctttccgccatacatgcccattaaaagaaaatgtaaaaatatatttgtatgtgtacacatatttaatatacacatatgtatgtatatatagatatccatatatctatatatacatacataaaattttctacataaaattttatatatatctacataaaattttctacataaaattttatatatatctacataaaattttcccagaattggaatcttactgacttcatcttatactggacagaattctagtggctatacttgttctttgactggcaagctcctacttattcttgaaaagtgagtttctctttgagacctttcctagctccccgacacagaaccagagggacctccctctatcatcccaccagctgctgtcttgggcctgggtcttagttgtcttcctttctgggttcccaacatttagcatggtgccttgcatgcagtgatgttcaggaaaagttgagaggattagggataagaattttattcactaccagcctgggttggattgtttccaataggtggcccgaatgtttccccttctcaacatttagtactccactaaacattcctctaaattgtatgtcacacctttctactttctagggatctaccacagctctcaactgtcaggtttggaaaggacctttaaaagctccgatctgggccaggcgcggtggctcacgcctgtaatcccagcactttgggaggccgaggcgggtggatcatgaggtcaggagatcgagaccatcctggctaacaaggtgaaaccccgtctctactaaaaatacaaaaaattagccgggcgcggtggcgggcgcctgtagtcccagctgctcgggaggctgaggcaggagaatggcgtgaacccgggaagcggagcttgcagtgagccgagattgcgccactgcagtccgcagtccggcctgggcgacagagcgagactctgtctcaaaaaaaaaaaaaaaaaagctccgatctgatgaatgaattgcttctataaaaagtagtcaacaacctctattaattacttcctgtgatgggcagcttactaccttttcaggcactagttctaatggtgaagagttggaatccttcaaaagctcttttcttagattcagactgctataacaaaataccagactgagtggcatataaacaaaagacatttatttcttatgattctggaggctggaagtcaaagatcaaggtgctggcagattctatgtcttgggagggcccacttcctcatttgcagacagccatcttttcaccgtgtccttccatggtggaaggcgtgatccagctctcttgggcctgttttataaggaaactaatcctgttcatgagatctttaccctcatgacctaattatctcccaaaggccccatctccaaacaccattacattagggattaaacctgaatatatgaattttgggaggacacaaacattcagaccacagcagctcttcttttattaagtcctccccttggtagtgtcattccctgtagggctacaaagaataatccaatctggggacagtgtgaacatcaaaatcaattgaggacaacagtggattatagccactaaatagaataggaatccacaagcctataataataaatagatacatttaaaaatagatatatcaatggaggagaagagagggctggactctacaggagaacgctgactgatagagggagttgcagccttctggtgaatgggagttaaggcaagaatcatcaacggatgctgaaatctagagggggaaatttgaggaggagcaggattttcgcatagtctcaaaatatctctctattgattgcttattagctgcaaggggaaacaaagtaagcactaattggagtatccagatcacatcatgactaggtgatcaaaattacatcactggtgagggacagatggacgtcatgtgcttcctgaggtgataccctgagaagaacacaacatcagttatgctatatgccagtcagggatggaaaacctgaaactaatcataaggaatctcagacaaacccaaattgtggaacattctattaaaaaaaaaaactgggctacattgttcaaaaatgtgaatgctgtggaagacaaaggctgagaaactgttccaggatgaaggagactaaagagatgtgacagctaaatgtactacgtgatcctgaactgcatcctgtgcagagcaatcacatggtctaaaggacattttttactcaattggcaaaactggaatgttggaattaaatcagtgttaaattgccagaatttatagctgcactatggaagacaatatactagttctttggaaataaacactaagcataagaagcaaagggcataatctatgtggcttactctgaaatggctcagaagaaagatgatatgtgtgccttacagataaaggaggggaggagagggagaaaggaaaggagaatggatgatgtatgggggaattctctatactattcctgtgacttttctgtaagtttgaagttgtatcaaaatgaaaagttaaaaagaaaacatatctaaatgaaggcctatcaaaatctgtaggcagcacgattgtgccttttaagggacagccgctttctaggcccaggaggagtgtagtgatgatggcatggttgaggacccactccatcgtgggtcaggtgctcagacccgacctatgatggagtggggatggtgggagggtgtcaatcacagaaaggttcctcaaggaacttacctataagccaagacttcagactttattaaagtgagacaggcaaagcagtcagggagggcattcccagcagagaaaatagtgtgtagagaggagaggagagccagagggccagcaaggcaaagtcgggcagggccaccaggtataaggcaatgaattctgggctttagcctaagaacaagggccagtggttgaagagttgatttttcaggctgagaagtaacatctgatgtgtaacttcaaggaaaaacttaaatggtttttgttttgttttattttgagacagggtctcactctgtcacccaggctggagtgcagtgttacgatcttggctcactgaggcctctgcctcccgggttcaagcaattctcccacctcagcctcccgagtagctgcgattgtaggcatacaccaccatgcccagctaatttttgtatttttagtagagacagggttttgccatattggctaggctggtctggaactcctggcctcaagtgatctgcccacctcggcctcccaaagtgctgggattataggtgtgagccacatgcctggccttaaatgcttttcacatgcgctgttcttaagtcttcatctatcccagacacccctggagctgggcttcctagatagtgggattgtttgcgacttttctgccatcatcttctataaggcagaagaaagtgggccttttgctgctgctctttaggagccttcctttggtggctaaggttggatctgtgtgttcaacgtcttgttagtgtgattatcttcttgagtcatgagcttccccaagttggctgttgcctgccagcccatcacagtggcatctctgtgaattattaagaaggtttaagaggccaggataaacagcatgaatcaagagagagacaggcctccctcctttgcttacgttgctgtcacacagggaggatgccagaagaggttggagcaaggaaagcagggagcgagagagaaggggtgggagaaaaggggataagagttgagagaggaaggaaaagatgaacaaaggaggactggagaaaaagggagcaaagagagagagagaatttcttcttagaagtgggaagacctgatagcagcttcttttccaccaccatttgggctgcctctgaacacaaccaggaaattcagacaacatgtaggactatcccttctttctgttgatgatctactaccattatgtgaccctgggtaagtcatttacctttctggggagccagtttttgtctcttcccattggcagggttgttaactgccagggatgataagtgcatagatgcacaagctatgttgaaatgttctgaatcctttaatgaagtcttttgaaaagtaataagcttgatatcactgttcttattttaaaagtgcactgatgctttccagtcactaactagtcaccttgcatgcaggcaggttactgcattagtggggctaagaaagtcttgaatacgctgggataaataaattaccattggcacttaaggatgccagttttaatcacagatgaggactttggggataagtgcctttgtttctttgattatctgcttttgggatgcagccaaagaccccctgccctgagttactaaattcagctttgaagaccaagctcttccttcttaccagcagaatcagagctgctattagcactctaattatttatgacaaccataggaattcctgggaatttaagtaaaggagaagtatttcaagtatatgaaactggaaactaggaggcccaaaactcattttgtaattttattaattatttattttgagattggattagtcatttgattcatctcttcccgtgtactctttagagtggttatatttaggctttaccccatcagtttattttgacttttgtaaaatggaagtattaggcttgtaagagccatgatatttaaattcaaagagcacctgactgggtttaggtgacagaccatgaaaaggaattagatgagaaattagaccaagccctttggtttcattattcaggtggcatataaagaatctttaaagtgtcccaaatgacttattaggatcacagttatccgtctttcactgtaatgagcactaatgacctaatgctgaactgggtattgatcagaatccaatgacttatgactttggccatcatgagtatccatttggaagacaccttgactggccttgattctcaaaagctgcatatttattctctccaatgttgagtgtcaaaatccaaggtcagagctcatgcctgccataatttcccaggtatggaagagtgccatctgtcaagtgtttggtttttttggactttagtatatacatctgtattataaatggaaggatagctgcctgaaaataggcagctattcttgattcatctcaatgttcaagaatcaagatttcttgattcattgagatattcagaagacttatttcttagttccactcaacaagtatttattgtgtggctcctgtgtgccagacactgtgctaagctctggggtgactgtagaaaacaaagcagataagaatctctattcttatgaagtttacaagctagcaatatattctggctcattatattttctaataaacagaagaacaaacatctatgagttattccattcagtgggcatcttgtttgtgcttttcatggcacctcttttgggagcaaggctttctacaatgcctatcctagtgttcttatattaagaggagttgagaaaatgcaattagatctctgaagattgggattttcccaggtgggtcataaaccttaacatctattacttctggcaggttctaaaaaaaaggtgtagattagactgaatatatactaaccagtctgtcttatggtaattagatttttaaacaattttctgccactagcttgcttcttaattttcacttgtctctcaagatagaaacagagaaaaaatgaattcaatttgagataatgattcaggtttctaaaatcttggaggcttgggacactttgattctattatctttttcagacagtttccaatggcttttctctttttggaagttttaggtatcatatttattaaaatatgatatgattttatttggggaattcaattttgtgagcagttattgagctcaaaggatacagatgtgaaaggtaaactatacacgtctgctaggctctcacagcatattttggggaaacaagaaaaggaggaattatgtattggatgattaagaacaaaacagaggcaggtacagggtgctgtgaggacagaggcctgagtgtatctttcccttctgtgagtgaggacatgggattgcagagggagcatataaaggtttcaagaggaagctaacccttagtcctttactgtggagccctagctgagtttccaaactgagacggagatatcaaaaggacaatttttatatacaatacgtattattgggttcatgatactaccatttagagaatacttactacgtgttgggcaccgtgctaagcattttactggcatcatctaattctaattgcttctcttgtgaagcaggtagtattaactgtgttttatagatgaggaaactgtgacccaaagaggtcgagtgacatgcctgatgtcacacgctaagaagctctgcagctggaattcacgctaacgtatctttgcctccaaagtcagtgttctaaccactatgctacggcctttcttgtgctgctgtattctcaaacacagtctctccatagatatcttggactgtgttatgccagggactcctccatacttacgatgaactgcattcacccagggaagctgggccagtcctcctttgtattagtacttgatttcctgtgaatgcaatgcaacctctttccatcacttctctaagtagctggacacacatatgtgtgtcccttgatctaatttggacttactgtgtggcgttggtcaagtcacatagtgagaaagtgatgaagtctcactttctcattttccccatttgccactgctttgggaatagttattaggacaaacaaaagcaatattaatctggccaaagatggagtgagatgctttcatttgtggcttttttctctgggagctgagttgtagctggactgatccactctgaactattccgtcttttgtgacggttgtatttgcctttccaagagcctaaagcacaatcacagctagctcactctctttcccagtctccaagcatttccacgatgccccttcactccaagactgtcatcgatgcagttgtctctgttttagatgacgaccttgccccagctgtccctggaggacggcagctcgatgagtaagtcctgaagcttgctagatgtgtctcagtatttcacatgcctgcactgattggacaaaccctggtatgggccttaggacttggttgcctcaagtgtcctgaacatcactactgaaagtgtctctctggtgatttatttttctgacttgtgtttcctttttcagcaaatgaaaagattgaagacatcaatggctgtccgaagaacagatcccaaatggtaagtggtgcataggtagtaaatgtttgagttctgtcagcaagccctgcctctaagtgatattgaccatcttgaaaacattcataccagatgctttactccaggggattatattaataaactcacagctatttccaagtagctgtgttctgcttttctgacatttgttggcatttattgaaaaatggctatgatttttatgtagattgtgagacagttaaagtgaaatattgtccttgttcttagacacaaattatgcagaactggtacaaacatatacatgtttagtacttgaactgctgtggctcgttctgcttcctcaaagacccacatcaatatgtgtttgtgtatggagctgaggcacggatgaagtgatggtatcttactaatcagaaactggagcatgtggtcagattgcctttaaaggttggaatgatgtgaaatcagaactgtgacaggaaatgtgaaatgtgcagtcacatctgaagcttttcaacataacctttgcaagtgatattctctctggcatgatgcatttaagttctgatattatagctttatacataacccccaaaactaatcttttaaaaatctgttctttttcttattgcatgtcctgcacataatctttgaattaaaatttatcgtcattgttgagttcagaaaacattggcttagtttttcacttcaaaacaaatttcaagcatgaatatttacaaaaaaaagtatattttcagagtctgttaagataacactaataacctatttaaaacatgaaggtggcaacttaaggacaactattttttgctggatgttcatttgcttccagaaatctaaaaaaaaaaaaaaaaaagcttaatttgcttctgtaaccccatcctacctcctttgagtaggcacagtttgataggtctcatttcagaataaaccaaagtgattggcattccttgggcttactgtttagttttctgaattgttatcccagtgacttgggcaaataggcagccattttagttggctttttttaatgcacattttgaatataaagatgtcagtgtatgtatggaaggggagtcattttccagtttatattctgaaacaagtttttgttgttgttgttccactgaaggttttctttctttttgatccaaagaccaaccacttcttacataggaaagtccccaggctgacatctcatggctgctttgacttttggaaaagctgggctgctatttttgctgcagctactgcagctgtctagggtattaataattgagaaaatttggatgatagaagacttaattttagtgcaggcatgctgcacatgtagtcctatcttcatatgaaacagatgcattatttccctccaggatagatactgatgcaattgccccaggccattataatgtgtgtgtagaactggtatgtggaaattgtcaaccttttattctatttggtgcacctctattctaagcaccttctattggaggttttgcgtgttgttagagtctacttccaagcttatacagattgagtagccctaatctgaaatatctgggaccagaaatgttttggattttggaatatttacattatacttacagcatcccaaatctgaaaatccaaagtgtttcactgagcacttcccttgagcctcatgtcatgctcaaaaagttttggattttggcatattttagattttagatttttagatttgagatgttcaacctgtaatattgtcatttcagattcttctttgcaaatttatttccatatgcaaataagttacttataaatactaccatagcaccaatgcagtgttgcagtttctctataactctttcagccatgccagtgctatatttttttgtttttgtttttgtgtgtgtgaactgtgtgtttttttttttttttagaacacaagaatataaaatcctataattgtctgtgataattagttccagcttaggggtagggaggcagacacagtcttgtggtaagcctagcagagagtagttcagcgtacaggatgtgagtccaggaaaatgtgaaaacttctgccacagtcattctattctgtaggaaatgaataggatgatgagaaggacaataggatcattgttcttgcccctacatcacaaaacaatgacaagttcataaggcagaactcactagatcacacaggaagttctttcgatagacaggcatggatgattttctggctaataggacacctgtgtgcacacaagcatatatagagttaaagcacttttgctcatgggaagtataatttgagaagatggcatagggtgtgagccaccatttctagattgctaggtggttaacctcccaattagactttatctgggtggccaataataaacatttgttgttcgctaaatattgcctgtttggaggataccaaaggagaagatatgtagaaagcatggcagaaggaagatgacacacaatgagatgagaacttgggaagtgtatcctgttaggagggtaatgggctctgctaggaaaaaaaaataatcagcatagagttaatgcggtcactccctaagaaaacagatagagcacctttagggccctttaataatagagacaaaaggagttttatttcagagcaggaatggagtgggtgctattccagttttcagtgggtcagtttgtatcctcagctcaagagtaggttaggagcatgagctttgtaggaggagcaagccctggaagaaggcaccttttcctccctcccttcactcttcctaacccactaggctgcccagctgctctgttctctgctgtaactcctgctgtcttcccagaggatagggaagtaaaagcagacatttgtggaatatgacctagaggattccaggggcagcagtgcataatcataatgggcttggcattgtgtacttttagactgtcaatcagcaagcagtcacagagtgcctactaatgtgagatgctggactaggccaagctgaatacacaggtgaccaagatgtgatccctgccctcaaagaactcagataagtgggcaagagaccagagaacaattagaagaatagactattgcagctgctcccacagacacctgtgcatggcactgtggagacccattctacccccagggcaaggaaggttcctaaataacttctaaagggtgagtcttgaaaggtcagagagttcaccacaagagatgatgggtggaagaggattccaagtggagacagccaggcatggaacccatttctggagaatgggtttacttgaggaaatcatggatcccacagaggaaggttttacaaacaatcatccattgattgtaccaaattgccatgaactgtgtctggtgaggctcttctagcctctgggcagcatcaactccttgtcctgttgtacctggggtgaaaggaggggcatggaagagcccacagtacaacagactcataggcacagaggtcttttcagacctgggacaagccttgtgcatgcttcatcacacagattcctgcatatgggggagaaacctcagaacaaagttttctaaaggaaaaaattcgaggtcatcaattcctgtggacagaagttcagccatgaaatttgggaaatggaaacacaacccggttggaaacggctgttaatatttttatattagcactaatacgcatctacacagtgctttaaggcttatgagcccatcacacattcagtcctcctgactctgctgtgggctggcataacactcacaccttttgggtgagaaacggagatgctctccccaggactcaagcctgatgcttttccatcagcatttgtaaccctcagtgccgccctcctcttggccctggtaaaatggcaccaggtctgtaacccaaaggcagagaggcacagcagtggcttccctttcctggagcaagcccagccttggcttgtttttaaggagcgctttgccctgtttcagtctgacccagatgcttttggggccaaatccttggagatggagctttagaaacaacactcccaccccattccctctcccccaccaaattcatccccttggcccttaaataagtttgcgtgtgtgcgtcagagctggttaaaatgttttgtctatttaacattgccatggcaaccaaggggcatctctttggctttcaagtggtgtgttcagcagagttatctgttagtgtggaaggaaaaacattgcttggaggttagccagtgggtgctggggcggccctgcttcccaatttgaactcactgtactcaggacattgggggcattggctcactttggagcctgggaatagccagtggcagggggtggttttcttttttcatcattattattttaagcagcttggctgtctgttgttgattaggagaagtgcaaagttagggaggcttgcttgccttttcagcaaaaaagccccaggcctgctttcccctttagctgatcttggacctggggtcagctgagcctcccagcgctgagcccctgcttcctcctgggctcttcaaggagtcctcctgccttcttccctcagtgcatctagacggagggccagcctgagcttggggaccagccaggccaggtttctaattccttttctgctattctgcagccttgagctaattacttgactctttgaagcctcatatttcctgttctatgaagtggggttgataataatacatacctcataaagatttcatgaagactaatgaggcaatgaaaatgataataatggataatattaattaaagtgataaaatataaccaaagcttacagtgtttgtcttgtgccaagcaccattctaagtgctttacaaatacagcatgtccccttagttcatcctcccaacagccctttgatgcgggtgatcttattatccctattctcctggcatataatcagcactcagtatatggcagttactacgataatgaagatttctttcagtgatcattcatgttttgggggacatagaaccttttggaaatctgagaacccttcagaaatcttctagctctctcctccccaaattgcacttatcccagaattttgcatacaacctgagcagatcatgaaccccagaggccagctcatgtatgccctggggctccatagactccaggtttggtgcccctgctgcatagagcacagcccttcttctcaccctgtcctttcagggagctctatggaaaatgccagcactggagttcctaagacagtaggaatctgcacttaggcacagagaagggccaggcagtgattttctaacttctattccataagcagaacccctcattttcccaaataaaagctgtggaaccccatatatgagtgataaaagctgctataagtaggggtaggtagcccaggacagggccaccatagctgccccttgcaggaggccagcacctggggagatgcagcgggatgtagcctaggaaggaacatggcagtgtcaggtttcagctctgctcttggctccagccctcctttctctggtcctcctcagtctcttttctgtgaagtcggattaggtcttacctctgacctctgcaaggcatcacagctgagagcaagggctgggaaggccaactgcttgtaacccaggtgtgtcccttagtctctaagggagccagttcctataacagaggtagtaacagtatttgcctcatggggttgttttaaggcttccatgagacaatctacatgaagtgctggcacgttgctggccacagagttgctggcctcagtagatgttagctcttttgatgatttttcaagggacttaagtatttgttaaaaaacagacatgcctcgggaacagccaactctgcttttgggtgggggcttgtttagtggggtttgaattcatttgtatgcctacatctctctgaatgatagcactggactcaaaggaaacccctgagagatctcatgtcacagaacactgtggtcagtctcgctcagtcccatcataagtggccctggataatccacttggccttagcacttcacttccttctgtgagaaatgtggaagagaacaacacctcgcagggttaccatgagattttaatgagctaacatttattgatcactcactatgcaccagactatgtgctgagagcctactcaatcactcaaaacagccctatgataaagatgcagttattgtctatattttgtacatggggactgaggatttaaaagggtgctcgtggtcccagattctttacctagggagaggcagagttggagctcgaacccaagtctattttcagagatatggtgtttacctctgtgacagagaaggggtatcataaaaatagtctccacctcaccaagccgtgttctccttagttttcatctgcagctacagcagaaccagttaggtttagctgagagttagcaaaaagggaggagatggaacatttctggaaagggcctgagttgacctgctgatggcaacatgaaagctgaaacaggggcaggtggccccttgtgaaaggcagctccttgaattggcctcgaagagccctggcgccaggtacctctctggctacattctctccagagcctcctgggccaggaaaaggccatctgcagtgggatcagatttccaggcccagtgaccttgagccctcccaacagctgccagaaagccggccacatgcctggggagtgtctgagatccttgggcagctgagttgcctcttccctgggccctgggcctatttttacacagctctaagggcacacacatgttgcagaaccaagaaggaatgaagaaaagtccataggccacttagaatttaaagcaaagtagaaagagctcagggccaagatcagcaggaagcatccactgcttcccacccagggcagcatatacacactatcttatgtgttggccatcgttcattgtctttcaaaggtggcaacaacctccacgtctgtctgtctcttcagtcatgcctgtttaaaactgtcattgccttcccatttccctctccatactctttagcacggaatagaagatccttcaagatctgattaccatcctctcctgccacttggccactcaaactctacaccccagcgagaccagataccttgtagtatgccaaagaggccgtgtattttcatgcctttgtactttggtaatatacaaagtacttatttacagataaagtactgtccagtctgccacaggactgatctcccgcttgccccttcctgggcagtgtgacctttaatattcaggtcacttgtttcctcaaagtgttgacataatgaggtgcctatcatcttttgtgtccccaagtgtcctgtgcctgcttttaacataatacactctcttgtggttgtctgtttactcatcttcttgaaggaaataccatgtctttcacttgagtatcctaagcgtctgtcattttggtgactgggcctgtagtcagcatttagtaaatacaggatgggtagatggacagacggaaagaccagggagggagctggcctgaatgtgtgtgtgtgtagctggaggattctaacataccattattctgatttcattatctacagctgagcagtgctttgagcactcagtattaatttggaagttcctaataggatttaagaaatagatatgtagtgctgttctagaagtgtctttccctaattcttttcttcctcagtttatccagaggacccaaatagaacattgtaattactctcaggacttgtggttaatttttagtttattgagttttttgtgttgcttgaggtgagcatatttaattaagcaccctcacaaccaccagtttattaatgttgataacaaaaatgatgataaggtactgttctaagtgccttccatgttttaactcattttattctcataaccatcctatagaatgaggaatatattttatccattccattaaaaagaatggagaacttagaccttgatgccatttaatgtgctctgccaggggccagctgtgggttgtgataaagaacctctcattctttcccctcacacagtagcacctttgtccctgactttccaccatgcttttatttaacaaggtatagcaaacacttagagtaggtactggtttagatattttatctgtattgactgattttatcttcctaaaactctatgagagcatatacaattgtgattgccattttatagatgaggaaacagagacagagagcagttgagtaacttgcccaaggtcacacagctagtaagtggcaagctggggtttgtttgctggaagcctggctcgagagtctactcccttaactgttttgctattctacatgtaaaggaattgattaaagaagaaaaaaaagactcactatgacatggaaaggcagacattccatttgtaaccctagcccctcatctaggcataggcagaggctcaggatgagacattctgttttgggaaggagatgtgggataagaagaataagcatgggctctgggatcaggctgacctaggttccacacacggggtatgtgtgctgggccagttaattgaatttctctgagtctgtcttctcatctggaaaaggataatgatggaagctaccttctagggttgttgtgatgggggtataaaaggcacctggtctcatcctggctcacagttaatgcaagtgagaaggtcattccctgccctgtttacaagtcacatatttcctaactatggtacatcaaaagattttttcctattcaaaaagtacgccctcagtggggtagctgaacagtgtcaacccatccccaacaatgttcacatcctaatccccagaacctgtgaatatgttatcttacctgatgagagactttccaaatgcgattaaggattttgagatgggataatgatcctggattatctgggcaggcccaatgtgattacaagcattcttataagacagaggcaggaaggtgagagagatgtgacaatggaagtaaagttggagagagagattggaagatgctaagttgcaggctttgaaggtggaagaaggggccatgagccaaggaatgcaggtggcctccacaagctggaaaaggtaaaggaaacagattctcctctagagcttccagaatggatgcagccctgccaaatcctaggttttagcccactgagactgattttggacttctgacctccagaactgtagataatacatctgtattgttttaagccactaagtttgtggttaatttgttgcagcagcaataggaaactaatacactctgggattcatgcaaaataactcttgctgtatcagagagtaagctatttgggttttatagcacaggctcattttgctgtaaatgtgggttccttggatttctgagtttactggaaggtgcctctattgttagaacccttcagaatggagcttgctgcatcagtacattcagagcacgtcactgtagggaagcatgtggaggacagagacccacagttttttatttctagtactgtgtccacattgtgggccgatatacatactaagctgtcatgggagaggcaagtgcatttcatctcagtaattagaagtgaatattgcatcttctggacctctttgccaatgtaaactcacaaataggtactttgtccccacaactaacatatgtttgtcttgttaattaacataacatttaagcaaatgttaggaatttaccatattttatatgctattgaataacatcaaagctttgtaatgtgaatagtttttttaaaaatctctttcagttcaataaaaatatccatattctcagcacctggcacaggcctaggtatgttagaagtgctcagctaatttttctcagatgagaaagctaaacaataagtggtccaacaatccaggagtttcacagagaatggagtgatgtgacatatcaaattttaatattttgagcgcactgtgtaagtttaagtgctctcaagaaatgtgggattcagtctcttctctcacaattttatattttaactcagttctaaaggtatatgaaaagacaccaaaataacagattatttttattaataagggaaatggtgtttgggttggtaaagcctccaatagccgtgttcaaactttatatgtgagaggcacctggagagattattaaaacagattgctggaccccatccccagagtttctgatttggtatgcctagggaggagctggggaatttgcatttttgacagtctcctgggtgctgatcatgttactgctctggtgaccacactttgccaagcatgacacattgtctctgagttaagtaacaaagcctctttgctgggatatgactgagcaaacatgcatttaaatatatattagtctgtaaagttgtttccagttttaaaagttaataggagggaatccttttgctttttggaaaggttaggatgccttcaagctagtccaacccgtggcccacaggccacctgcagcccaggatggctttgaatgagcctcaacacaaagttgtaaactctcttaaaacatcatgagatcttttttttgtgtgacttttttaaagctcatcagctattgttagtgtattttttgtgtggccctagacaattcttctttttgcaatgtggcccagggaagtcaaaagtttgggcattcctgccttgtacattcttttttcttagaactattatatgttccaaattgatatgatttgaactgtgcatgtggtcatgatctggttggagtttgagatgccttctctaccctcttccagctcacttaacctctgtaacttttttttttttttccactgaacgtctggggtgataattctttaggacactgggcttaaatgcctgtgtccccactagacattaacttctttgaggacagtagtggcatctgtccatttgctcacactgcttagcaacctggtagatgctcactcagtgaatgtttaatgaagaaattcccaacacacctgcattgggactgatgtgttgtgagtggcaacatgttgtactcaggaaggttaaagaatgtagcaaatgtgaggctgaccgaggttggggctgggggaagggaaacatagctgtagatctgagctgaaagagaaattggatggtgatttataaccgtgtggattgtggtttatataaaagccatctgggcctcatgcttggatccacctccctgcatatgtcttcatggagttcttatgtttcagcctagcatcaaagaggtgtttttttgtatatgtgttgtttttttaaaaatttgccgtgaagtggaacttagcagggaaatcctgtttggacgttgtaaggcatggttagcctatggcatctgcatgttggaaactggtcaggtcagtggacaagtgccagtgtgctcacttcagagagtagagaatggtggccaaaaagctaagttgaggtgcttttaaaacaaaaactgaacagatgccaacagttagataaaaatcaatatatttcattaaaattgatcttctgtggattggcacgcaacaggcaaaaaattggctgtaactgggtaggagctgccccctttgggtgggtgtgggctgtttgtcacaatctccaccattccctattgtcttatacctaacccgttttactcatttgttacctgcctatccccctgcacacatttgacgtttttgatccctaaatgatgatattctcataagtttcctgagcttcctcaggaatcctaagcactggcatgtggtagcttgagaggcctataaatgtttatattgacttaaattattcttgctcctgaagatttagaacctaaatatcttccctaagaaacttacttcttcctctgtgaagtgtcctttttaaaatgtaaaggttagatttggtttgcatggactgattacttattgccttgttgtactgctgaaatcagagggcaggaaaaatgaccaggcaaggtggtcatgtttctccccagctctggcaaagcacttgctgtttggttgttaatgccccatgtttgtatagggcttcatagcttacagaacacttcctattgtgttcaaattctaactctgatgtttaatagctgcggcttaggaaggctcttaaacactctgtgcctccatttccccatctgaaaaatgataataatatctaccttatctagtggtggattaaaaaaataaaaattaactgaaataataatgtatgggacagaatttagcgcagtgcttcaggtttcataagaatgcaaatactagtttctggcaaggtctctgtatggctttcaagaaaggaataattatccccattttactgaaggaaaaactgaagcttagggaaattgagtaccttgcccagaggtggccaaggagccctgagaaatccacaattccctagactttccacctggtcattcgaaatccttgattcccctgtctacccttgaaatctcctcttagtaatagctccagtaatgatgaaactttgagatgagttgacttttcctatttcagtagctttcttgggtgagagggctcccacattggtgggaacatggtaccagttacacagagttggatgtgagggcagaacctgtccacagtgtcgtctcgtatactttcccctgaaggaatatgaaggcaagaagaaagaggcatgcattccgggtttccactgagggactacttgtgcatgcttctagtgggaggctttctgaaatgagtcaacttggaattaaagtattcctcaggcccccttctgtctctccaaggagattgtacagaagaaaccctaaccagagcaaagggcctttcatggttagcctttggatagggtgtttcttcctacttggtcttttcctctacatacattgcataaccagtcttgtgagactcctttaagaaggatttgccgggatttgatttgagtttcagaattcattggttgcctccttttatgaatgattatcaagtgctctctctttatgatcacccagcagtttaattttagtccttggggtgggtggagggagacttcctgatatgtggatatgtagatagaaccatatgaaatgaccaatatttaaccattttttacctacaaaaatggcaattttatctagttcaaccaaagatttggcaaagatgtaaacagtaacagaggttagcattctatgacaacttaaaaattatcattctttcttcacaggtgcatttggtatcttgtggccttggaaagctcagggatgtcctgtaatggaatccttccttgtctagtttgttctcctctttcagtggattttgaccatgcctctgacattgtggctatggcagcaggcagtatgcagagtggagaattagttattatatgcttaattatttttaatttcataattcctaattggttggcatgtagctctttgcctttatcacagactttagaatttgaaactgttggccaaatcgtttcttagtttaaaatattttgtgtattccttgcaaaattccccaagttatatattcacgatcatcagtgatctaggattcaggtgcaactccttagccatgcctacaactagcttttgaaataaaaaatagattgaggtaatgtatgtggacgtttctagtattgtgcctggcatataataatcacccactgattgctggcagaatttgaaattagagtggaaacaatggtgatttggggttagatttctcatagacattaacacaatagggtgttctataaaggcagagaatagcggacccatggccttcattctagccatcatcagagtaggtgagcaaagtcctgcaggattctgaattgagcattaatgcattcaaaggtatttgcttggctttgtttcctgcttatggatgccaccaggacaggtcttacatttaagtacacactatcgttggaatttcaggaaatgcatggattgactgttcgtgaacaaccagaagaaccataagctgccgatagtggcaaattggctgaggcacaaagcacaaagctgacttacacaggctggtgtgagggaactggtaccaagctgaggaatgagtttcactcttggccttcctctacagattattccattaccatattcctttatatctacttgttttgtgggtataacaatgtggtctagtgcttcttccaaaactgaagattcactgcactctagagacatatctactcctgaatttcaaggatctgatgtcttatttaattttgcatttatattctgctacctcttgaagattctatggtggcttatgggtttaagcatgtaatatggcaaagatgccaaagaaacaatccagacctctttaaaagagcatggtgagtaagtgtcaggcttttgagtaggtgccttgataagaataagttgtcccttaatatatttgtgactgtatgtttagtggagtgattgtttacttaaagtcaactcttgcccaggagactagctgctccttgagggaaggaccacactgtcttgtctgcctgcgttttctgcccattgaataggactgagaagagagtagatgctcaatctgtattttcaaggaatgaatgagactgtcaggttccaggtaattgcactgggtgaaatctccaacaagtgtctgtagtcccactctgtctacctctgttgtctgtcttaggggactggaagtcaggatttttttcttaaagtttgagtccaagtttatgtcctcttctgtgggtaaaaccaatgttttctgcaaaaacgacttgatttttaaaaagtagaattgatatatgtatacattgtataatgatttccataatcaaagtaattgatacttcagttgccatgcatgctataccttagatctctagaacttgctcattttttaattattattattttttgagacagtttcactctgtcgcccaggctagagtgcagtggcatgatcttggctcactgcaagctccacctcccgggttcatgccattctcctgcctcagcctcccaagtcgctgggactacaggcacccgccaccatgcccggctaattttttgtatttttagtagagatgggttttcaccgtgttagccaggatggtctcgatctcctgaccttgtgatccacctgccttggcctcccaaagtgctgggattaaaggcgtgagccaccacgcccggccagaacttgttcattttatgactgaaagttgatgccttttggctaccatctctccatttcccccatccaccagcccctggtaaaccactgttctgctctgtgcttctatgaattcaactttttattatctcacgtataaacaagatcatgcaggacttgtctttctgtacctagattatttcacctagcataatgtccttcaggcccatccatgttgttgcagatggcaggatttccctcctttattatggctgaataatattttattgtgtgcatatgccacattttctgtatccatttatcctttgatgcgttgcacacttaggttattttcatatcctggtaattgtgaatagtgctgcagtgaacatgagggtacagatatctctttgaaataccaatttcctttccttttgtcaatgggagttcttatggtagttctatttttaatattttgaggaacttccatactgtttttcataatggactcttgactctccttagccaaaactatttgcctaaaaggtcttagggtttctcatgcaactcaatagaagagactttgaccacaaagttttttggatagatagttctggttctggcaggctaaaaatgaatgctagtgacaaattacatattcggagaaaggctgtactagtgtcacataatttaacaagtctcagagtgtctcacacttcaaaatgatctttcactttcaggaaatgccgctggtatgaaaattctgccattatgaaattacgtgaagaatgagcccttttagagctctgggtatgtgaagttccagatcattgacatatatccacccacccaatcctctcagtaatggtgggagatagatatcagcatttcatgttacagatgacaaatctaaggcttgaagcagttaataattttcttagagtcttgtgggcatctgtcagggagccagaaccagatatggaggagtccaaaatcatattctcttttttttttttttttttttttattgatcattcttgggtgtttctcgcagagggggatttggcagggtcacaggacaatagtggagggaaggtcagcagataaacaagtgaacaaaggtctctggttttcctaggcagaggaccctgcggccttccgcagtgtttgtgtccctgggtacttgagattagggagtggtgatgactcttaacgagtatgctgccttcaagcttctgtttaacaaagcacatcttgcaccgcccttaatccatttaaccctgagtggacacagcacatgtttcacagagcacagggttgggggtaaggtcacagatcaacaggatcccaaggcagaagaatttttcttagtacagaacaaaatgaaaagtctcccatgtctacctctttctacacagacacggcaaccatccgatttctcaatcttttccccacctttcccccctttctattccacaaaaccgccatcgtcatcatggcccgttctcaatgagctgttgagtacacctcccagacggggtggtggccgggcagaggggctcctcacttcccagtaggggtggccgggcagaggcgcccctcacctcccggaccgggcggctggccgggtggggggctgacccccccacctccctcccggacggggcggctggccgggcggggggctgaccacccccaactccctcccggacggggcggctggccgggcggggggctgacccccccacctccctcccggacggggcggctggccgggcagaggggctcctcacttcccagtaggggcggccgggcagaggtgcccctcacctcccggatggggcggctggccaggcggggggctgaccccccctccctcccggatggggcggctggccaggcggggggctgaccccccccaactccctcctggacggggcggctggccgggcagaggggctcctcacttcccagtaggggcggccgggcagaggcgcccctcacctcccggacggggcggctggccaggcggggggctgaccccccacctccctcccagacggggtggctgccgggcggagacgctcctcacttcccagacggggtggctgccgggcagaggggctcctcacttctcagacggggcggctgccgggcggaggggctcctcacttctcagacagggcggttgccaggcagagggtctcctcacttctcagacggggcggccgggcagagacgctcctcacatcccggacggggcgacagggcagaggcgctccccacatctcagacgatgggtggccgggcagagacgctcctcacttcctagatgggatggcagcctggaagaggcgctcctcacttcctagatgggatggcggctgggcagagacgctcctcactttccagactgggcagccaggcagaggggctcctcacatcccagacgatgggcggccaggcagagacgctcctcacttcccagacggggtggcggccgggcagaggctgcaatctcggcactttgggaggccaaggcaggctgctgggaggtggatgttgtagcgagccgagatcatgccactgcactccagcctgggcaccattgagcactgagtgaaggagactccgtctgcaatcccggcacctcgggaggccgaggctggcggatcactcgcggttaggagctggagaccagcccggccaacacagcgaaaccccgtctccacccaaaaaatacgaaaaccagtcaggcgtggcggcgcgcgcctgcaatcgcaggcactcggcaggctgaggcaggagaatcaggcagggaggttgcagtgagccgagatggcagcagtacagtccagcttcggctcggcatcagagggagacggtggaaagagggcagagggagagggagggggagggggagggggaaagggagagggccaaagtcatattctcttaaacagatattggagagggagagggagagggagagggccagagtcatattctcttaaacagatattgtcacctaataattgtgggcaagaggtaatgtgggaagccaatgtcagtcccttctgtcttggtgtgaatttgtttatcagcatcttttcaagaaagaggttgtggagaagtaagcatgacatcaggttacggagaaggcccagattcctggagagctgtgcttgagaggaaagcctggaggaggaaacggaaagcagataagcctgttcgattctctgtttcaccaggggccaacccaagacacagctttggaatgtcctgtccttagaactgttgcccagggccactcatgcctaaaattacaacacagtaataaaaactaccggttgttgggcacatattaaacatcacgaatatatcctcttgtctaatgacaaccaccaccctagggggtaggtgttataatgaccattttatagatcaggccactggggtaattgctgagcatcatcatttagtaaatgccagaaacaagatttgaatccagacttgtctgaacctaaagcctgtgttacatcctctaaatatcactccttagccctaatcattccccttttgtgtttgtgtccagcttctagcttgatgattccttttggaagtgctaggaagttttaaggagagtcactctgaaattgtagcaagagaaagcatacacagaatgggatactgattgaatgcacacaaaggtatccttgggcctttctgacactagtcaccagtggaatttttcctctcatagggtctaccatctctaaaagagaacagagttcagccatatgagtatcttttgggagcctccagagtaaggatagacttctagaactttagctacaactcccctcccaggttgctttctttgtttcaagggaaaaattgagaagttggaaaataataggaaaaaatattctaggcacttggaagcaaagtggaaaaagatagtcactggaggaatttgagaatcttgctttcaattttttctctagagataatttttttttgtatccatatggacttacccatttgctgtaaagcagagaaactcttaaaaagttttttaaaaagggaatttttgacaacatcttggaaagctgaagttataaatattataaacagtatggtggataacactgccaaattaaaggcaggagctgggcaaggtggaaaagcaggaggagaagcagtctggcatagggactcataagctgtgtccagcccgtgattcccacattcttaagctttcctgtttcaaagccaccatgagagcttgagccggcttgctgtaaacgttgatgcttgaatagccaaagctgggacagagtcacggagcccctcttatgacaggacgaagttggctttctttatacatcagcctgagtagcttacattacagaagggcaggccctgatgctcccgaatatttccatacctaggagaattggaagcaccaccatgtgtttccctcatttctgaggtccgcttctaaaattaaaactgtagtgtcaggaccccgcaagctctgccctatggagctgtgcatctccaggaccacactgtgctgcataagacatgtgatcttgtgaggttgctaggcccccaacactgatacaggtggacaaaaaaaagaaggtgggtaaatcgtgcataaggctgtgacctctaggagtatagaggaaagagacagataacactacaagacagacatttaggagggcatttccctaaagttcattttgctttttggtttggtttcatagtttttttcttcttttttagttttggaaagagacagaggaaggggtattagaaggacgtggagacctcttagatatggaacagacatttctggtacatgtgaccacaaatgttgatatctgcctcccatcccaccccttctttgtgaccagcctagaagccaccttgaggccactgtttgacccatccccaacatgaaacagcccatcctccagctttcagataggaaggacttggctgggctgctacttccatggtaatggggcaggtcgaggtactgacaagacttcccaaggaatgaagagacccttgctttcgctccttctccatgtcaactcctttatgtggtcaacatgccccaatgtggccccatctactcttgtcaagggacctctcattgcccttctcccttgcctgccatgctccagccattatgactttttttgggttccagaatgtggtatattgcatcctgtatggagtcttttagctttagattccctaggcttggtaggttcttattctccccactcttggtgcctggctaactccttaggtctcagcacaaatttctctttattccttcagtaaacaaatattcttgagtagatctattatgtgctgcaccctatcctaggtgcttggggctacatcagtgagcaaagcagacaaaaaaccctatccatggacctatgtgctgcctcttccttaagaaattcttgtctgttaccctccccttggccgtgctgcacccataggctagattaggtcttccttcctgtgtacacgttcccaacactcttctctttcacagtaaccataacagcttgtcatcatatacttatttgtgctttctttattaaatgctggtttccctgcgttcgactgtaggttctacaaggttggggattatgtctgttttattcaccactatatactcaacaccagcacattgcttgacacccagtaggtgctgagtaaataggggtgaaggaatagataaatgaatgggtgacaattacttttgatggcaaatagcaatatcaggtatgagggtcccacacacttctgggaggaagttgagttgacatatgagttttatgaagaagctacactgtgcttccaaagtcaccagaacttgcaggttctcacttagccttgcctggggtctaaagctcctactgcctaagctttaggcatttcatgatttacaaaaatggttgtgaccatgcctgactttaatgcagcagctgtttgcctctccttccagactggagatttcccaaggggcttggcaaaaaactattaaaccataagaactacagttccatttatttggtatgcccagaatgtcatcttcccctaggctgtggtagcacccatagagatggtcttcctttgcattaattattttcatgcgctttgcactcagctacactggtattcggagaaaaatgctgccatgacaactgccacaacagatggtatttgatcagtctctaagctaccagggagatatatagcagtgcttccgaggtttgcatattttacgttatcaggagacccaagtccagccttaatcatgattgaaatgcaaagttttccatttgcttcctatctcctgattctctttccagttgtttggcatttgttttgatttttctaactccctggctctccttggtggggaaatacttcaggatatgggagacaaaggctgcaacacagcccatggaagttgccctgcaagtctaaaggtcagggactgttgagaaactaaactttgggatggcagtctcagctgagattggcagaaaggcttaattgcagcctctctcatggatgttcaggcactgcacaaggtggaggccacatttggctccaaacaaagggaattctggggaggtgcatcctggtctgccccttttctttacctccatccttcactcaacacctctctgctcccggagtctccaagccacgtggtagtccctctcctgggtttccccctctaccccagctaatgctgcaaattccaggaactcagtcccagagctcttggacccatttctatggcaacaactacaatagcttctcacccagtccccagcccccttcaaaaacactggaatgtcagacttcatacagatttttttcagctaattttggaaagtagtttatattggccactacatgctaatgaacaagtttggtcttatttacatactttgctgtttaagagtcttttctttcactctgcctcccaactttaatcagatcctcatctcatgctgtgtgtctggatcacacataagtcttgttaaagatgggcacgaggacatcattgtgctgtaatgactactggggtgctgctgctggggctgttcccctcttgagatgtggtaggagtttgcagtttcaacagtacatgaagatggattgtgtttacctgtacagtatttagaagaaaaccttaaggtgaattttaatcacaagagggcctggatcaaagaaacaatctccctttctgatctccttccaaatgaagccaggaggttggaagccacatctgaccccattctgcttcccagcctcactctcttcctggggtgcagatgaaagagcgtgggtctcggccgccttgtcaggagtgatttttaaccttaatggaatattattaaagagtggatttcagacttgaggaatgttttttgaactccttctgtgaacagagaaatcatagtagaagggaaaaattcaaggcacttgatggacttacgaatgatcttttaaataatgacaaagttctagttttaacatcttctggagtgcagaccagccatctggttttggctccctgtatttcatctctttagaagaaaacaatggtgccctcaggccttccctgttcacctaataaaggaagatcctaatgcctctcttgtctatgtgctctgattcttctagagaaagacaggaatcaaggtgtgtgttgaatcgcactgtggaccctagagaaggattatctaaattcaggctcctatgtatgacagggaggaggacctcctggtttctcacccagctctgccattgacattgacctgtgtaatcttggtcaaaaatctgacttccttacctcactttctgtatcacgtaatacttgctaaaaccaacaccatccaaagaattgagtgccatgctggcacagagcagacatctacacaatgatgttgactgaatgaatgcttgaaataatcctataactcagggcttctcaatctcagcactgttgatgttttggactggacagttctttgttgtgagaagctgtactgtgcattgtaggatgtttagctacatcttggcctctatccataagatgcgagtagtaccctgctcccattgtgacagccccaaacgctgccagacattgacaaattggtccctcacctccaccctccatccctagccagtggagaactactgatcaaaattataaaattctgggaaaaaaatgacaggactttaaaaagttaacaaagaagaagtattcgggtaacttatttataattattcattcttttaatagaatcggacattaaaagaaagtccagcagatggctgaattgaaatgtatcaaggctagccttgcaaacagacactatcatgtactttaaatgatgctgtatgtgttgaatgttccataaatataagtaatgtactttatgcttcttggaatgtgagttctatagaaatagtgttgtagtagagcagtgcttttcttgaatatgttggtggttgtctttatttttttcttcagtgccatattgctggactattgctgaaaaatcttaacctacctcgtcagcccacctccgtgacacttcccagaataaatatcgagtgtactatttttgattttgcaataagagattccgggatggtgagctttttctttttctcactttccatggggacataattgccaaagcctcactcaccagccatgtgcaagatattatataaaagaagtaggagagaatgataggaaaaggcaagcagtagaagagagattttataattttattattatttaaatactagtgtctcttttggggggcaacaagtccttttgagtggatttggtatattaccactgtgtacaaaagtagaaataaggactgatagttaacatttgttctcaaaagcagggtttcatggtatggtgaggtggcatttagagacacaactgttattgcacttacaaatgggagcagattgctccaagacatcacacacagggtactcccagccagtattgtgtttactttcccctccctcattccctctaagccaatagcacctggttgtctgcatttatgtaaatgcaggctcctgtgtataacagggaagaggacctcctggtttctcacccagctctgccattgacattgacctgtgtaatcttggtcagaaatctgacctccttacttcactttctctatcacataatatttgctaaaaccaacaccatcaaaagtggtcatccacggggctggacagaggacaggaaagatgaaaagaaaactcacctttcctccatgtgtataagaaaggactttctgcaatgatgaaaggcataacgcatagcatcaacatttagtttgcagcaaattgcattctgcacctttttctagagatgagaaaatgtcttccagatgaggaccttgaagtgtgagatggaggttggaaaggagatgggaacctatgctaaaaatgcaaggatggagtaacttcaagctcagggttgagtagagtgtatattatgggtgcagttttattcaggtatcccatagcttaatttaaagcacttggaagatgtgaagactgggagtagataagtcataaaatgccaaatgtcaataggtgggtggatgtgaactttgggaagactgccttggagctagacgctactcaaattagagctcctaagtgtagacactttacattttctgtggctgtgaaggagcattgggaaattgcttggagttgaagaaacgagaagggtcacatgtatactgtggaaggcaatcatttattagttcaaaataaattccatgggttaaatactgatttgagttcataggaatgttgacggaacctgggaagtaatgaggggtggggtgattgtggaggggaatgagtggggtccccattgtgaaatgcaaattgtgtgaaattcaaagacctctgtgccaagtctaaagcaatttcttttacttatggtacccgttgacattaatcaagccagaacattttcctttaaaccaaaaaacaattagccctgacaactgaagtaaaattagcttcttgggaatgacctaattgttcttttgggaaggctggacactggcttgcccttggctgtggtgtcagccctggcaaacctggcagatctcacagactctcgtgggtcctttcttgccacagaaagcacaaaggacagaggggttcaggaggtcacagccctccccagtcatttgcaatgcctgccatccggagaattttgtgagtaaatgctacccagattcctgcgaaaactcccattcactgttggtacatttgactgcctgcctctttggtggctggaaatttctcccagctgctggtagatgggtgtgtccactaaccctttccccacctccatttttctggcaactgctcaagttttcaggattgcactggtggtgacagtgatcaagatgagagctcccattccaccctggttatttttggcggctgtgagcaatgcaagacctcaacttttggcactatgtggttgggatattaggtaacctttttcctgtgcaagtacagacaaaagagagtgtcctatcttggcgttcgttcatcggccgtttttacagcattctgttttcccattgttcctcataagagatggctctggagaggctgaacatttattaagtatatattgttgtttttccctcctagattgaaaacatagatgcctgcttgaatttcctggcagctaagggaataaacatccaggggctgtctgcagaaggtgagtcagagcgcttgtcacgaagctgcctcttcatcattagaaatgcccacctgttacttatgaatgatattaacaccattatgacaagggatgcttgtgggctcctctggttttgttttcctttatgttgctcagtggttgcctagacttgaggatgccaaggactcactccaagaatgtggattcaaccataccagccacctctgcaagaccctgagagggtagtgaaggggaagctgtcctatttgagaaagacttgcttaaacaatgctgatttgattcacctgtctagtaattcagttaattatcaagtcaggcctcatctatgggagagagcatgcttcaccacagagcatatttcagctgtacagttcccggggaaaaatgcttaatccttatctcttttattcgaggaagcagcactttttcttgctcttaaaaaagcatgtgatttattaatgcaatgctgtatttttacattgtgattagtttttaattaaatttggtggctaattagcacatgagtgttcaccagtgttttgctattaaattagttattggtctggagatggctggttcgaattctcagccacctcagacaacaagtcagcctgaaactttcacgctctctcctgtttgtaaatacaagcagctgccagctcagagctgccataggcccaggcatcctcccaagctcattaggctgcacctgcctccagttttcccagaacaggtaaagcagtttgggcttcagatgatagcacctttccctagtgagactgctttttgaaaggaggcctgttagcatggactctggtggtcagagtggggcagagaagaacaatgaggaaggaaacagccaaattgagcaggtaagtttgcaagcatgatggattccatctgggacctgttccttgcctttgctctgctacacggtgaaagcttggttttcctggctgcgtttctgagtggtagtctctcctggtattgggggtgggtggtataaatgaccactattaatgcctcgtggatgtattgcgtctctgagtgggactgtaggaattcctcagttaataactctgatgtgctggacctgttcccagtcaggcacggccacactgcttccagagttcgcagaagcagttgtcgtgtggtcagtcctaatcccagaagattccccagccctggggtacggaccctcatccatggggataagatcagggctggctgacatgtggaatatgctttgctggggggcgggggtttgctgggagtaggaagatgcaaattcccattcagaggagcacatgatttcctcctggtagagagttcttgtgctggctggtaggtggcagggcatactcgtcctagtttctgggagtgcttgaactcctgggacaggcctgtgtcccccagcagagcaccagcagggacttttacagaggtgtgtttggcagcaagtggcagcagggcctcttgggtatgcagactctgcaggcctgcttcatcctgcctggctggtagtgacccctggctactcagccatctacccattggcctgacttctgcctcatttgttctccccatctgtcccatcctctctgtaccccaaggcatagagaatctatgcaataagtatttgttgaaagaacaagtaccaattgtactttgcaggattttatctgtattggcttcagttctcacaactaaagttggagtttataacagcctcagtttatagatgaagaaactttggtttaaagaggttatgagcggcatccctgaagcatgtagctagagagtggcagagccaggatttacacccagttctgtgtgatttcagagctcatgattatggcgtcttctgggatagaggtggataaaatctaggtatgccatataaaggtaaaagaaatgaggtttaaactctttgtcacctggagcattgcttcagaagatgttatagcccatggaggcacatcatgcagaaagacactcagctgtctgcccctttttgacattgagatgacccttggaggctctgagcatggaagagcataccatagccagtgtgctgtggtatcaagccattgtggtacaaccatgaaggagttttgtggtatttcaataactgccttaactgtgctatgttgaacccccatccttcctgctgggtcaagactcacttaatgatattttggccaggatatataactctgtagtcatcttcaagttgttacaattacttgatgcccatatttatgactcagtgacggtcatttttaaacttcaatctcagactctactcaaagctctttaccctcattccttccagtgtaaatggctttaggagtttgaagagagatgggggcatgccggcgtgactttctctcctttccccttcccatgttcttgtgccagagcccccaggattgaggcagcacagaggaagcagagttctgctgctggggaaggtgctgtcctcagtatacatcactgccactgtctcagctggtagtctcagcaggccctgctgaccaggacttactcccatgtagctcccggggcactagtggtcttctgtgagacttggccagatctttcacctcagtcttatgatccctccggtacctaccataggactagcaggaacgtgtgggctccattttccacttgcagtgggtggaactgcaaggcctcctgtcacctggcagcggtcccccaccagacagtctctctccggttcttttcctcattcaggtggccaagaggcagatcagccgggtctctgctaagcggatgtccaatttgggactggaatgccaggccctccttcttgccagcacccccactttgagcgattcttagagctaccactcccttgacttcaaggggcccaaggactctgctgccttgcctccttggtgaggggaggaaaatatcctttctccatgatcatcaaacattgtctccccaaaatgacattctgtcatctagatcttcttatattttttggaggttggggagtgatgaagatatgagtgttaaaaatgtgaactgctgcattcctttgggaaagtggccccaacgtctgccacattctcaaacttacaaaaagcaagggtacttacagcctttaatcctcaaatttggccttattcataatttcagggtacaggcaatatctcacttgacatcatgttacattacagggatagatttattgagaacttaccacatgtcagtcactgagctaagtgctgtgcatatttatatcttatttagtacccccagcaaccttatggggtcagtattagtattatccccctcatgcagatgagcaaaccaaggcccaaagagattaagctacacattataaaaaggaggcccacaagatcagcagtggctaaactacccacatctgctgattcaaaggcctggtgtgtgctactgcacattactgcctatgtttctatccacctgcataactactagcaaagcagtgtggtgtattaaaaagtaatgcagatttaatgctttttgttctccttttgaagatgactgagtgccctgaggctccttctctgatgaagaaaacatcagcagttggaaggccccatagatacatctccaccctttcccagtctaaagctgggtttgcactcaggagggtgtatgcacctgtcctcaaagcatttcagcagctcaggcctgccccgacccgcctgctggagagccacagggagcctttgttctagggcacagacggcggatgcttgggggcagaggctgcaggcctgagtgagccccatggaggtgctgctggtttggggaacttccctggactaggcctccctgccctgtcagttttcctgaagattgaacccatctatttgctcttggagatgtgccagagtcctgtgagcttgggcctccctttgccctggggtggtgttcaagatcccccaccaacccttccccagaacacaccacctgtcacagccatctgtaaaactgcccctgtgaggaaggatggcctttatttctggccattttgagaacacctggggtttgtgctatctggccctgagcccatcctcctgcaatggagaaatggaggttggggagtaaggcatattctatctagttcagcaaatgtttcctgggcacatcctgtatgccaggcccagtgctaggcactagggtacaccagtgatcaagccagtcatattaaactaaccttgattccagttaataagacagagctgtgttagtggtaagcacaggatccggtggtgaccaaagacaggcaaatcaacttttgctggggctctcagtggggctacacagaagtgggacatttccccccagatttcatgggatgaatagacatttgccagacagaaaaggaaggtgaaaggaaatctagacagaagatcaggcataggtaatattaatatgatggggggaaaccttgcagacattggataaacaaaagtaggaacatccttccaggtggaaggagtgtatgctttgaagtgaaaccacttgctgatttgattagcttagtcctgggtttgctgccctgatggccagagagatctaggtactgagttttctcctcctttcatcccaagctagaaagcaggaggtctttctggacccgtacggtgaaagcagcaggtggaacatttccatttcctcctacctatattacctgagtatggcattgactgagaccttcagtttctgtttcttagcagaagggtccccataggctctgctcccatcctctcatcccacttctcctgtgggtagagtgattggcagacttggagagcagcaagaacacagagggctgttgagtggaggggcaagttaagtggtgaatgctgattatgcagccggcccaactgcagggacaatgctgcagaatccacagtccttaatcagctgggtaaacctcacacaaccatggctcaaaggaattgaataggagttctgcagctctgtggtttgcacagccctccctttggctttgaatcccttataccctacaaagcaggtttctttgtattagattatttcagcacttgtgccatgtaaaccaagcctgaagtttctctttaaaaatgttgaaagaaaataactcctatttatcttactcttcatgcctgacattacccacagcatctatgcagattaggaccagccagtgggaagaaagcgattagtcagaacccaaagaaagtggagtcaaggcaatactaattcaaatagaaattggaatatgagaatatggcccatgcaatttgcttttctgttgccacaagagtggccacaggaagagaaagaacagggctccaggttgggtttagccacaactggctagtgtctcctcaggcaagtcagttctctctacatctacatgtttttccttctctagaactccagaaagtgaggttaatcagatacaaaatagtaactccttttccaaagccttggggaatgtcatgagggaaacattcttgtggggctttggggttttttttaggcttcctgtggagctggcttaccaagcctcatggaacacagacaaataccatttggaaatatggaaagaatataattctagctattttagatactgtctgctatagaccacccatggtagaaactgtgtggctgtcagcacattcagcactcttgagtttttgtaatctgaaaagaaaattaaacagttataatgtccatcaattggtgaatggataaacaaaatatggtgtatctatatgatgggaatgtaaaaactgacaaatgctctaacatcgatgaaccttaaaacagtatgttaagtaaaagaagccagttgcagactgggcacaatggctcacgcctttaatcccagcactttgggaggccgaggtgggtggatcacctgaggtcgagagttcaagaccagcctggccaatgtggtgaaatcccatctctactgaaaacaacaaaattagccgggcgtggtggcatgcacctataatcccagctactcaggaggctgactcaggagaatcacttgaatccaggaggcagaggttgcagtgagctgggattgtgccactgcactccagcctggatgacaaagtgagactctgtctcaaaacgaacaaaactagatgcaaaaatctatatacagatgctcctcaacttactgtagggttatgtcctgataaacccaccataagttgaaaataaatgcatttaatacatctaacctactgaacatcatagctcagcctaacctaccttaaatgtgctcagaacacttacattagcctatagttgggcaaaatcatccaacacacagcctgtgttataataaggtgttgaatattatatgtaatttattgaataccataccaaaagtgaaaaacagaatggctgtatgggtacttgaagtacagtttctactgaatgcctattgcttgcacaccatagtgaaggtgaaaaattgtaagtaaaaccatcacaagttggggaccatctgtattgcatgattctatttatgcgaaatatccagaaaaggcaaatctgtagaaacagaaagcagattagtggttgcctgggagtgggtttggggattgattgtaaatgagcacaaggaatctttttaggatgatagaaatattttaaatctagaatttgctaaatttactaaatatcattagattgtatacttaattttatgaaattataactcagtaaaactgtttttaaaaccagaaagattaccattgagttttctctaatgttagatcattcgtggttttcctttctggacaccagcgactgtggcacacaggggatgagcagagagaatggaccacttcttaggcttcctttgggtgaagagctctgtggtgggttctgaggaggctgcaggtagaatggccacattttctcagccaaaaaagggaagtacagagtcgggaagtatcctaggtgcactcagtttcttatgtatttatttatttattatttatttagagatggagtcttgctctgttgaccaggctggagtgcagtgtcgtgatctcggctcactgcaacctccatctcccgggttcaagcgattctcctgcctcagcctcccaagtaggtgggactacaggcacgtgccaccacatctggctaatttttttgtatttttagtagagacggtgtttcaccatgtgagccaggctggtttcaatctcttgaccttgtgatctgcctgcctcggcctcccaaagtgctgggattacaggagtttaccaccatgcccggcctcattttctcatttaatcttcaattaactttcataacaatcctacaggaaaggtacagtaggacatatgcccattttaaagaagaaaactgaggctcagagagattgaatcctgtaaaatctcaaagtgtataaacgatggactgtagagatttaaccacaagattttctggctccaaaaaatgagagctgtttgttataaaaatgctgcctcctaagaggaaatatatttattggaggagcactgtagtctctgacaaatgaaaaaaatggtttagggaacaatggccattctgatcaataaatgactaaatgacaatggtaggtagagaatacaacaggactgatgctgtttgcactgggattgggctggtaggttatggagggagctgatgtgaacgtgcctactttttacagtggatgacccctgatcctccaggtatgctgaattgttagttcctctcctgttttttcttgcatggttaaaaaaaaaaatgcatcacagaatatttgacatcccagaaaaataaagaatactcaaatgcctaccagctaggattttacttatttatttatttattttataaaataaacattaaatatatttatatatatttatatatttatttatcaataaaaaatatttatttatttaaataaagaatactcaaatgcctaccagctagcatttattttatttattaaaataaaacatgatggctatacaagtaagtcaagttacacagtgttaggaaactggaccctgagtcggaaaacctagattcaaatcccagctccagtgtttatgaccttggacaagtcataaaacctttctgagcttctgtttccccttatgtgaaagagggataatcctactcacttcccatattgtaaggattaaatgagatcatgcatataaagagcttagcctgatacacactggttaataatagctcttattgttataaactatatgacttgataactgtaaaaggcactaaaagtaaatcttacatagatttcatctatccccataattagcagtactttctccctccagtgaattcagttttgaggggaaattgttttcttaactttaatagacactaactagcatgtcagaccttgcttggcttatcttcattcttttttttttttttttttttgagacagagtcttgctctgttgcccaggctggagtgcagtggcgtgatcttggctcactgcaagctccgcctcccgggttcatgccattctcctgcctcagcctcctgagtagctgggaccacacgcgcccgccaccacgcccggctaattttttgtgtttttagtagagatggggtttcaccgtgttagccaggatggtctcaatctcctgacctcgtgatccacccacctcggcctcccaaagtgctgggattacaggcgtgagccaccgtgcctggccggcttatcttgattctgtccctagctcttgtcactgcccagttgggtgactatagatatgtcacttcaccttgtgggcctttgttttcccataagtaaagtgagtagccagctgaattatttcatccaagcctcacactctgtgattctcatgtaccactgagaacatttggaagcagaagtggaacatgctacaggtgtgtggctctcatttggtttccttagtgtggggaaggaagcatggctgaaggattaaagctgaattaccaaaagagactgaggggctggcccaccccttggacatttctctgcttcacacatcacacagagtggtttataagcagtgactttgcatcctgacttgtccacatcagtcctggctatcaactgtggtcctggtataattaagagctccccactccctggctttcattctcagaagcgtcatagttagcacaataggttaaaaggtcaccatagtaaaaactgtcatttttaaggtatgaagctggagctgtatgagaatctcattcaggattctggggctatagtcatataataaccaagatgaatgaaggacttcactgtttaaagtgtgcttttgcctaagtgctcccattagttctgcaaaacaaccttgtgcagtggggcaaagcggtgtccgtattgcccttttactgaggcccggagagattaagtgacttgcctggggttgcacaactaagaagtggtaagaatacagattggaactcacggcttaggttttccaaatgctatgctcctgtctactttgtcctgtgatcagaatctgctagctcccaaagtagggtgtgaaggctggattctagaagttcgtattgtcagtttcttcagagcctggagaaagggatgctccaagggaaataattcagcctgacctaatcagcaaatcacactggggggaaggcactggcagggcgcacttcctcctctgcgtggaaaggagcttgcttctgaaaggactccattcatactttctgccccccaactaagccttggaggaaactcttgttccttcactagcagcctctttcccagcccggggctaacctgtaagtgtgcattacctacccctctaacaaggcctttgaagctttcttgcttcacgtctgccttttcccccttgccagttaagaaaaacccatcctaggatgacaggaaagcagagagtgttgagtaagtttgcccccaaggttccctttcctctgtccctcacgctcagtagccccagaacttcactctcaggatctgctcagactctggccatctgcatctagcgttaactgcatagaaaggagggatctcccaaggagaagcccctcgtgagccatagcctttgcctgtgaataaatattttattctcctctgcaactctttatgcatactttgaggcaaatgcattttaacattgaaaaatactgtctggaataaaaacaaaaatttgttcccactctgttctaatttcttttaatgtagggaatattttgtatgagtccattatggaagcaagtccttctagcctaccctatacccaccccaaattagagttatctgttcagcagatgggggacacagagccacgtatttgagagtaggacgactggggaaagcagagcgcagatcatggagtgggacagcagccacttggcacactcactgtggcttgaagcttagaacatggacttggcagaagccaagtgcactgtgaagacccatgagcttcccccagtgccagagttcctccatcccctgcctgtagaacaagcacggtcttgctcgagacgcttgctttttcattggtgtccttactgagaatttcctcttggcacctaccagacatccagttgcacttgcctcctgtatccactccaatcctaatggcgagaataagctaatttctttgtggtataggcctgattttaattgcctgtgataccaatgaagtgttcaggaagcctgtcatatcctaaagaaatcaaactcacgtgccgactgaaacagcccattgaacaggaagaagagctccccatctgacaagagtctctttattgtcttgcagagatcaggaatggaaacctcaaggccattctaggcctcttcttcagcctctcccgatacaagcagcagcagcagcagccccagaagcagcacctctcctcacctctgccgcccgccgtatcccaggtggccggggccccctcccagtgccaggctggcacccctcagcagcaggtgccagtcactccccaagccccgtgccagcctcaccagccagcgccacatcagcagtcaaaagcacaagctgaaatgcagtccaggtgggggctccttgccaactgatggttctgtttttcaggcaccttcctccaccccaaccaatctctaggctatcctgtatggctttttcatttgtgcttcttcaatgctgagagctactggtggttagtgggaaattagcatggccttgaaatgcatgcagtgaggagcccttcttgtgtctggcagagatgtatacttttataggtcagaattgccagcagccaaagctaattacctgctcctgctattactccggcctattacacacatgctcgtagacaataaacagcccctaaaatagacttcaaacaccttttgtgtgtctccctacaagctgaatgttcactgttataaatgagagtagttttacttagtggaggtaaaagttctattcctgtggatgcctctgctttgccagaacagaaatatagagggcaccaaagaaaggtggcaagggaaggaggcagccatccctgagcggggcagtatcgcctaacgggagcagttaccattaaatgtgactgtgttgtgttgaactgagatggggagagtcccacaatgcaggagtaatctgcagggttggggtctggattttgttcccagggggactgacgtttgccagtcatactcaccaggtacaagccaattgccactgtagttaccctctactgtgctacagtggaaataacatcaccctgtaaaacttttgtcttaatggtagaaaaaaaaggaagactttaggaactagagtttttgacttgaggtcaagttctacagaaaagttcatactgttttcttttaagccacaagacttcagctataaaccctaaatgtcactgatcagattgattgcttgatttcatccaatatgtgctgaagagtaatggccttttcttttcattcccccaaagcaccagcattaataatcataaggcttctcacacaccttgatataccttttattacccatttagttggacagagcacaaagccgctcaaacacagctgctgccttttagacagttacagccttcttttttccccatgagaagtgctatttcccagttgtgatgatgttaaaaccagcactgatgggtgtaatgcaaatcaggtcccataattaattatctatttatatccagtttgcattgtgggaatttgtggggtgggagagatgcctggactagcaatgaggaacagacagccttatcagccatttgccaaaccctttccctggagaactgcctgagtgggagtcactcccagtcagagcttccctgatggacatgggttatttaaatgatcagggtgtcatttcccagactgcattctgctgagtgctcattccctgggatgttaacttgggtcatattgcagttctgtggggggaaaatattgggagataatttgggttaaattgctatatggctctcattgtaggtctactgagatccttgaacctgccaatatgcatttgtttatttaattggtattaagcctcccacatgccagacactgttctaggcacttgggagtcaagaatgaatgagattgccgaggtgcctgctctcctatgctcctagaggaggcaggcaaacaagcacatgaacaggaaagggagctatcagatagtggtgagtattataataagatgatgggattcagaggggctgggttgctaatttaggtttggttgatagaaaggtctctctcaggacatgaagggtaagcttggtgtgttggaagagcataaacaaggttattatagcttagtaggggaggagagggatcagtgataaggtagtttggaaggagagagggctgctaccatttatgtggatgacagtgtgacctgtggtccctggagttgcacattgctgtggcactcaggccccgtcatagagtaccagttaaactggatagggtttggactccattctaagggtgacaggaagccatgggaaagtcttaaagtagtagaaagactggatctgattggcaggtcaaaaaatccacctttgcttctctttggagaatgagattgtggaggagcaagaatggaaggaaggacctcagttgagaggactttgcaatcctacagatgagttgggccaaggtaatagaagcaaaaatggagatggactaattctgaatccttagggggttgagccaagaggcctgcaaacagattaactctcgggaataatggaaagagaggaatcacagataaagcctagattcctggtttgaacagttaagtaagtggtggtattattctttgagatgaggaagcccaggagagcaggtatgcattatgaatgttcagacaggtggtgacacagaaaggagcattctacaaacttggccacgtcactcttcttattttatagagcatctcactgcatagggttccaaggaacatgcattgagaaatagtggcttgtgtcactgagctttgctaacctgaggcatccatttccatggtaggcgtttgttttcttaaaataaccagatattccagtcagagcacccatctcccagtaagccaaaacatcctactactaacgagtgctttacctaaagaagagccaaacttacttgagtcaggtttttacattcatttattccagctacaaagtgtcctgccatcatggccccctgaccctacagtggtgacatagaccgggctttggagttgctgtatgtcctcatcccttcatcttgcccaggttgggttacttctgcagaagactggttttattcactatatcctgatactttctaattgtatttccaaaggataatcttgttctcaaggtctagggatatgctatcccatgctaacactctggctataaatttaagaatgataaaattacatcagtggctcggtctccaaattctatctttgataaccaaaattccaagggcagtggtttggacgcttgattattaatgtcaaatgttgatgcaaaccccccacatgccaggtttgttttgtttttctgttagaactctgcctaaaaactattttgaagctatctaggttcagcacccctggggggtagcaaatactaaagcttggacaacattccatgaagtttgctggtaaaggagctatggaagttggcaaagaaaatctgagatttttttttgctccactggcatgaaggaatcagagcaaatcttccatgacagcttcatagaggctcactttgcttcttccccttagctcatctcataactgacatggtggccaagaacttaatccacatttcaccctgtgaaattccccactggtctagagtccaggagaggagcatagtctccaggacttgctttttttcctccatctgtgtctacacagataatcagtattcagttgttaaagaataatccagaaaatgactttatatttttctctattctcctctgtctcttcactgcctaagactagtaaaaccaataaattatttcttacctcagatcctttcatgaacatggtacaggatgtatggatgcaagaaagataaatatttctatctttcagaaagcagtaaataagtttaactttttcttttattaagcctaactaaaattctttatatgtaccaatttatagtacaagaaaaacagaatttagtgagtttaacaagcattaaatggtcatttctatagcattaaaagcaaaaatccccaaggccagcaacatctgggtataggtttgcaaacatcttgttttgggtcacctttatgggatactgaggacattcatctgaaaagcaccccagtagaacaagcatgtgaaatagaaacatctcaatactttagaaaggcataaagtttgtttacttgtgagggaccccatattttgagaataaggccttaaggcaagaaagacatttgatgtttaaagaaacacacacatgaatacatacacacaagcattcttagataatcttaaaagcagtttcttcacattggaaatctatcaaatcagtaaactgagacctagaaagaaagctgtgtgtcatagaaaacagtgggcagggggggaaagaaacagcaacatccccattgtcagaagactcttaggatttgtgtgtctaatgtatcttctctctcctcattcagctcttccacttttttctttcctatcatgcagtgcatcatccaaggactcatctcaaagcaaaatcatccgcttcactctgggtcagaaaaagatctctaggttagactttctctgtgtcctgcaaagcatggtttaatcccaacccactgttccattgttccctctgttctggctgagtttgcctttggtcctctcctcgtttcatgtttgcagttcgagaaaactaaatgtgctttggctaatggtcccatggtgcagagctttgaaagtggccatgggattgttgcaagtgtgtgtgggggaagtgacagagtgcaagtgagattgaggtgtacatgacgtttcgcattttcttgacttttggctttgactgctttgtcatcagactccattctgatttaggtaaaggtgagtttctacatagtttttatagtggttttatgatgagtttgcttcctgcttcgtcctggccctaatcccacctcacctgcatctcatttatgtgtcttgtgctttgtgttgttgttgttgttgttgttgttaaaattactaatgtgggtttggttttcccttgagttataaagacttgagcatgaatccatattgggcagaggagacaaaacagcaaggcagctatgtctcgtctttgtttctggatgctcttaggtgccatggagaccgcctcagttccctgaaaataaaaaacaggcttgctcacaagctagttctcttaattcagacttcaacctgtctgctgcctcctatgaggacccatcctatggtatgggaaaagccagttatatcacgttgcatcattgcttctactgttattttcaaggtatcaacagctaacatttattgaacgcaccagttcaaatgtgtcatcttatatcatcctcatgccaggcttcatgaggtaggtcatattattgtctccatttcacagatgaggaaactaaaatttaggaagttacatcattgtgcccaaggccacacacataaaaaatggacgaaccaggatttgaacacaggtggtctaactcagaaccttcactataaccacagtgctacactctcttccctctccttcaattctggtatctctgtggttgttgaggctgctttttaaaatcttacgtttcaaccactactcttggctttttctctcacactgcccttgtggcatcctaacagaaattgctgctggggtagaatctccttattatgactggtatttatttttcattgaattcttattgaattcttattcttatatttcattgaattccatattcttattgagtattgagtcaccctattcttggttcacagtatgaatttactcttgtttaaattaatgaagtattaaacaaatttgcaagtgcatcattttagtatacatatctatagggttaggaggatattttatttgctttttggctttgtataattcttacctaaatgattgcagagatatccaagtgaagtgtacttctacaatttcaatacatattcttattgagtatggaaagggaaatccatactcatgtctgtcttcatttatcacaaatacatacaaaataactgctcacttgctaccccagtgtgttagcctctaggtgcctttcctagccagagtttacttttctttttttagacagggtcttgctcactctgttacccaggctggagtgcagatgcactttgaaaatgttcatctcagactcttgtgtattgatttttgtccagttctgatactttaacctagactcatggcgctatcatggcgctatcatggctccctgaggccttgatttcctgggctcaagcaatcctcccacatagctaggactacaggcacatgcctccatacccagctaattttttttttttttttaaaggtggggtctctcaatgttacctaggctggtctccaactcctgggctcaagcaatcctcccgccttggcctcccagggcgctgggattacaggtgtgagccactgagctgccgaacctagagtttggttttctgaagtgcttacacttggggagacccaggtcaggctctgcctggctggcgaggggagaaaccgtatggcagtgtgcttctccatagagcaagtccacacgttacccagactcggtggaggaggacaatagggaacccaagtttgtcaccgcttctggtagccatgcagaaagtggctgctttccctaacaacaccaggcccaagtcagagtggaaacccactgctctggcaaactggtcccttctcagttaggttgaatgtcacacaaatgcacatacataggaaaggaaaggggagggatgagctgggaggaaacctgaaatttagtgcctgttcccacgatgtgctcagtcctgcaagataaagaaaacaggacctagctggggaaatatctaattggaagcacatgcccatcccgtgaatgatttgttatcagtcccagatgatggaagaaggcagggggaagagaggaagcactggaagatgagggcgtgtcaaccctgtcctgaggctgggctgggcacagtgcttctgggtttaccctaagccaagatctggctttcccttagtgtcatatcccctacttagagtttctttgagatacgcttttgtctctgctgaggccaatgaagggatgcttctttgtttcaaatgaagcctttgaaggctcttccttgccttctctacacccccctttccccacccccagccttgagcaggatcctgtgaagaattttagctgatcaagcaccactaagcacagcagtaaagtttggttgccaaaagaagcagtcctaccccttctggcagagtaggccacctcccctggagctctggaaataggtctcctgttggagaccaagcattggtggaacacctgccagaacccaacactttgatgggcaccaggggtattgagaagaatgggaagcctcacccttgaatctggatgtggggaggggcgtatggagggaattgatataagggtgaaagctctccatggacttctgcctttgaccactcttattgcctcccggcctccctggtgagcccagggaggcttattttacctgcaggaagcagagaagcatagtggatatgaggtgcagttaaacctaagcgaaggcccatccttaccacttactgatggtgttacctgggcaaatgatttgatctctatgagcctgggtttccttattggtcaaatggggtagtcttgccttgctcacagcattgtgaggcttaaaaaagtcatttaatgaataattataaatataaattaataaagtctttccttagtcctgacatataatcagttcagatatggcagtgttggtattttgggttcatctgggtcaggtaaggcaaccaggctgcctctagaaagtcccacagaattgatctgtatgcaactatcttgtggaaaagaggcagtggggttagtagtttggtcctctctgcccagctgctgggctgaaaagcagatgccatggaaatgagagatttagtatgtaatcatctcgcctggcaaaaagcatctctgattatgaccgccccccgccaaaccccagcatgtgcacacaagctgccatgcttcctgggagggggcatcctctgctcccagcctctgaagtggttttgggggaaagaactgttttttttttttgccatcagcacgtacatcgcgtggaacagaggagccgggatgcactcgtaggttatgtgctgggaatgacagttttactgctctgcttaattggctctgcacacgttggagaaattgaccatggctctaacagcagcaggattgttcccccaccgcttacaccacttcccttaagcttaatattttaaaaactcaacatgtatatgtttcaaaggacccgtctgtgttctctgttatttgtaattgtgtttggacatacagtgattatgagaggtcaagttcctcttgggaaggagctattgggactttctggtgctgtaagggatgcagggttgacctgccacgctcccctctcaccacgctgcctcagtgaggcaggcccagtaggcagcatccgttgtgatacctgcagctgttccacaggagccaagacctagctcttcagcaaacagggattctaatgctccagatggcagatgcttccagactggaggttgatagacattcccatgatacacaaggatgttaccaataatgaatctcaaaatgttagccagaggcctcggctctgtaccactggtaaactggaagatattctgcttttcacctctacctgtgctctcagcctccttaattaacaccacatccctggagggcaggaccaagtccaagctccatagtgtagcatacaaagtcttcccttccctgccctgctttcttctctagcctcgtttcctcccactctgtcccccgagtcccagcacacaccagctctttctttcccctgtactttctacaggctttgcttcagagtggcatgctctgccccctgctttcccatcccctactcacattcccattcagcgtgccagacttgctctggggtcttttacacactacctttcctgatcatctcaccaacctccgagatcttcatttccttctctgaataccttctgaacttcacgtattttaccaatacatctgtaatctagatgtcagctggggtcgacaagccccttgagatccgggtaagattgagcattctagctctgcctctttcagtttgtagaaagtccagtggcctcccaggtttgcttgggtgtctcaggttcttgtggtcacctttggctttgaaatcctgcacttgaaccccagtacttaaaagttcagtctgaattagttcagtttgtggatggactcatcatcccaagagatgttttggttccctcctgggtgagtccgggcttagctttttttctttcttcccacttaccacacagtcattatggcctttgtttgtgaaccaaattttgctgaaaatgtcagacggaggaggcttactttggagcaagcaacgatctgagcccatttacaacagaacctaagtgttaaactacagagtcaacatagattctctctgaatggtgggaaaaagtacatgatctccatccagttttctgatttgatcaagttcagggagctgtcctgactagagtgtagaggcgatagtggtcaagggtggacaggagctggcttgagctttttggtggcttttgacggctatatgcaaaccattcgccctttgccatgtccactatcctcacagtcctcaagaactccttctccatgtcccaaaaggcttggcacaatgctgcagccatttgaacgatgtgctgctcccatcaaaagagtagctagccactgactcagtgaaaagaatctgaccatgacaacccaaggaaaacccagaactatcttagttaatcccaaaccacggatgtttcattccagagagtggagcccacagataccccaagtataagatctcagtcagccacagatacttggattgagtagtttctcttctggaatgttcctagggagatgatgagccctgctcgccgaagcctatcttgcctctttgaaaatgttcatctcagacttttgtgtattgatttttgtccagttctctctgatactttaacctagactcatctattttcttgatttatccaagtatttcttgtgccatagcatgtttcttttatgccagtgtccaatcccttcatgaacccgtgttcactggagaagacgagaaaggaaactaacatacggtggctggacattaagccatttcagatttacagctatacccaatggtataactgttaactattgggtataactgtaaatcattattcatcattattccaaagttacaggtaaggaatttgaatctcagagaagttatgagactgctccaatgtcttgtgtatggaaaaacctgtattctatccattacaccatgctgcctcacagaggaccagactgcctacctgatttaaggttgtgtctttcccatcctatgctttgattgcttgcctctataaagtccttatcctgtcctaaaaatctgctgtggttcagcctagggtcagcacagcaggggctctccagcaactctgaaagaatgcatcttttccctcttcattgctttttgcttcccttctctttgcaaattccacactgtggtagaatactgtgacctgcgttcccctacaccacttaataccattgctctgacatcatcttggaacaagtccataatccttttctaggcctatctgtgggcataatgattcccaaagactctgtctggtttaaaaagtccagcccaagggaggcccagatcttcacctgcagaagctcttccattggatgtgagtaatcagataacactgacttgaaggacttgcagaacattgtttgcattggaagcagaaccaagaggtactaagatcccactgctggacctccttggccagatgtgctagccacatctggtccccaaacacaggcactggcactgctagtattttgtactccgttctgtgcctgtctttgtggagtgaatgtcctctccaaaggagatgaggtaaattaaccaaggtacaaatcctcgcagcacagtgggaagtaattctcactgcaacttgttgggggaagagctaacccccttccttctctcccagctcccagtcagggaattgggccagcttctttttaactatataatttttacagtcccctcacaccagctcatgttctctgtttactctacaaccatctttcttgcccagccaacaagaaaagtttaaagtgattgcctgcttatatctaaaatgcttccagactgtagacttctttggtgcttacagatttgcatggaaagagaaggctgaaagttttatgacttgaaaattcagacttgtcactagatctaatgctagtcagctgaggttccagtggcttttaaacacagctaagtggatttcaagctgaaagatataactaaacatttcatcatttattcatctttcaactttaattattggaaacagcctgcttagtaattccctggaccaaaatcctgatttgaggagtcttaccattaactctttggtgaatgggccataatatctttagacacattatggatggtgactttatttcccaagccacccaaaatgaggtgttttatttaaagggagagtgtgtgtttgtctttaggccaacaaattcctgccagttttacaggaagaatatatgatgttatccatctactgtgcagataagttgtacttcagcctcaaaataatgcctttggagacaggtcatcaggtgttgaagggaaatgtatgtgtgggcaagtgtttccaaccaacctgaagttttcattgcaaatatgttggattctgagtggtagtaattcaccttctcaccactataaattgtccttttcttgatacttacaaccccagattatggcaaacagtttttatacctatcagaagagatgcacacacaaggttatcagtttagaatcctctgagggctttatgttccatgcttgataaaattagaaatgactggcttgaccctattcaaaagtaaaaatacttatcccagagggaaaaaaaaaatgaactttgtttttgttttgttttgttttgagtcagggtcccactctgtcacccaggctggagtgcaatggcgtgatcttagctcactgcaacctctgcctcccaggttcaactgattctcctgtctcagcttcccaattagctgggattataggtgcccaccaccatgcctggctaatttttgcatttttagcagagatggggttttgccatgttgaactttgtatttttaatccacaaacatatttcttcatcaaaatttttctctctgctcaaagggaaacttcacattttgctgttggactttgctggggtcattacttgcctacatgtttgtaatggttccaccaaattctgtgactggcaaacctccacacaatgtcttggatagtttcttttgcctcctgcatggttgcagttccttcttcctacacactgttattcttctgagactgaatgcattatcctgttgcttttgcattttagacttccaggtcctaccgcgagggtatccgctgcaggcagcgaggccaaaacacgcggagggtcaactactgctaacaaccgacgcagccagagctttaacaactatgataaatccaaaccagtcacctccccacccccaccgccaagcagccacgagaaaggtgagtcaccttcttgaggagcctttttggtattttccttcagagcacatctacctagttccttcgggtgaattgggttgggtcatggggaggggttgcatctgtgttgagaatgagttacaaggacatatttggtaggcaggaactttagtagccagaggtattaataaagtgggggaaaatattgttatagtcactagcaaaaataatttgctatctttgtttgggtggggccccatagacacccggctatgcatagaagcaatatagcatttggaatttgaaaataaattttcatggaatatgttccatatattaagtagtttttcagaaatgcaagcttcttggagcatgcattttgtgaactgtgataagcttttttatccgtcagaaataatgtgaggggagttaggaacaagaggtttttcaccctttgaaaaagtcaggaatgtggattggctcattgaagatcttggctacatataaggagtggacagcattgctctaggagttgtgatgatgtaacttttgccataaaaggatatggattttttttttttttttactatacacagtactgagtttttaggatggagaaaaatagtgaatagtcccatgggggtgctgcccagaatgtagtaaaacaaacctttgcttgtttcagcctctatctcttgagacattggagaaactaaggtagtttcaaagattattcaaaaagaggcagagccttccttcattccttctaggcaaagtagtctagacatctttaggaaatatgtccaggtctcctggaagcatttcctacctggtggtgtagaagattcctagggctgtctacgtggtgtttctctatttccctgacgtccaggaaagctgccccctcactccctaaagtgccccagggacatgggcagccctcctactgtgaatgagctgggaaccgccgccattttctcctctaactcagagtcacttgatgcagtggaactgagttcccccaagagtttgctaatcactctatcttttcctccctacatatgaaggaaatgtatacagggctgacagatgtgtatggagaaaggtttcccagccaaggcactgggaactctgcaaatggcactaacgccatcaccaggatgtcttaacctatcaagactttgtcatccagcccttagtttctgcctcaagcaaccattgttactcttcttctctctctcctttcctgcttccttgccctcttctctcccactttccttttcttcaccgtaccagtgtgttttttaagtgtgcttaggttacaaaaataatatatgcttgtaaaatggtacaagtatcagataaaagttctcctgcatattctccttagagtacaaatatacaccattctatatatatccatccataactttcacaatgcatatatgtgtatgtatatatgtatttgtgtgtgtatatatatatgtaacagaaagttttgtgtttttacattgatgtgtaaaagctaaactttatgagtacctaccatgtgtcttattttacccctattttacgaaagatgaaactaaagcaaagaaagtttaagtacttgctgaagtcatatcagggatagtgagagatggagttgaatttgaacccaggcacttcggtttcagaaccatgattaataccgtgctttccctggaagtgggaaacaaatgcttgaagcttcgcctgttgagggctggttgactggcacaggaggagaaagttgggaaggtgttaggaaaagcctgcgctgggcctctcctcgcgggccagtctgcccttgccctatactcatttggggagaagctatcataaaagagtctgaaagatggatgtgagactcaagtccaaaaaattgagaaaataaagataaaagttcctggtggatttaacaggtatagaagtatactgtgttctacagctgcctatgggtgtgcccgccaatgctaggacagtgactgacctgaccctgccctgggcaaaggctcccatatctgctctgagcagcctgagaacaacgaggccccttaaaggaccatggtgcaaattccagtagaggcaatgccccagggaaagactttagtgtcagaagaaagaaagggaagtcatacttatttttttatttagagatggagttttgctcttgttgcccaggctagagtgcagtggtgtgatcttggctcactacaacctccgcctcccgggttcaagcgattctcctgcctcagcctccctagtagctgggattacaggcatgtgccaccacgcccggctaattttatatttttagtagagacggggtttcaccatgttggtcaggctggtctcgaactcccaacctcagttgatccgcccgcctctgcctcccaatgtgctgggattacaggcgtgagccactgtgcccggctatcatacttatttattaagtgcatattatatgccaggaactttgattttctttcttttctttttctttttctttctttttttttttttttttttttttgagacagagtgtcactctgtcaatcaggctggagtgcagtggcacagtcttagctcagcctgccaagtggctgggattacaagtgtgcaacaccatgcccagctaatatttgtatttttagtagagatagggtttcaccatgttggccaggctggtctctaactccactacagatcactacaaaagtgatctgcccgcctcggcctgccaaagtgctaggattgcaggtgtgagccactgcgcctggcctgattttcagtatggtacctgatctttacaaatattctgtgaggtaaatactgttaactcaattttacaggcagagagaatgagattaatagaaattaagtaacttgccctcgctggtaactaagcactggaattgtatccaggttccactcggggattcaaactctggcttcttcctgtccttggggaggtctgttatgaggataaggtacctgtgagagtgttatgtgagctgtgacgatggaaaactcctgtgaggattcacaatgataaaaataactgatggtggtcccagtctgtagaagggtgcatttattctctctcctaccctgggctgtcccaggtttttttttatactaactttttcaaccatcctgaggtaaaaagccagtggaagtttactttcagaaacttctgcatttccttcacctttttccttggtttcccttgagtctgacctgttgattgcagctcctgaggtagccagcccacatgcagagtgaaataaccacccgggtaagacacaacaggtacctggatgaggtcacctcttgtccttcaccttgagttctgtctcggggagggacgctcttgtgaacagataagccacagtttgttgtggtgggtgctgtagctgaggtgtggactgttttcaggtgaggtaaagtccgtgatgtaatcccatcacccctgctccttcaccgaagccttcctgtaagtgagtcagactctgactgtgtcaggatctggcattgcactctcaggtgagccaattcatagactactttttcaaaaagtagtggcaaaatacctataacataaaattaaccctcttcaccattttaatcaataatgttaagtatattcacattgtggtacagccaatgcctggaaccttttcatcttgcaaaattgaaactcggtgcccattaaacaataactctccttcaccacctcccaccagcagcccctagcaaccactattctactctctgtttttatgagtgagaactctcgatacctcatgtgaatgaaatcacacagcatttgtctttttgtgtatgggacagagctactgaagaattaaataattacttataaagcactttactgcttggaaaataaacactgagaaaattttatctatcaaaatgtgataggatatgcataaaaatatggaataatataaataatgggcatatttcacttagcataatgtccccaagggtcatccatgtcatagcctgcaattcataggctttaatgtgtgaccccgttgacctaagaatttcactcggaggaattgttctaatgacatcagtaagttaaattagaatttcattattctgtcagtaagtgacaaaaatatttcaacatttagtcccaatttttaaaaaatattaagagggactgtaaactagttcaaccattgtggaagtcagtgtggtgattcctcagggatctagaactagaaataccatttgacccagctatccccattactgggtatatacccaaaggattataaatcatgctgctataaagacacatgcacacatatgtttattgcggcactattcacaatagcaaagacttggaaccaacccaaatgtccaacaatgatagactggattaagaaaatgtggcacatatacaccatggaatactatgcagccataaaaaatgatgagttcatgtcctttgtagggacatggatgaagctggaaaccatcattctcagcaaactatcacaaggacaaaaaaccaaacaccgcatgttctcactcataggtgggaattgaacaatgagaacacatgaacacaggaaagggaacatcacacaccggggcctgttgtggggtggggggaggaggagggatagcatttggagatatacctaatgttaaatgacgagttactgggttcagcacaccaacatggcacgggtatacatatgtaactaacctgcacgttgtgcacatgtaccctaaaacttaaagtgtaattaaaaaaaaagggaattaaaaattgtaacaggcaacttttcaaaacccatagagcactttatgctttgtagggaaatcctaaagaatttatcttaaaatcatgccccctcctaccatcatcactgaatttagttctggttacacagaacaacccactgagacatgaagctaaagaaaaagtgatagtatataatacttcttagctagaaaaggcctagagactcccatgaaattcattcacttgttccataaggtggtgaccaagtacacagttcatgtataaaaaacaaaaatattcctggacagcaacataacctactagttttcccaaagactgatctcagattttgcctgtgaggtttggaggaaagtctgcagaacctttaggaaaacctgcaagttgtttgttgtatcatcattgccatcatggttagatttgcctttgatttcgttttctctctcctgcaagcagcaatgagccacagctgtgcctgacctgtgatttatatatatatatatatatgtgagcagatttgcccgcaggaagactactcacttctgttgactccaagtggccctagggctccagaccagaatcacagattttcaggggcaaagaaatagctgtctttttaaatatttgtgatattacgtgttttctcttcctgtcctctcacatcctttgaataaattaacactgcctgggatctagtacatttctaaagtatttggtccatattatgaatttgaaacatttggtattcctagactgacttacatgcatatagaagatactttcttctgaataatacggttttcttcattttacagaaagcacatcttgattttcgttacaaaaataatggaagatattcaaacaacatagaaatgtattcaaagacaaagaaccctacatagccccacctcctagattagccactgtttatcactttgtttatattattccatattttatgcacatatgatcacattttgacagataaaattttcttagaaagtgctttataagtaattattcttcagaagctctgtacccgtacacacattgatattactttcaaaatcttttaaatgaaatcatgaagtcatggacagcctttctcgtttgtgcacataggtcattctttcttcctaatagtcacataatattccattgtatggatttaccacaatatcgtttaatcactttcatttatgttgtttccaattttttgatgttttaaatagtgctgaaattaatatccttgtatgttttttacatgtatataaccatttcagtgtaattgctgtatcaaagggtatgcatagtttccttaatacttccaaattttgctcccaaaagattatacctatttatatacccatcaacaagatatgagagggctactttctctacatacttgatagcacttttatcactgtcttcggcaaaaaatactttcattcttttgaaatgaggcaaattattttaagaagctgaaataacaagaccatttgataaaaactggacttgtttactgacactgctttgacaaccagttgccttaacatagtacaaaaaagcacttgagtttgaggtcaaactttctactctcaagatacttctccagactcagtttcccctctgtgagtctgaggtcctccatcactaaaccaccgtgaggtgtgaatgaattcttcagttggcgctggctattgcacctcatctgatgggagcgccatccgtgatccatgctttctggtgggtttcctcctctagtttttgttctgtgtcattcccttcctctttgttcactccttgtcatgagcagaagagaagagccagacatggctcgagacagaattttataaccttcagcactatgtcatgtctgagtaactttggggccattgatttagaatctctataaacatgtcactttatggttggcaaaccaagttatttatctgagctggtgattagatgtaaccatggaaaagttgcccacgtcctgctattaaccaggattctgacataaaattacaggttagactagatgaaattaattcagtcatccaagtcatgcagacaaaagtacagttggggtggcctgtttcaggttactttcttcatttgttcatttcatcatcatttatagagcacttactatctgtccagcactggactggttgtcgtgacaggcagaattgagacacagactctgcttcccagggactcacagtctcagagaggaatgatgctcacgtgttctataatagagagaggctcaaagttgtgaggaaaaagatgaacatagctgggaagactcagggaggacttccgagaagtgatatcatttgtattgatttccatttcaaaatttttgcttagagaaaaggaaggctgggaaagaatgacttgtcctgcccttcctgatctgggtgttaatctgacagcaaatctgctgggttcactgtgttattcaactcatattctatggagggcttgtagagtgtaaacttctgcaagatcatttctgtggtggggtagggcctcccttggtcatcaagagatctttgtcattgctggagctattatcccaggccagggagagcttaggtgtcggttggttagagtgggtgatagccatctttttttgggaatcagctgtgatgttattatgaccttctagctagtacccatagttgtcaaagggcttagaaagccaacctagaggtgtgaaccaaggtggcatcattgaatttaaagaattctctgggatattgcctggaatggaactcagtgaccagttagaccacctgttgaggctaagtaggcaggatggattagatgctgccaaatttagggacttcacagatcactggaggaataaacaagaagttgtatcaaagtctcggggccagtgttcagttatctcaggagaggagttttggggccttgcaatcaaagagaatgcaagtaccgtgaaggcagaccactgtgtttgagtattggctctgccgcttcccagaagtatggctctggccaaatgtcatggtcaccaatgcatctgctcaggatgaccctcaaaagaccatcacaggccatgcttagcaccattctagtgctgtacccctgcattcccaggtaacagctcaggtgtgagggaataagacttgaatagggcaggtgcacaagtccatccagcttaaaagtcacataccccaagggagtatgtaacagccccataagtataaattctagggttcccacaaggattaggcccaatcaattgtcatagaactcagagaagctcaaaatgatggtgtcctcaggaagtatttatacctcatttatggtttttcccatccagatgtgtcatttttaccataagcaatgtgcttagtaatatagtgggcattctatctttatcacatttccaggggaacagttagcaagttaacccaaggtcaaattctcgtccaaaagaggaaagggttttgttaatccttttccaacagcaagttatcttacctctcagagattcagttgatttatctttgaagtggcaacaggcttctatagccctaatgttgggagaaagttagatgtgaagcattctttctcattttttgcataatccaattaaaactctagactgttgtctctcaaggtgtgattcatgagccatctcatcatcccttgaggtaattgctaaaaagacaaatccccaggcattacaaactgagtccttctaattcatatttttgaataaaagcctagaagtttacatttcacacccatgagatcttaaggcactggagcttgagaaccctagttttagcaggacttcttggttacctttaaaagagaacactgcctgccgggcatgatgactcacgcctgtaatcccagcactttgggaggctgaggcaggaggattacttgaggtctggagtttgagaccagcctggtcaacagagcaaaaccctgtctctaataaaaatacaaaaattagctgggtgtggtggcgtacgcctgtagtcccagttaagtgggaggctgaggcaggagaatcgcttgaacctgggaagcagaggttgcagtgagccgagatcacaccactgcacttcctcctaggcaacagagcgagaaaagagaacactcccttttaattgccctttaattctcaacaactactttgtagtacattgttatggggaatggaggtaatatagtaagacacccagacaaatgcctagcacatagcaggagattaataaatggggaatcatttaaatgtatgtatacattttgtcatatacatattgaaatttattctcagaaccagcaacttacactgggtagacttaactacttgcataggtcttattttcttttggctttgtgctattgcctcactaacctttagcaaagttctttcttgcatttttcatttttacattttcattgctgtcttgtttctgctaagctaacagattcttccttagactggcaatattaaaaagaaagtgtccctttgaggtctaaatagggaagcagagggaatacaagacaaagaggtgctctgagggagaagttggctcaccttgccctagctggagaatcatcttttagctctttgtctccttggcacttgcagagcttggtggtactttatgtggaggagagcactgtcctgttcagaggaagggcgagcactattaaagctgcctagagaggcacctgagtgacgtgcccaactgcccttactccaccctagcttttgtccttaacctcaagcattacagtcaaacatcaaggtgaaagaaattgtatccagtgcagtcttttgccccctttgggagtcattttcttgatctactgtgtaatttaaaagagccttcagaagaggagacacaaaaatccctctaatgtgtgaaactaataacctttaatgctgaagccatccttttttcacagagaagaagaatgccaccatgtttgtttgtctctaaatatggatacatttcaaaaccaatgtgtgaacttatggttctgctatatatcctttctctaaaatacaataaacctggctttttgtaacaaggagtagagaaaaagagaaaatatatcatttggaaagatgaaagatctatttgattagtcttgtctcaggaattgaaaatgactagttgatgttcatccgatcttcagatgataaatctcagcatttctcttgcttccatctgttacgtggaaactatcacacatacatgaattcagtttcatttcaaggatcattgggagggagaagtatttacctttctgggtgctctcataatagtcatttttatcaagctctcatctgtagtcaggacttagttcggtcatcccttagtttaaggtccgctttaaaagtttatgtcctccaagtttaggtatttgacagtgttcaacagcatgagaagatacatatattttgggataaatgaaactaacatttctgtgagcatatgtagcccatgttcacaatgtgaagtgcaagcatggagtgctgaggagagagaccctgaacagtaaagcctggcagctcatgtagctgcaactacttactgaggagtttcttgtgaatgtgcacttggctgcctctctgggccgaggacatgacatcctcaggcttcagtgactctcgcaaataaagtgcttgtttcttagctgcagcttgcctttgtgattccatcaacgtgtgcatttcattagggtaccagtgtgtagcccacgtgccagggagccgtcttctcctgatgaaggtgtcggggttgcaatgagaatatttgagacaatggtcatggtatatctacttggtggtgagagtgacacatgggccatttgcaggtgtcacaccctgtggacgaatggtcatgctacacggtggtttgtgccaaggcctcatggacacagttcacattcttagtgtcctaggagctcctgccatgattccttagcagtggttatgcttgtttttatgatggcaaggctccccaaactttgtggacaatgcacagataacaactgctgatggaaatcaatggcctggcctgcttccttcataagagcaaaggtaaaggcagcctcttaacatctaatgctccctttgcctttttcagagttggagaatcacagcatttttctgaaatgtggagtgggaaatctaaatgtggagtggggaagctataattacatagcttggaaaaagaaaagtttaagaaaaaaaaaaaaaagtcctttggctccaggacagcctaggactgtaagtcactgctgccccctactgcccaagttttgtgtgtgtttcctagaggatccttggtttctagcctggcattctcaggcactgtgcttgggaggataataacttgcagactgtctaaatgctttcttccagacagggcctccccacatttgtttcctcaatttaggagaatgtatgtgaaatggagaaaacccacagtgtgggtgtgatcaggttcatgtggcctagtggaaagactttctcttgagtggtgaggaactgacagcaggcctgagctaaaattggtcttcacaaagccgtccacccactcacttgggcaggcagccagctggtggattcaaggatcaggtttagccctaaggagaaggatttttgaaggcactagttgatttttgctgcaaaaaggttatgctagatttggttccatttttaagaggcaaataattctaaaccagactgtatagtgtggaataaatgattctctcccttatttattatacattcatgtacttggaattcagtccttcatatattcatgtgtctgaggttatttattgaatgtcttctatgtaccaagcattatgccagtcactgagtattcaaaagtgaaaaagcagattatttctgcctgcatggaacttaaagtctgatggaagagacagtaaacaaatgcaaacagtatcattacattttgtggtaactggtcttataaaaaaaaaagaggggtactatgaatgaacttaattctctggattaggtagaaacttaattctctggactaggtacaacctcttcagggtgagacccatagccaaagtttgcagggtccattgtgcccatgatccccattctcccacacaatggttggaaataaaggatgtttttgaaaacagttttatggacagaaaccagttcccttgcacaaatgaagatctatatcctgaactagcttttttcttctctctctggacatagggagtaaaagtaaaaaaaaaatacagggaggcaaactttggctccatatgtatattgtgaaaagaacttttcacatttgtcttctcacagttgaataggctctcttgagagtagtgagttccctgaccccagaggtattcaaatagaggctggaatatcacttgctagggatgctacaggtgaggtttcttacaatagccggtaggttggaatagattttctctcagattgcttgcaaatctagcatttaattaccccaggcaagggtaaagttggtgtgatttgttctggaagagtctcctccacctcagtaatttcacacatatccccacagtttattagagttcccaaaaccccacctttggattggttcccttaaaagtattcattcattccaaaaatgagctttatttttgagggtgctacttgtactctaggattcatttgtatgctggaaaaaggctgcatcttacgtggatatgcctgtgtgcatttgtgatgacctcttttactccattcacattcttgagaagatttctcccttaacttcacttaaattgtcttgaacttgccaagttcatgctcagaggccatcagagagttcacaggcaaggatgggtgccacacagaagaaatcatggctacttcatgagaagtcacatgtgtggtttccaccatttaacacttggataattccttgccctcatctaagagccagataggaatgttcatgcaaattattttttaaaaaatctatttcactgacatgctgtagggggcagtattcattaaggaaaaccagggacagagtccaggaagagccagtaatttcgaccttgtagggaagaaactgggccctatttttaactatttctgtatactagagactcattcagtctgtcctattgttcgtgcatgaatgaggctctgaccttcagtaatgaaccttcttagggggccaggattaatttggcttatgttaaattcatctggcttggagtgaaaaccagtgaatacctgtgagggagagggacttttccatataggacatatgtgctagggcaaggattcttacctaggtcacctgactccaagcttttgctcttttagccacaatttgaaccatttcaggctcataccttccaacacaagtagtgtttacctcccccagaacatcttcaaacctgttactgcctaggaaatagataataataaaacttgtgggagcgaacctttttttggaccctctcaccttgataagtttggtgaagcaggtgccttactcacccctatcttcccagcccctcaaaatgaatgttttcaaatcatagccacgtatgatttcttacaagcccaaggctgatgggacggtcttgctaaggtgcaccagcttcagggggtctcggctgggcctgctcctatgtctgagggcatctggcacattgactgcatgctggctggtctgtaatggcctcaggtgagacaactcagaattctctacatggtctttcatctcccagcagtctggtctaagctattcttctggtggtaggtgagttcgaaggcagagagttgaaatgtacaaggccctttgaggcctaagctctgaaagaggacaccagtttttgtcttcattctgttggccaaacctagtcacgtgacctgcccaaattcttgtgattgggaaacagattccacctactgaaggaggagctgcaaagtcacattgcaaagcgtacatggcacagagaggggtggacactaggggctgtttttgtaatcaatctaccacaataaacaggttgcacccagtgaatttgtgttgatggattgatttcagttgtcaaggtaatagtctctttccactgtagttgcatgaaaatgagaatgcactgagctcatttaagatgtactaagacatacttgcagtttcctataagttataggggcatgtagttctaagaactcacgggggagagcagccaaagcatccttggttaccccagtcccatagaaggtgtctctaagaagcagatgctggcaggtcggtgaaggggcacaagcaccacttgctttatgaggcccctgtggccaaggaaagaaggtaggaaccagctgttaaagtagaactccgcaaaacaggtcttactccacttgagtctgttctccagcctttgggattcttggtattcacaggcctacacttctctgctttctctttcccacaccaactggcaaaagttgttgtgtgatgaagatgatccaaatgtcagacttgggctcaggacacctggggtctggtcccagcaactctatttgatggctgtgtggctttgatgggtcatttaacacctctgaacttcacattcctcagctctaaaatggaaatgaggatagcaccaaccacataaagttattgtacggtttccgtgagatgaaaccatacagaaaaataccctaaattgtgtatataaggtttgttgaatcaatgatttcataagtgtccaaaagtcagaaatgactacaaaggggaaagtaaccacagcagctgaactgagaacctcagagagccagttctccactcctggtctgttgcttcagatcaaaagtctgaagcacccctgtagccgcctcttcttgctcatcctcctctctctctgataaaccgtgatgaaaagtgtttttgaaaaccaagggaccaagaaacactgaatgaccttcactgaaaggacgacttttagcaaatgcacacttgacatagtttggtaaatatccaccctgttatcttttgctcctggtgtcttagaaatgtcacttattgattcttgaaattcccccactgccactcatagggggagggggaatttgagacagaagtattgattgaaactagtgaacactgaaagaagcatttgttaggtggtcctttccttttttataaattggctaaagtagacgaaagaagatacatcttttggcggagttttaaacaaaaggaaattagccaattatattcctataaaacaatgtttgaaagtcagaattgattatttttccacagtgttttggaacaaagtactctgataggtgaaggatcaaaggtcttttctctgaatatgattttatttttccttttgttttttatcatccctcagtctgggtgctctgattgtcttaatgcatccagacccacaatttgcaacttgctgccccattgctgggggctggtgactacagtgtctttggacagattagaggaaagacattgtagctgaactcccaggcagcccccaggaaaggagcagggagctttctgtgttcccttcagtctgagcatgccaagatgccctggctctggccttgaggtgttagtcagcattagcacttatgatcttggcaaccggaatggccactgctggccggaaactgatcagaactgttcagtctcattaaggagcccctcagatcaccttctcagatgtaacgcttcagaaatcatcaaacggctaaggtagaggctggcttccttgaagtctttccagaggctttggcatatctgccttttggatgagcttaactaaacagagagcttttgaggtccagggtgggtgtgggagctctcagggcactggaagtaacactgtggtggggtgggaggagggtatactgagcttttcttggcccacccgttcactccctccttcctccgttaacctcttcctcatcctcactggtaactctccagcaccaggaggaggagacattttgcagagtgctggtctgtatttaataaataaatgcctctatcctctgcagcactgtccaacggtactttctgcaatgatggaaatagcctacgctctgtgctgtctaatatggtagccactagcgctacatgtgactattaagcaattgacatgtggttagtgtggatgaacgaatttttaatgtagtaaattttaattcatttaaatggccacatttgctagtggatatggtatttgacagcacagctctagaaaattattcattgagcagccagtgagtctgctgctgaagtctgtcattaaaaaaatgtcattctagacacaaaaggccaaatattgtatgattccgtttatatgaaatctccagagtaggcaaatcgatagagacaaaaaatagatttgtggttgctagggctgtggggtgggagtagaggagggatgaagagttgctagagtttcttcttgatatgatgaaaatattttaaaattagattgtggtgatggttggagaacttcatgagtatgaggatactaaaaaccattgaatcactctaaatgcatgaatttatggtatgtgaattatatgtcaatatagtggttttaaaaatggctttctgttcatgccatattcaagtagatgttataactctagctcttctaccccaaaatattagtggttaaatgtctcccctttcttggacctcagtttcccctcgataaaaaaaagtatattgattttgcatcaaggatactgaaggaaagaatttctggtcctcctttccctgtatatatttaactttaatctagttcatatgggatgggactgtatgtaccccctccttttgagaccccaattctagacagtgccccattccaggagtacccaggcagtaaacagagcattgacgcaggtaactggccaccccactctggccattccctctggaaccacagcatagatagaaggcctttggtgctggcctaggaattttaagtaatgcctgagacgtttatctttctgcctctgatccagataaaaacagattgtaactttgagttgtcaattgatcctaatgcacagaaaccactttccataccctcagtgagcaaagaccctggctggggaagaggtggggagttgggagtaggaggagattcctggctgtaaaacatctcatggttttctgtggtttgtggtccaggggtcctgtggaatctctctgggaagcacatttcttcaggagcaagcttggtctttttcttctcccacttctcggctgctctttttgaaatcaaaagcctgccatagggttgcaaattagtgacatcagacgaagtaatagttgccatcatgttcctcctcctcctcttcatcactatcctaaagccttccatgtgtgtcaacagatgttacaaacgcctgccttataaataactttataaagttatttataaggcatatataataacttatataactgcttataatataggtgaggaaatggactgtgaatagacagggggcactgaaacagtaacaacaaagaaaatggtaacagtcactgcccatcgtggggtgattgagttattatgtgcctggaggtgtgttaggtattttgcatacgtagtctcatttaatccctcacatcactactaggaagtgtcagtagtaacatctccattttataaagaaactaaagttcagagtgattaaataacgggcctacattatgcagctaagggccagtgttgacatttgaaccagaatctgcatcattgcaaagctaatattttgcttttaaccctcatgctatcatacaagctagtttttactaaattcactaatcattgagcccctcttttatgttaaatgctgtacaaattgctggaggtgcaactatgaacaaaaccagccaatgccagatgagtggtccaggcagtcagagtcatggaaattcagagaagaaagtggaagcttagggactgggagaaggtaggcaaggagagttcatatagaattggagcttaaaggaagagtatgaagttcttgaaaaactgtatagggacactgtaaatcagaggcgccctggagtttgttttctgacatatcagcatgttaagaaaaaaacataactagccaggcgcggtggcttatgcctgtaatcctagcactttgggaggccgaggcaggctgattgcctgagctcaggagtccaagaccagcctgggctacgtggtgaaactccatgtctactaaatacaaaaaattagccaggcgtggtggtatgtgcctgtaatcccagctactcgggaggctgaggcagaagaattgcttgaacctgagaggcggaggttgcagtgagccgagatagtgccactgcactccagcctgggtgacagagcgagactctgtctccgaaacaaaataaaattaaaaaataaccaaacaccacatgtaaaaatatcatgataatttgaactcatttttatgaggacaatgatcacttctcccccaaaatgcccttaagtgtaaggtaatgcttaatccctgtctcactggcttttacagtatcatcattttgcaagcacatttttttttttttttttttggtcttgatttcatttagggcaaggacagggcttagcaaatatttgtgagctggaagtgaactgtagccaactctgttggctatatggtgcctgaaatcccagcatgtgccagatgctgtgcttggaatagggacaggacacgtagcacagaaacagacacttgtaatatcctgtgataagtgtctataggacatttatgtctggaaggagcatccaatccaatcttggaggagtcaggaagatatcctggaagaagtgaggtctaagctgaaaggtgcattagctatatacaataaggaaagcgtattctagacagaacagcgtgtccaaagtctagatggtaaaaggggacatggcatgatagagggaagttgagtgtgtatatgtgtgtaggtgtctgaatgaagtaggcaaaatgactctctcaattctacccagcaaattggtgctagactccaagttttgtgagggcagggagcatgcctgtcatgttcaataaatccttgttgaaagaattgagaggacggtggccaaaatgggatcagaacccaggctttctgaatctctttggtgttttatcctgtcacctcactctaagaattcttcatcagttccaaattgacctcagacagtggatgacctagaatgcctacccaagccagtcagggcagaaatcaatttcttggtgggggacagagctgcagcaaaggcggaaagactccaaacttctgtccaaggagctttgctaataacttggttgacttacagcgaaagggagagcgcatcttgatccagtgatcggtttatttgtggacatggggaaacctgagagagctctgtggtgatgaagttctgggccacctaaattctagtaggtttcagcatctgttagcaaaaggcagccctcaacctttgagagcacaagtggtaacatctgcagccactctagcgattctaactggcaaaaatgatggattgcaggcatttcatcattgaatttctactaggttacatcctgacttaatcttttggtgcttacattctaatttttaagcagaatgtctgtgtttggtagtagttcttcaactttatctcattaaataaagtttagtgaactgccaaagacaagatgagctagggccaatgtttttgaaatagaaaaaatggaaatggaatttacatctggactctaggacactttgctgcttcatttgcagaataagagcaaaaaagtgattcttgtatgtttctatatctcttgcaaaagtcctctttgctttcaaacacccacagctttgagcaaatgtttacattccacttaaacacatttggactttaatgtctgtgctgctgattacgaaaatgttaaataaatgaaacagaaaataaaatttgtttcaaggtaatattttagaatgcctgacgccccttacccagccccatgagactggtcactgttgatctttgtgtccccataactggcacaaaacagagatgcattaaatgaaggaatgcattctttagagttcatgtcgaatactcattgtcatgaagaccgtcctttagtgtaactggaaacccttacccttgggaccatgtccttataggcatgtttcttcttctaaccctggtgtaaatttccaagagacccagactgtgccttatttctctttacacccagctaacccctctgaggaacattactgtatgtatacatcttgctcaaccagtgtgtttgcttacagactgacttccctaagctgtactgcagttcagagagaaactagattgaacagaaccttttagtgcattgtgttactaaaggcaggattaaggcatgtaatccgagttgtccagggaaacccatgcattcctggctgctattttaagaccctcctcctaataaactgatatccttcaggtttatttggtttaactcctgctctggcagtttggcttgtttctgtgcatcagagtcgccatgaaagctactcctccaggattacagctggacagctgcagaatcgctggcatttttctttccttaactctgtattgacagcaggtttgaatcactctgtcctgttttgtgtaatataaccaggtcagaaatcatttgaaaaataattagggtacctaatttgatctcattttcagcaaaagagatgcattgcctggtacattttgtattttttgtgtttgcagctttattaagaaaatcaaaggacctccctcttctgcccttctatttcctgctaattagcatgagagtgtgggggagcctttcccagtctgtaatatcccatcagccccacatccttgtatgttgtcttgtagaaacctgtctgctcattccttcactgttggccaccccagttggtcttatcttcctgtcagctgggtttctggctagctttcttaagctcacaccaatccctggcagagctcctcttcatacagagagaggcagaaatcctgcaaattgtaaactagcaaaatgtacaaatttagccagaactgtctatgtgtgcccctgcccggttataagccaaattcatgccgtgcctttgcctaagaggatgagacttcgaggcacagagagaaaggagggaggctgtcaaaactctggttccagatctgctactaattcagagtgaccttgagtagcaatcacgcactctgggccttagattcctccatcgcagtgcttccttttagttctatgtactttgatcaaacgatagttacctgatggatggtgactagctctacgcctttttttaaccctgtgcctaccttagtctcctatagggaccgcatagtctccaaaaactactacaactctggataaaaccttgtcttggcaaaacctaagcaaaggcttgatccgtggaaactgcctttaacctagacatcagctgtggactccccgagccagtgttattgctggagtcagctcctactagcacatcagagcgaattttttaattttcaggagttttgcaagcctgttgatgtcatgctggtagctagacatctgccatagcaggagtatctacaccacaggaattggcaaacactatgaatgagaacttttcttttttccctccagaatcaattgttagtcatttgccagccattaaatgtgaattggagaactcacatgtggaagacccagtgtcctttttaatctttttggaagtgtttccttttgcttattttgttttgttgggagaaaggtggtgtcacattactgtcggtcactatttttgcctagtctgttctgccgaaatacttgcacttacaggtcatgtatcttcattctctgtgtaatatccctctcttacccatgggaaccaccccaaatcattctcagaaaagtgatacaggctttgggcattgtggactattcctgaatgtttagggccttggaggggttatacgattgcaatacaaaccgcttaaaatttaatattgttgttcctgttctttttttttttttttgagacggagtctcgctctgtcgcccaggccggactgcggactgcagtggcgcaatctcggctcactgcaagctccgcttcccgggttcacgccattctcctgcctcagcctcccgagtagctgggactacaggcgcccgccaccgcgcccggctaattttttgtatttttagtagagacggggtttcaccttgttagccaggatggtctcgatctcctgacctcatgatccacccgcctcggcctcccaaagtgctgggattacaggcgtgagccaccgcgcccggcctgttgttcctgttcttaaaagttcttcagctcccttgccacttagaatttctccatggccaccttttgttttgttcttaatattccagccttctgctatattgttcagccatgcctcccttctcctctcctttctacttttctccccttctctcctctttttatacagagaagtttatctctgttttcttatctcctttcagaacatacccttaagagctttgtcttccacagttggagtagcctgtccaaggttagtcaaagttggtgcacagctttgctgcactaatccagtgcattcatgtggtacatatttgtggagtcctgactttttctagccactgtgctttcaaggaactcagttgatcatggagtccaccaggatctaggttttcagtggggcactggggagaaatcccctgtcagaagttatctcattttcgtaaagggaaagatgacttgtgttgagaagagggaaattgtagccaggtaaacttccttcacataaaatttggaacaccgaatcaccatttctcctctctctttaattatttgaagactcttcaccatggcctataagactccgtgagctggcctcatttttttgctgtgccctcccttctcactggaagcttctgccatatccaatagtatgtgttttcatgcaaaggccatactctcttataatcggcctctgccactgcagctctccatttgaaatgcattccactttcctcatccttcttcccaccaagtctctaactcatcttttatgttttaggttagattttgtttcctctagaaatctttccctgacctctggagattgagtttgaagccctttctctgagttctcctgcaccctattctcctctctagttgtcctccccaggttccgtggttatcttgttggtccttcatgagcaggttagctccttgaggtcagggactgagcctcattttcttctctctccattgccattacaggacttggcatacagagacgttaaagtatttgttaagtactttaatatttgttggtatagtgaataaatgagtgagctatagagtaattatttacagctcagactctggagccacacagatgtatacctgtcatctgacattggacaagctacttagtctcttcaagcctcagtttcctcatctgtaaaatgggggtatagcagtatctacttcatagggttattgtgaggagtaaattaggtgatgcaagtacaatacttagcatagtgccttttacacagtatatacttaataagttattaaactgttaatgattaaaatcatgaagagcaaatgaaaaggaaataaactaatgtttttggtatatgtaccaaaagccagtaacatccaccatttaactggaagataaattatcctattcccaaatatcttccaaggctatacctgtcattttcagtaccagatactaatgttcagcaatgcagcccaaagcatcacagggttttcagttagacccaattttactaagaaagagaaatagaataacatgcttttgaggaaaaaaaataaaatcagtatgcattaatacataaaagttgctgttgctgttaactggcttaaatagaaaatatggctaactagaacatctcttttcagtttaaaggatttccaattagtgtctttgcagtaacaactgtgttaaattgatctaatcgtgtctgtctaacccttatgcatgcattcactcactttatcaaacaacatttattctgtatcacatactggagataaagagatgaatgaaacagagccccaggctttaaggacttgatattctggagcaagggatagcagactttcttttaaatggctggacaataaatattttggacttcgagggccatggggtctctggtgcagctattcaatatgtaaatgaatgagtacggctgtgttccaatcagattttatttacaaaaataggtggggagctggatttggccttcaggcccaggcttactggccttcatcctagaggagtgagttaagtctgtagcaggctactgataagtacagagggccaaaatctgtgaaggatagagaatggggagatgagaagacaatgggttaggaaatgggttatggaactgggggtactttgagaagtaaaggagaacaactaaggccaggaggaagaaatgcatggctatcccttgatgcagaagcaggcaatgctggtgtaactaagagatcaggtgtcctggatcagccctgcccagcctagatgcttcaagaacctacctgccttctggagatctgattggacagtatggaacctgcctcaggatttctgtgagttcccatgaggtgctgcctccagcctttctgtgaaggtggtttctactccactcccacattctgaacaagaagcccacctccttgctggtttccaagagatacgcattcacagcaagcatttcatatttttagtaacttttgtgacagtatattgttgagggagggggtgtcacagggagggaaatattgcacaccccatgttccctagcaattttctgccttctgtaaggcagttgctgttctcctagggcctgagtttctgggccaggtggcttctcaaggaattattctactagagacaactctcccctgtaactgaaatgtcgttgcccctcttaccctcacagacagtggcttccaagaaatattctgctatccccctctcatctcacatctacctcatttcatagctttgttctcacaggtctgtttttgtttttgtttgagacagtctcactctgtcacccaggctggagtgcagtggcacgatctcagctcactgcaacctccgcctcctgggttcaagtgattctcctgcctcagcctcccatgtagctgggattacaggtactcgccactacccctggctaattttgtatttttagtagacacagggtttcgccatgttggccaagacaagctggtctcgaactcctgacctcaggtgatccgcctaccttggcctccaaaagtgctgggattacaagcgtgatccactgcacctggccaggtttgttacttttcacaaaggagaatgagactgaggcaacaggctatagcttccccattggacagacctggatttgaatcccacctctaccttctccagctttttgatatcaggccaatgactcaacctctctgagcctgaatttactgttgtgtaaaataggcttgataatcccctcttcagggagagaacctgggtccatcaagcccagtgcacctcagtgtggagctaatgctggttgtcttttcctgccttcatcttctcctttaagtcccaaactgagaggataacattgcattcgggtctgccattcatttacatctttagtacaaaatgtgactcttgctggagaaagtttgccatttgtctcaaactactggtatctggattgacagctgggagtggttgggtcaatagtcagtttgatattatctgaaaccatcaactttgcttctggcttgtcagccaaatttggggaaaaaatgagagttgagtctgcatgcctgtttttttccatcatggactgggaggtgacttgtaagcattcttcattgtggaaataaattcacgacgtgcaactgaatgaaaaaagtatatgcctgctgtgtgagcagagaagaacaacattctggttgagttatatgtcccatttttcattatgcttgggtggaatagatatgcccctggaattcctggttatgattagtatcatgaatgtatttggctgaccagattttgccctgatcaagtgcagaatctatatattttgttatcttgagtttgattttaatcactaggcatggaccccaggacattttatttctttttcctactttgtaaaaggtttagttctagaagtttcatgcagtcattcagtgacttgaatgaattcttgactcccacttgccctcggactgagttaggcaaccccttttgtgatccacaggtccgtaaaccaatcatcacgatagcttcttgctttgtccttccttctgctttatgctctgtttcatccccaagacctggaaccccttgaaggcatacaccatatatccattgctgtatccctaacacctgggaaagtacctgaaacagaagaaatgtcaaaagaaaaataaaagttggaaggatgggatgagatagggtgattggagaaaaaaacatgcaacgttgtggttattttaggattccgaagagaaatgtggccaaataactttgagcccagtcatatccctggttcctgtacatccagaattcattattcaagatgacaaagattctctgaaacaaaatttaataagcttgagaatgtttaagttggaattaaaacctccaagctggtctgtgagtgagcctggtttccgtgttctatctcgtagccatgcacgtgggtgagaagctccttgagtccttgttcaacaaggttcatatgaagagctctttgagccttaaggaaacagagtagatgttgccaagagtgactgagtcaccactccagacagtgagaactgtgtgtttactgggctgcttccagtcagcctggtgaagttgacggggcacacaggccaatgcctgtagggcacagggccctggctcagagtgggaatatggcagaggtcagcttgggcagggccgtgggagccacgtatgaaactatggcactggaaggacagttctccctttctccatagagttgggttagagacctggtcccatcttgcttatgaaagagaataacgccaccaaaatttggtgtagctacaccttgctttaagaaagcccaatattagtagagaagaataagaattaatctcaggattttgcagtttgcagtgtgctttcacatcattgcccttttgctgctcatgagggaggaagaaagctttagtcaccatctccatttaataaagtccattgattaagaagagcatggggccagacacggtggctcacgcctgtaatcccaggactttgggaggccaagacaggaggattactcgagcccaggggttcgagaccagcctggacaacataatgagacccccatctctacaaaaaataaaaaaattagccgggcatggtagcatgtacctgtggtcctagttacatgggaggctgaggcaagaggattgcttgagccctggaggtgaggctgtagtgagccatgtttgcaccactgcactccatcctgggcaacagagcaagaccctgtctcaaaaaataagaagagcatggactttattgttcaaattcttactctaccacttattagccatgacttgggcaagttgctaatgtctctgagctgcagtaaatccactgtataagatacttgcatgaattaatgaaataattaaataaacctgttaaattattatttatttatttgagacagagtctccctcttcacccagactggactgcagtggctcaatctcagctcactgcaacctctgcctcccaggttcaagcgattcccctgcctcagcctcccgagtagctgggattacaggcgtgtgccaccacgcccagctaattttttgtatttttagtcaggacggggtttcaccatgttagccaggatggtcttgatctcctgacctcgtgacctacccaccttggcctcccaaagggctgggattacaggcatgagtcaccgagcccggctaaatgaaattatttaaagcacttagtacagtgcctggtacagaggtggcattcaaaaagtactagttattagtattagttttatttttacttatgaataaactggagcttagctagactcaagattaccaagcctttaagttggacttgaacccattcacaaagttcgatgattgcataattctaagggtagtctgaatatcacagaacagaataagatgattatcttggcattctttccacttcattataattatctgatttttaaaggtgtcttagccttacaaaaaattgttaggattcctctaaatgggtgcttcatttgcaaaacctcaatctaccaccaacttgtcacagccagacctattacataaaataaaacagacacgtggaggaaattgtttcctgatttaggtgagtaaagctagtgagaagtcttttgaggcattttctatctcactatgtttcatcttttcagaagaattctgttttcccattaagaagacaactgtcaggtgaaaaggcccagaaatctagtagggctgtgtgtggatcagtcacatccgtgaagccctgaaattgtttgatctatctgatactaagtgtctgcattcttggcagaatcaggataaatgactccttttttttcttctgttcctgcacatttggcataatacaatcatagagagtgaataatagtccaattcagctctcagtttctgcattgattcctccagagaaatataataagctcgttctttggttggctcctgattttgattgacagaaaaaataacagcagaaagattacattttgccagcatcctaaattttgaagaacaaaaaccatatttaaatgactgctaaattgtctgacgttcctatttttaaaaagaacctcctggagggaaacattgtctttgtcttcagggaaggagttaaaggtcaacaaactttgttgtaaagtttctaaaagctgttgacagaaggcttgatgaaaatactatatcttgtacccagagaaaagcacatattttgagagtcctgtttattgtcccttctcaaggtggggtagactagaagtgcaacttacatgtgtggactttgaaataaagttgcctagctctaatctgttcgatcttgggtaacttacttaacccctatgcctcagttgtcctcactggtaaaatgggatcattattacctacctcattggatttatagcacgaataaaagaagttaaaacaataaaaatgcttagcactgtgcctggcacaaagggcatgctctgtaaatgttgaatgttatccttcttaacatgtgttgttagtaatattgctatatatgtgtgtgtgtgtgggtatataaatatattttgccatggaaaatttttgtccaataaaatcttagatgtaaagagagctgctctggtagaagtggagcagagaatatataaaaacaggctgactcaattccccttttccacaattgctgtaaatactctctgacctcaccctcttcaactgtccccaagattgctccagggaaccccagggctccccctaacacccactgctgtaatgggtcctgggtctctcactgtccagacactcttgttcagaatggtcctgagtcatggactgctctggcaggtgttgctgtaacttttttttttttctttgcctcccagtgtctttgggcagaaaaattgaagggaaaggaaagccaccttgttcagaagagttcttctaccgttgccttttccttcattgtctgttctctaaagctgagggtctctgtcattttggccactcttccttgagcatggtttagggtcatcctcgtcctttagggcaaactatagtttctcagtgtgtgttgtaagatttgaactctattaacacctgctttttgaacttcggtatctattacagtcacctggggagctagttaaaacccctgctttttgagtccctccccagagatactgtgattttgtaagtttggggtagagccagggaagctatgttacttaacaaattccagagtcccaagtttagtagcagctgtggcatttactgaatgtgagaccttggagaagtcattacctgcccacggttctgttgcccgctttgagaaaagaatgccttaaagtagctgacctccaagaagcctttccaggtccaaaattctaagatttcaccattctagctgtggtctgggctgtgtgcagcaaagcaagatcctcacccatcttgttctgaatgtcattcctgtgttaatataacccaagatcccatggattttcatggcagccacgtctctgtagtgagtcacagtgaacctaactgttgatagaaatctttttaggcatacttctgcctggtagtaacctacttcctattttcatgtagcttttgacctccatgcagagtaaataaaagaaagcaggtataccttatgggtgtttaatgctcgaatgcatgaaagaatcccacattttactagattataacatcacagggggaaataagggctcatcttcttctccctttttaattgtcctcgtaagtggccagtggacatctgtcttttctgatttagcttgtaaacccattttatgcccccttcattaggacagtgtttgtcaaaatgcatcccatgataggctttttctttaaactatcccataaaatcagttccctggcaaaaatacatttaagaatcacactatcatcccattatcctttaggatattctcagtgcaaataggcacattaaaggttctgagaagtcctgtagacaaaaaaaaaattatttgactactatttagacctccattttccaaacttacctgaccatagaatctcttctttcttttactgtctatttatattgttcagtggaagccattctggtttaacactgatttggaggctcctatttggggctgcccatccttgccccaatagaaagcagaaagattgggctgggctcctagaggaaggggcctacagaattccttaactaactctatcttagaaggatgtatttacaatagtgtacagccattgcattctgccaaaaagctgctggttgtgaacaatgacctcttgaaagaatgggatttgccccctgtaaagtgtgtataatctgtctgtgaaatttcatacactcttggaaaaagggagatggttttctacagccaattttgtactttcttatagccatatatggtacaagatagagaaattgctgaccaattaaagcaaaagttttctcctggggattttgaacaaataagttcaagagagagaaaggatgtattttgagggtgatgtggcttcaagaactgaaagataaagaataggcatgtcttatatttttaaaggtatcttccttcagacaccagcaaatgatccgtctccttacccagctgagtgggaggatttttaaaatttgtgtagaatacatttgatgtaaagggcgtgtgtgtgagagagagggagagattttaagaatttattctctttttaaggtgttatcatagggtcaaacataagcccagctgcatatgaatatttccagcaagttaacctttgtttagctttaccaattctttataacattacgtgggatttaagaacataccttgtaaaactgtttggagaaaatgtagtgaaaactactttggaaaggggtaattctttaaaaaaaaaaaaaaaacaaaaaaaaactggtttttagctaccagcagacaaatgaattacctcatcacccatggtttcacttggttttatccaaaataagccactgaagaaaaaggattaccttgtcacatattacaaagaaacacaactgtaattgctccagctgtcgagggcctcttctgcttcctctggggtgaaaaagtcactgagaaaaactgggaaatgtgtggttcatgcaggacagaggagggttctgtctgttaggataatgtgcttttacattctgcatatttatttttgatcaaactgtcacaagatactggagtattcatacatgacattttaagtgacccagtagagagcaaaatctccaccatgcatagaagaagaaaacattgaaagcatcaccaagatttctagtcattgagttcagttagttttagagagaactgacatggttagtcaagagggggacaagtcaggagcacctgattttaattttgagcgctgtggagagatctggtgtggataatagtttttgtttgtttattgatttttctaaccaccatttcaggagacctaataagacttcaggcattcttggaagtaagctaagtcaggtgcatctactaaccacaatgcaggataacaagggtcagggatgcttattttttaaatagtaggcattccaatgggcatgaaatggtatttgttgtggttttgatttgctttctctaatgattagtgatgtttaatgtctttccatatttttattggccatttgcatatcttcttttgagaatattcaagttttttgcccattttaaaatccggttgtttttgttgagttggaagagttctttatatattctggatatcggtcacttatcagatatgcgatttataaatattccatccggttctgtaggttgcctttttactctactgatagtgttctttgatgcacagaagtttttaatttccgtgaatccaactattttttctttggttccctgtgcttttggtgtcatatccaagaaattattgacaaatccaaagtcatgaggttttgccctatgttttcctttaggagttttatagttttagcttttatgtatagatcttagatccattttgagttaatctttgcatatgatataaggtaagaatccaggccgggtgtggtggcttacgcctgtaatcccagcactttgggagactgaggcgggtagatcacgaggtcaggggttcgagaccaacccggccaatgtggtgaaaccctgtctctactaaaaatacaaaaattagccgagcgtggtggtgcatgcctataatcccactattcaggaggctgaggcaagagaattgcttgaacccgggaggcggaggttgcagtgagctgacattgcgccactacactccagcctgggcaacagagtaagattctgtctcaaaaaaaaaaaaaaaaagaatccaactttagttttcttttccatgagaatatccagtttttccaccaccatttattgaaaagaccattctttcccctattgaatagttgtggaactcttaccaaaaattgtttgaccatatgtgcaaaggtttatttctgagctatctagtctagtccactggtctatatgtctgtctttatgatagtaccacacttttaaaaaattactttaactttgcagtgggttttgaaatcagaaagtgtgaggcctccaactttgttctttttcaagattgttttgatttttgggggtcccttgagattccaatgaattttaggatagatttctgtatgtctggaaaaaaaagaaagtcactggaattttgataaggattgcattaaccaaacaacttttaaaaaacatttgattataaaaaaaccattttattgtatagatcctcatccttattctagcttagactttctagaagcatatggaattatagacacaataagctccttgaagcatgtggatccaaagcccagctcgctctccctccatgccctctcactctcctgtctccattctttgtttgtcctcgtgccccgcttaccttctttacttctctctgtacctccagggatcctctccaagatggagttggagagaagactgtgtttaagctatatccttaatattagacattgacacagcagtgctgctgaggaggctcctccagccaggctccaagaaccttgcagaacctctaagtggatcgagacaggttcacctgcccttctgtggtctggtggctaccaggttgtcaagaactgaccaggatgactctgaaaacagtctctagctcatgtggctggagtcaatacacttaaagaaaaaaaaaaaaacaaaaaaaactagtttcaattatactaaccaatttgaatactcaagattgacaccttgacaaattttaggaaattgcagacattttcccacacccaattatcaggcctgttctccaaagacttgggagaggatttaggccagaaacctccccagggcagatttaaaaatcacagtagcagtgacaggagctgggatcaacaggacactctccctgagtgcctgttggcatcaggaccagaccaccaacatctccctaactgaaaagctggggacaggagagacctggggccagtgtccgccctcactgaaggagagaggaagaaatgctttatttatctgctttaaacagtattttcatttagaaagcattttggttcctgtcagggaaggttaaggctggttgccagaaaaaccaaaccaaactttttccctcccaaccggaggattaatactctctctaaactccgagaaaaaaaattccttttcttcaaagccatcctgtctgcagtgtttcaaatgaaacttttccttcttacagtggtttgtcagttggtggtgggccaaccttgtaagctggtcttttagaactgaggtgttccaactgcaaggcacagcccactagtggggcataagacctgtttaagggccaggcgtagtggctcacgcctgtaatcccagcactttgggaggccaaggtgggaagatcacctgaagtcaggagttccagaccagcctggccaacatggtgaaaccccatctctactaagaatacaaaaattagccgggcatggtggcaggaacctgtaatcccagctactcaggaggctgaggcagcagacttgcctgcatctgggaggtggaggttgcagtgagcactccagcctgggcaacaagagtgaaactctgtctcaaaataaaataataaaataaataaaatagccaggtgtggtggtatgtgcctgtggttccagcagtgagccgagattgcaccagtgcactccagcctgggcaacagagcaaaactacatcttttaaaacaaaacaaaacaaaacaaaacaaaaaaaacctgtttaagggctctgcaatcagcattttagaacagactagagtagcatatatcagagtttattatacataataagagtatatcttgatatttttcagtttaacatgtggagaagtggctgtttattggatggcaatatatcattcttactgtgtttttactatgtggtcaaaaattgtcacagctactattttaaaattacctttggctcaacaaggcctgatcatgtttccagaactggcaaaatatcacatactacacaaatatatagaaataaataaagctctaaaaactaaccatttcaggttcgttttgaacctagtccttatttgagccttctggtttgatttctatttggttgattacgtttttcaaaagaacacatttaatatgagtatatcttgatttaatgtaacagtgtttctcccacttcagtcttacataaaatttctgcgtgatttttgccaaatctgtgagccacttgtgttttttatttgtattttccttaaactagctcaaattttaaatctacatttaatatccatgaaactgttaatttatatatggctagttatcattttccaatatgtttctaatatatctaataagcaataaatatgacttttaaaatataaaaatattcatgtgccatccaacacaatctcatccacttcagtggcccacatatcatcatttgggggatacagatgttcaaaacattcttttatgcttttctttttcccccttaggttcctttgctttaacaaaggttcagatatttgaggaaaataacaagagttgttagttatcagggaaataagtgcttttcattttgaagaactcacgccacccaccttcccccaaactggttttcataggatactagcatttctgaattcacaagcagctcatctaatgttgaccataccttgacccagccggttttctccatcaagattggaaatcacccagctgcaggggtcgtctcagagacttgcccagatttgaatagaagcaaggctaaaaggacactagagaaatagctcatcctctttctaacaaatggggcaactgaagccaagagaggcaaaatggcatatctaggatcacgccatgagttggggacaaagttcaaggtccagcctacccacccacacctcccctttgtttaacttactatctgagaagcctgttgaggaaagcttcatgctaggagtcataggaccccaggattagaaatggacaaagaaggccaggcgcggtggctcacacctgtaatcccagcactttgggaggctgaagtggctggatcccttgagctcaggagtttgagaccagcttgggcaacatggcgaaactccatctctacaaaaaaacacacacacatacacaaaaattagccaggtgttggtggtactcgtctgtaaggctgaagctggagaatcacttcagcctgggaagtggaggttgcagtgagccaagatcgagccgctgcactgcagcctgggtgacagagtgagattccatctcaaaaaaagaaaaaaagaaacagacaaagggaggaacaggccccaaacagccactcagccaagctctgagatcactggtatgatatcctaggaatgatagaaatgtatcaagttactttgtacaagaccactcatgacttgacatacccttcatgtcataggggacttctggctgtgacatgagtgtagaatgttgatgacctggtcctcagatgccctagtgccccctatctagcaccactcaagactcctgctctagaaaccaaattcagaatcatacccaggtgctaccttttatagtcgtaatgagtagccttgaaatgcccccatgacttaataaccaggggagcccagactaaatactacatagaaattctgattctttgagttttaatctgaattttttcctgagtttaggcttaagagttttaataaaaccctaaagactcatcacaaatcctacatctctgttaccttaaatatgacttgcaaatgtcaaaattacccaccagcaattcataagtatctttatgctccagcaggctttagaacacaaagatgagtcagggcggggagtctctgtcctggaggaaatcccagaccaggggaataactgacctatagcagaagcaccacgtggtaacacaaggatcacttcctccaggaagttttcccaaactcttcagagggaattagtagagtctactaattctccagttctcatagcacctcatagagccctctaccactttttacactgttttcatggtttgttttgaggtccattgcaccctgagacagtgagttctagggggcgggagctttattcaactctgtgttcccagagcattgtataaagtagctgcccctccaaaatcattctatggaagaggtatggacggaatcctagtgaagcacaacagtaggggaaaatgtcatgtgatataaaccaggcctgagagtctcagatggccatttcaccaagacaagccaagtatctgttttcttctgggtcagttattagctacttagttggttaatttctagctgcgattgttagtgttaaaaaaaatagaaattatagtggagacatccatttctgagcaagcctcagagtagttccaagcggtaagatcacattgatccatgtacacgtggggactatgcctaaaacttctttaggaaagaggaacatacctttgaatgtgatcttgtagttcctataaggacagtgttgcaacctgcccctaagacccccgtccttttctttagcactattttttaacaaataatatagtttatttaattaaatttattatctgttccttcttgctaaaatgtgaactccatgaaggcagagatttctatctgttttttcatcgatggatcccaagtacctaaaacagtatctgacacatattaggagctcaaagaatgaatagatacatatgaatgaatatactgaatgaatgaatgaaaactttacatctgccccagatctaagttcaggtaaagggaaaggcagttttcctaggaggagtggtactcaggattggtgggttcactattatttcagccagagagccatcctctgtgatgtaggctgctgtatttcaaatggcagggttggtttgtactccaccatggatgtcatgaacatacataagctagtagaatgcgcagttcctaaaagtgctcttgttgtttaagtggctgtttacatgcattcttcatcgaaggaggtagctatgacaccatgtcaggagacctgagttcaaatcccagatatctgcatttctggctgtgtaatttaggattattctttagccctacctaagtctcagtttcctcactcttaaaataggggcaggaactccttttcacaatgtgctgagcactgagcctcctgacaccaagcaggccgctgatgggcagcgtcaagcctgtagcaaccctctaacaggccagcagtgtgggtgggttctcggagcctgattccaagccagtctccccaggaaaacatccaacaacaccccttgagttttgttagggaggattgtgaggcaccctccctccaaacccaaatccccagtaagtcaggaagatatatgtgttttaaaacattgggaggtctgctttggatcaccctggagctgtggcttccccgagcagctgagagtgaaaggaggcagttcctttactgtgagctctcacggcacggtgctcacgccccacacaggggctgccttcactcggcttcagcagccgttgacttttaaatcataaaaagccgctctatatacagtttactctgttgctagaaggcagtggaacataggtatttaaaaaaaaaaaaaagcagaagaagcagccgttaatcccgccaggcttctgggcactggagtagttgtggatgacaaaagttaattagaaacatgagcagtttaaccgaaaacacttgtgacaattggaagggcagcctctccggttggaggatttttcctagggaatcattgcaggagaaagtggctgctgctaggtaagtcatgtcattgtgagtttgcagatgcagaggtgctttttggggggctgaaggggtgtatcctgtctgccgtgcacactgggcatggggtgtgggtgggtgcgggcacggggcccagtggagacgtgctttgcctggcactttctctccaacagctgtccttccttgagagataggctgcatcatccggggcactgactgaagcagggtgctgcagtttccatttctgtcacattggccaccttggtgactagctgttagtttggagcctgccctcactagaacaattctggctctagtttggaagtattttgaggcttttctgagaaaagagtctggccagggaaatactcactgagcgccaaggggaagccttgactttcagataacctgtgtgttttctggcccacagtgaacccattgcatagattacactcttaagcaaaaaaaaaaaaaaaaaaaaaaaagaaagaaaaggaaaaaaaaaaagctgtttttaagtccaacctgaaccatgtttgcaacgtgttttggttttttggtttgtttggtttttttctgagacagagtctcactctttttcccaggctggagtacaatggcatgatctcagctcactgcaacctctacttctcctgcctcagcctcccaagtagctgggattacaggcatgtgccaccacacccagctaatttttgtatttttagtagagactgggtttcaccatgttggccaggctggtcttgaattcctgacctcaggtgatctgcccgcctcggcctcccaaagtactgggattacaggtgtgagccactgcacccagccatttgcaacttttaaaaagtgccagcataggaaaaacttacatgctttaataggctttaacaacttttgtgtgtaattattcttttttaaagattctacatggtttctccttcttttctatttttgtaattgttgtattttaatgtctctgatacattgtttgcttaaagttggataattcttgattctttcccataattgggaaacaggctatgggatgaataattgaaaacggtaggtatttcctactctctcctgcactggctgtattaacggtgcaggtgtctgttaagatttgttaagacctgcatgctttcacgtggcacatgccaccaaaatgtgatggggttggggggatgtgaactgtgcagtatggaaagcaggaggaagtcaagccagaaattaaaacctaaccacagataatccacaaagtgggcaatggagctatacggcatttgggttgggagtgattggttgtgtggccatggctgaccctccctggtcttcagtgcaggtcaacaagtatgattcaggcctcctctcttctgtctctgcagagcctttggcaagttcagcctcctcccaccccggaatgagtgacaatgcacctgcttccttggagagcggcagcagctccacccctactaattgcagtacctcctcggccatcccgcagcccggtgcagccaccaagccttggcgcagcaaatccctcagcgtgaagcacagtgccacggtatccatgctctcggtcaagcctcctgggcctgaggcccccaggcccacacctgaagccatgaagccggcccccaacaatcagaagtccatgctggaaaagctgaaacttttcaacagtaaagggggctcaaaggcaggtgaggggccggggtcccgggacacaagctgtgagcggctggagactctgcccagcttcgaagagagcgaggagctggaggccgccagtcgcatgctcaccaccgtgggccctgcttccagcagccccaagattgcactcaagggcattgcccagaggacttttagccgggcactgaccaacaagaagagttctctgaaaggcaatgagaaagagaaggagaaacaacagcgggagaaggataaggagaaaagcaaggaccttgccaagagagcctctgtgacggagaggctggacctcaaggaggagccaaaagaagaccccagtggagcagctgtgcccgagatgccaaaaaagtcctccaagattgccagcttcatccccaaaggggggaagctcaacagtgccaagaaggagcccatggccccttcccacagtggaataccaaaaccaggaatgaaaagcatgcccgggaaatccccaagtgccccagcgccttccaaggaaggggagcggagccggagtgggaagctgagctcaggactcccccagcagaagccccagctggacggcagacactccagttcctcttccagcctggcgtcctcagaaggaaaaggcccaggagggaccaccctgaaccacagcatcagcagccagactgtcagtgggtctgtcgggaccacccagaccacaggaagcaataccgtcagtgttcagctacctcagccccagcagcaatacaaccatcccaacactgccacggttgcacctttcctgtacaggtaggagctgccacccacctgtgctgcctgggacattgggtaaaagttcctttatagtggattccgggtctgtaagggcagaagctagactgtgctccaggaatacttaagtcagtagctaagaaaccacgtgatgaactcctaagagaagcagacacaatgtgctccagggagcagttcatacagcacaggttggggaaggaacagagaaagctgaagaagggaagtaaaatgtgagctgatcccaggatgcataggaaagtggggaccccaggccttgtagcagcagcttccctgagcagaaagcatgaaggcctaaatatgagggtgggggcggtttggtgtcacccgacagtccccagcattagtcctaacacatcccaacatacttaaaaaataaataaaataataaacacctggctcaataactaagatttcttatagcagggattgccttgaacatccagatcctcacagtccctgctgagtgctggggctttctgaagggagagggacattggggagaagagtaatggtaggggaggggctggtctagaagaacaagagctcatgttctgaggagataagcctgggtgtttgtggagatggatggatccttctgtctttatctgtcccctagcccctgtctctttgatggcacatcctcaggaccatgggagactgtgtggagccagtccacacagtggtgctgctgctctgtgtgattctggtcagcgacattgctcattgctcaggctacaccacaccccttgctgaatgaggcacatgggattcaggggccacgtcatacacatggatgagtccactccaggcagatggaagctccccaacccctgcccttaaagttcttatcattcccagagctttcactgacagtgcctgattcgatcctgtgctggagatgagcagtgcatttggccacattgcacaattggataactaatacttgtacacacaaaagaggattaatgatcaagtgtcacattctagacacgtattttacagttgtaactcaagtgcatacagatgcacagctgtacactcacactcatacagccatacatgtggacacacattaaaagtcacatataagcatggacacaagtatacattcatacataaaatgcaaaggcacatgtgcatacccgtatttacatacctgttcaggtgcataggtgcatgcccagactttcagcttgctatgtttgtatgattccccaaagaattcgatattccctctttcctcctgagctgtgttctagtggtctctgttacagttcctgccaatagctggtggagggactggcttaagtgctttcaaaggaaagccagccagcaccaggccagcaaaggaatgtcaggcattgcactccttccttttgttctgcttgcattctccttcagtgagggtcataccaatctttttaattgggagaaggtctcattttattgaatcaagtcatcagctcagctcacaatcctgagagagcaccagggcttagataatgactcagctggtctacatacacggcttttgttttgttttgtttctgttttttttttttttttttttttttgagatggagtgtcgctctatcgccatggctggagtgcagtggcaccatctcagctcactgcaacctctgcctcccaggtacaagcaattctcctgcctcagcctctcctgagcagctgggactacaggtgcatgccgccatgcctggctaattttttttttttttttaattttaatacagacaggatttcaccatgttgtccaggctggtcttgaactcctgagctcaggcagtccaccctcctcagcctcctaaagtgctaggattacaggcatgagccaccgcgcccagccatgaactgttctctgaagtgtggaggcaactaaatagctccatatgaaatttttataattccaatagcattattagtcttaaggtaatacatattcaggattcacagcttctcaatttgcattttcaaaattaaaatatgacagtctttgatcaccatcaatcccattccttctttttttgttgttcgctataatcatttgaaagattataaaagatataacctttttttatttcaagcttttctatcagaagaaaaagtcttaatgataaaaagcaaatgtctgacaaagaggaggaagaggaaaacgtctatgatgtggatctgactagccccgtttttacgttaatgcccactctgggtaactaacgtccttctgtcccctctgagttgccttcatctttagggtagtctgggaagtgacgctggaaataagagcaccaggatacgaatcaggacacctgggccctgtcctttatcagcccttggtgccctctgaggtcttcggcactggctgcaggaacaggtattgatcgagtgtgggtacagagtccgctaagggctttccacatcttagctcacttcattcttcccacacctccatgagctagcagcttagaggtaattaagcaatttgccccaagtcacagaactagactagaggggctcatgtttaaaaccaggtgtaggctgggcatggtggcttacacctgaaatcccagcactttggaaggtcaaggtgggcagatcacttgaggtcaggggttcaagaccagcctggccaacatggtgaaaccctatctctactaaaaatacaaaaattagcctggcgaggtggtgcacgcctgtagtcccaactactccggaggctgaggcatgagaatcccttgaacctgggaagcggaggttgcagtgagccatgatcacgccactgcacaccagcctgggcaacagaacgagactgtctcaaaaacaaacaaaccaaaaagccaagtctgtctaactagtgagaccaggctcttaaccaccagtcttgactctaaatcactttatctttattgtcttcatctggaaaatgagaagattggattagattagattctataaaatggtttattctccttttctgctctaaaattctctccctcaagcttatggttcactatatataacttataattgctccccccccgcccaccaaaacctctccatgttaaagttgttaccaaggagtaaagggaagatgggtcatttttttaaaaatcactcagaatgaattatatttatcaattcagaagtaacagtggattcatctatcactttatcactttatagtttactaagagttgtgtgtcacatcacctttcatttttatagaaccagaggagattgctattattatccccattgtacagatgaggatgctgagattcaaagaggtggagtgacaactcaagttttgcatggctaacaagttatagatcttagacctggagctagtcgaatatttagacttccaagtctaatgttccttctagtacctagcatcttctgagacttaaacatttcttatttatccagtcaacacacccttcttgcgttgcctgtgtagcatatgaacttgaactaacctttgcctctgaagagctctcaatctagttgaggaaagatttacattttcgccaacaggagaataaggagagtgctataggatcacattttagccaacaagagaataaggagagtgctgtaggaactcctggcaaggagtcaaggaaagctctcaggaaaagatgacatggaagctgcatcttaaagacagattagcagcgaactaaggaaggaggagaagggcctttaggcagagaggttgtagttactgcaaagataaacctgttaaagccatgtggagagaagccacatgtgggtgcagcatagtagagttgtatgtaaagagttggaaaggcaggagatggggctggaaataaaggaagaatgtggccatcatctaccacaataaggggtttagaccttattctgtgggtaatggaaaccaccgaagacagtgatgtcatcacgtcagtattacaaaagtcaatgaaagatcgtgtggggagtagaccaaacttaggaagagtgtagaatggagatcacagattcagatgcctaattggcctctaaatggtcatctagatgggtggctcagggtgagtgggcctgtggcagagggagccacgcctctttagagggtgcagccaccacttggcaccagcaggtggcgatctgcaataacaaagacagtcctttccaagctttattgtttttactggacgaaggcagaaatgcagatatttattgtgaaatatcccgatttttaaatgttgaactaattttaaaactttaaaatattatgcagaccagtaggaataagttgggctggtttccacaccgggctgccatttgtaacctctaggtgtgaggtacctgtttcaaagtactcataaggcctcagcagagatgatgagggcttggaccctggctggaggtgaaaggagcacagggagtatgaaatcctttaaaggtaaagataacagaattgagaacgatggcctcagtaggaagaacaaaggagggaagaacagttggatgacttgaggtttatcagtacatcccccgtggtccattctcattctgggcaaacgttttcttcacaggtagtgaaatcggttgaattagttcagcatgccagtgcgttaataatgttacatgcagggtcatgcatctgagtgtaattatgcatttgcatgccatgcctgaatgagcagaggtagctgtgacaagaaaacattgcatgaagctgttgcttcaatttgcttgacaaataagggcatggagagggtttggggaagtacagatttcagtcaagtgttgaaataatgatcaatgagacctttcatgtcagaagaactaagctctgaatcagagacctggagggcaaacacacctgcttggcacccacttccgactggttttatggtcacctttatagagaaaaccatgtcaggagaattttggggtgggggagctgttaatagagtcatctttatgtttgacttgttggcatggctggttacttagaagctgttctttggcataggttaaattattcaaatcaccccgtaccctccagcatgtgtctggctagacctagcatcctgacggaggttcagagaagcattccccagtgagggattgcagaccctccatctgggcaatgaaaagtttatcttttacagttcagcggctctctctgttcttaggacattgctccacatacggctaatgaattatttagcgtcagtctgctggtccactctgttctgaagcttcttgctacaggaggtgatggtgagggctgtggttagaccacagtggtccagatgtggtagttgcctctcatgacaagtgtgtctgcttcggtttgtgtgtgaaggtctcagacggacactgaagggaatgttactgccgagtcaagctcaacaggtgtgagcgtggagcccagccacttcaccaagactggacagcctgctctggaagaactcactggtgagtatggagcctcagaaatctgtgtctgttggtgatgaggccttccacgcaatacctgctggaacagcatgaacccagcttgattacgagttgcattatgtttgcattgactttgagctaaacaaactttctttctttttttttttcctattatttttcttcttgtttttcttcccttttctctccctcttacagtttcttccctcctccccagaatcgtaaacaagtctcttactggtgtgcaaatcctatttttaagatacgttcagttttattcatttaggggctctggactgcactgatacttaactttgaatcttcttgtttactcttcagataaagttgcttttcaacaagatttagaattctaaaatagtggatttcgttcctgtatggaagcactgatttaaaatatgttcttagagtcctatgtgaattgggggggaaaattgtaacatgcttctttttaccagaaacaaaaaaaaaatataaattttatttaaatgtaatgtagacaatgatgattacaggtacattatactgtatgacggcataaaatccacagtcgttgtatagttaattctgcaagcatttatttttggacactatactatcgcattcttaattaaagaagaaaagtcacaccttaattagaattcttactacggtggattccaggctgctatcttctctgtctcttttccccattccaaaactctgtgtcccaagctccagcagcttctagtcagggaaatgagtggtaagccatggatttattagtggctgtgtcattcttctcatatcttaccacttccacagtcgggttaaaaactgaatccaggcttaaaatccatttattgaactgaatatccctgactacagcattttaatagccacattacagctgtggaattggtctgcagcccagtgattgaaccttacccatctagcaattagccccagtgattaatttcagaggattctggttccactgcctgggcacggtgatggtgcagagattcttcaagccatttgtaagcagtccatcttagaatgatttgggccccacatttgggattgattttgtttccttctcttcaaggtttgtatctttctttcatatgagtacatggatagcacgggaaaaggaccagcaatgagaagggtgtggagttcagatggctgctcgagtctccatgcacattccagattgtgttctgatgtgcagacatcaaaagagcgaggccaacgcttcagatcccagcatggttcagatgtgtggcccgtggagcagtgtggattcctgtcagatgctgagtctcagcaaaatccacatttgaaaagcaaaagcaggagccggagaatattccaaatattacttagatttcagagtgacagattgcagtgtgtgatcttcccctaatttttctttttatctccatgtctcccctgtaccaggccttaagagctcagaaaccctgaaatgctgtcaatcggctgcggggaagagactgtgcagccagtagtgcttgactgtgcactctttggtgtcaaatcaaatggggttggtcgctaacaaaaattccttatcagggtgacatgtctttatattcaagcagtagaagtcacacatgtgactatgttgaatttttttttatggagacactgaataataaatagcatgaggttgaatttaacttacccacagccaatcctttgaaatgacagtgcatggtaggactatttagaaatggacatttacataactatttgatcaattgcttagttcttcctcttacttatgcaaatgggtgggttttcctatggtgtgtggtcatgtacagagccttacagttgagaaatgcatcttgcatgatagaattgaaggaaccacacacacctgcttatcatactgctcatgaattccttctatagcttactgaggactcatctttcagcctctgcttgaatatttcttggacaaaatgttgttccttcataaggcagccctttacttttttgctgttgttgacggcttcagcagttaatggagttctttattcttacatttccaatcaccggatataattcagccttctgaagccccagttttcattctttttcatgttgtaacatatcccttaaggtttctttatttccaagtaaaaatcctggattttttccatggtccttttgtaacactttgatatcctccaagctcagtcatatttggtcacaatgcgatgctctcccaatcatgactagtggcttgaggtagagccctccttggcaaggtccagatcgctacaggtagacactaaagttttaagacctctccatatctgtgagctgaaagctccctgctgtttccactggagctcgattgtgtttttattgtgttcaggctgtgagttagtgggtatatcctacattcaggtcattgtcagaggaggcataattggcagtttagaacgtgatcacctaagcatgtcaggtgggttactgttttgtgttcctacattgcccttgggatctgatgtagagccctggaggaaggcaaatatttcccagcacgacccacaagagggaaacaggacactcatatttactgagccctcattttgtgctatgtgccatatcatctgactctcaccctaacccttctagcgagaggtttttatgtccactttacaaatgagatccagagaggataagtgacttgtccagggtcaagtggctaataagcagcattgccacaatttaaatatttatctgtggataactgaagtccatgcttttcctacaaccccatactgaccaaacatgtgttgtataataaacatttcttagacctctataaattgtgtgggggttaccaaaaggaaagatgagacaccatccccaactcaaagatctttgactttctgtctgggtgcagtagctatacctgtaatcccagcactttgggaggccaaggtgagaggatcgcttgaggccaggagtttgagactagcctgggcaacacatagaagacctcatctctgcaaagaaaacaaattagccaggcatggtggtgcatctctgtagccctagctgcatgggaggctgaggtgggaggatctcctgagcccaggagtttgaggctgcattgagctgtgatcacagcactgcactccagcctgagcaacagagcaagaccctgtctctaaaaaataaaatagttgaatttctaacggagggttaagaccagcaacaatatgtcattaatagagtgatggataagtaaatatggctattatattttgtgcgtgtggttaaggtaattagttgaggtaatttgaaaacctatgcctagacttagcttcataatcaatattttctaaagggcctagagctaacctaagaatcagtatttttttaacaggcttatatacataaaatgtggccaaattggcagtaaaagatttcactgatggcccagaaggtagatgcagttacattcctccaaagtcattaggggaaggtataatagacattcatctttgctttttttaaaaaaacacatacatatatatgtattttaaagcactgggagggaaatgcaagtttgaccacttttcagataagagaaaaatgccttccaaatttctttgggttaaaaggtggaaggagaaattggaaagcacttgcattttcaagtaaatttcctccatgaaatcatgggtatatcatttactccatcccagcctccaggcaccaccatgccaagaacgacctaagaaagttgtcatctatctcagaagaaaagttaattctgttatatttcttagctgccttgtcccctgttaatggcaattgttggaagttcaacttggtgtctgatgtcaattctacttgctgctgcttgatgtctaatgtaaattctgcttgtgctatgttctagatggagatttctttgaaaatattgctcaacgcttgaaaatagtcctaggcttttaaagacccatgattgtgcttcctcagtcttctcagctctccctaaaattactctgagggagaaaatatataattctattaattattattgtagttattgcacctctcctcttccctttgtaaggctaaaagaaacggaactaggccgtgtgtggtggctcacgcctgtaatcccagcactttgggaagccgaggtgggtggatcacctgaagccaggagttcaagaccagcctggccaacatggtgaaaccctgtatctactaaaaacaaaaaaaaatttagccgggtgtggtggcgggcgcctgttatcccagctactcaggaggctgaggcagaagaatcgcttcaactgaggaggtggaggttgcagtgagctgagatcgtgccactgcactccagcctgggcgacagagcaagactctgtctcaaaaaaagaaagaaagaaagaaacagaattgccagagaaggcaaaacaagactgcactgtgtcctagcttgtgtgtggcatatttctcatggtacactagtgccagctcagctcaaatgctgctcagccaagtgtcttgtggaaagttttgcccagggaatggaatactgtggtcctgacaaagaggaacccagctgtctgttttctttccttttcttttcttctcttttcttttgctttcctttccttttcttctctttctttcttttctcttcttctcctttcccctttcccctttcctctttcccctttcccctttcctttcccttcctttccattccgttccatttcttttctttccctttccctttccatttccatttccattttcctttcctttcctttctttcttctttctttttcttttttctttccttttctcttttctttcctttccttttcttttctcttttcttctcttctcttttctttctttcttccttctttccttccttccttccttccttcctttctgtctcccctcccttccctttctttcctttccttccttcttttctttcttggctggctggctttctgtctgtcttttctttcttccttgcttgcttgctttcttgccttcttgtctttctgtcttgcttgtctttctttcctcctttccttctttcctttctttcctttcctttccttctctttctttcttttcttttcttcccctttcccctttcctctttcctttccgttccgttccttttctttccctttccctttccatttccattttcctttcctttccttttctttcttctttctttttctttttcctttccttttctctttcctttcctttccttttcttttctcttttcttctcttctcttctttctttttttctctttctttctttctttctttcttcctttctttctgtctcccttcccttcccttcccttcccttcccttcccttcccttcccttccctttctttcctttccttccttcttttctttcttggctggctggctttctgtctgtcttttctttcttgcttgctttcttgccttcttatctttctgtctttctcatctttctttcctcctttccttctttcctttctttccttccctttccttcccttcccttcctttccctgcctttctcccttcctcttttcctcccttcactctctgttacccaggctggattgcaatggcacaatctcggctgactgcaacctctaccttctaaactaaagacatcgtccaaccttagcctccagagtagctggcactacaggtgtatgccatcagccagggttttgccatgtttcccaggctggtcttgaactcctgggctcaagcgatctgcccactttggcttcctaaatgctgggattataggcgtgagccactgcacctgacccccagctgtttcttacaggctccctgctctagagcaccagctggcttgtgttgagtgcttatggtgggcactgtgctaagggatctccaggcctgatcccagtttgtctccacaaatgtcctttgaggtcagtactaccactgcgttccttttagaaaagtgaagtctgaaggatagagaggaccagcaccttccccacagtcacacagccagtaagtagaggagcttgaatttgaggtgacataatacatctaacaaggaagaaggcaacctttctctgtataaatatttgtgattaacaggtgcagatcttctagctactgcaagctatgcttgcacagtagggcctaagatagctgcatatatcaccaataggtgagaaaacaaaatgcttcactcatttttgcatgggtagaaaatgactacctggttggacctaacctgagcatgtctctgttggagacactgtggaaatgtgtttacatctcagactaggcacttggcttctcccacatgctagacttcacctatttaaggaggcacctgaaggaagaatctccctggacttcacacttcctttgggcttccattcacacttccattcaatcattcattcattgtcaaatccttattaagcacccacagcaaggcacgtgctgagcatggaatatggttatggtcatagacatggatgctgcccttatgaagctcatggttggtcagagaattaaactagtcttaaccctcatctttctaggggaagatcctgaggctcggcggctgcggacagtgaagaacatcgctgatctgcggcagaatttggaggaaaccatgtccagtttaaggggaactcaggttacacacaggtatctgcagtgtgaattactttactgaactacctggtatcctaattttctcctgtgtttgttcatagcagtagcaaagcgatttggttataatggatcatagcctcgctttccaaatgtgccggaattcacaaagaatgccatatgacatgcagaagagagttataggaaataaaaaattagtatagacagatttttcccaaaagcagaaggttgctaaatccattcaacaaaggatactgtagaccagctctatttaaatttcactttacttgcattttctataactgtctggtgctgtggaaatgagcaggtgaactatatttgacctgtgtgataaactgaatagcttgaattcctacccaatcttctgatatgcagcactctgtaatattgttagtcatgcacgtacataaaacatgtaaggaaatatttataaaaacttatgatcatgttttaactctgatttagttggatgaaatctagtattacattggaaacatcaggtgctttcattgttgaacaagaagttgaagaggatgcaaccctgggatgtcttttgtgatttgggcaggaggaggttttatagttgtagaaatcaaggaaagttcttgttgtccccactgagctcccagggagtctcctttgcttctccaatttcagtttctttgataagtggctatggcaaggaaaccacagggcttccccactgtcagcagttttggaagattggggttaaccactgtgggttccatctccaataggaccgaggcccaaaacaaggggtccaatctgagaaaaataaggccacttccaagatcagaggaaaacaaaaacagcttaagggaccaaattggctcttccagaggagagtaaactcgggggtttgggggtggtaccctcttaaacctttaggtatctgaatgaaggggagtcagatattggatcttgtgactctaccattaggtgtgaaacatccctttttccaccatcgtcactgacactgacttaatgttggcatagcagtttgacggtgggatggtaattatgacaggagggaagacttcagtggtttcttctgcagggaagaatctcattctctgctcagtgaggaaattccagttttcctgtgaaggtgcacacgatagtcttgactgggctgcaagaaactgcagcgctgtgaaaacagtggaagacagactctgccaagagattgagctcatccttgggcagattctagtccatgtaacttgattgaagagggaactcaagcccaggcatttaccaatctttccaggctttttggatgaaatatgagaaaagcaaaagtctgggggaagtgaactttagagggttagaaaattagaactgtgtccactgctcagttgggagggagctgaggatgtaaaatgtggtattaggaactcccggtgggtggagaatcccacccttaggaaaagaaggctgtgatgcaacatcctagaatgaatgggcaagcaggaaccttcatgccccatcctaatcagttcagcattttctagtattttctttcccagattggaaagaaaattcttatttttttttttgccgggggggatggagtctcactctctgtcggcaggctggagtgcagtgatgcaatctcagctcactgcaacctcagcctcctgggttcaagcgattctcctgcctcagcttcccgagtagctgggactataggcacatgccactatgcccagctaatttttgtatttttagtagagatggggtttcaccatgttggccaggatggtcttgatttcttgacttcatgatccgccctcctcagcctcccaaagtgctaggattacaggcactgcatctggcctggaaagtgagccactgcatctggcctggaaagaaaattctagtagttgaggtcatttaattaaagtaattcgtttcttgtaccatgttttagcagggaaagtctccggtaggcttttcagaatgttatgtagatgtgtagctttcctttctcattttgagcagaggaagcacatcaggtggtacatgggggctggctgttttatcctattttatatatgaggattatttcataattctaaataattaaagaacatataaactgtgaaggatactaggtacctttgagtctaatcaggttggttttgtttctagcacattggaaaccacgtttgacaccaatgtcaccacggagatgagtggccgtagcatactcagcttgacagggaggcccacacctctgtcctggagactgggccagtccagccctcggctccaagcaggagacgccccctcaatgggcaatgggtatccccctcgagccaacgccagcaggttcatcaacactgagtcaggtcgctatgtgtactccgcccctctgagaaggcagctggcctcccggggcagtagtgtctgccatgtggacgtctcagacaaggcaggagatgagatggacctggaaggcatcagcatggatgcccccggctacatgagcgacggggatgttctgagcaagaacatccggaccgatgacattacaagcgggtaagtacccggggccgccctttctcccagagagaaagagggcttggcacctggcttctcttttgtagggctctatttgattcttctggaggaggtcaaactgcccacctgagtttctgctgtccatatcaaaggctgtgtgacatggagggaaacgctgctcggctgtgagtctgaaggcctgggtagtccaggcttggccagtaaatcacaacagagtaatacctgaaaacaaaccatgtcgcatcagtcccttaaaccaaaccttgcactgaggatggactacttgcaggttagacggcctccccgggcctatgagatctggcctgtacctgcctcttagatctcatcttcctctctcctacctatttccctgctgcagctgtcccttccaatcttcaatcttgtcaagctctttccggcctcacagccttgcactctgtttctcagcctggattctgcttcccagatctttgcatggtaggtccttcttgctgctcagctgacacctccttggaggggccctccttgaccatgcaatttgaagtaggtgtgtgtcctgcctcctgccctacgcatctccaccactctgtggcaggctcctttggaagattatcactattcgaaattagcctgattatgtgtatatcctctgttgcctcccggccccctcctacttgcagcagtaagtaccataaagcaaggacttgtcttgcgcgttcactgcagaatccccagtgtgttgtgtataataggagctcataaatattgctaaatcaatgaacacgtgaatcagtgaatgaatgaacaaatccagcctccctgtttctctgtgtgctcatatatgaagtgaaggggagtgatgagatgatgtctaaggaacctttcaggtggagcctgccatgactgtatagcacgaggcctggctggtaacttgttcatgctcccctctcagatcaccctgcagacttaaggtgcagtgagttatttcacttgcctgggacttcttccttcatctgttaacatgacttgcccagaagttctccaagatcttttccaccttgaatgttctagctgttaaagttacagataagaaaaagcagaaatactaattgtgccactcatttccatgaaaataatgatcaagaacccaatgggtgagccagtatttttataatttaaataatagctaactctcctatatgccaaacacagtgctaggtgctttacttttatactctcttgttctatctccatagcaatcctttgaggtagatgatatcatagtccccattttagagatgaggaaggtgaagtccaggaaggttaaataacttgcccaagggcttgcagctattagggacagagcgtaatagtgtaccatcttgccaacgttttattgctgtattgaaatactacaactactagagtttatttcaaaatgaatttgatttttctctgttctacctctgtgactagaagtgttcttttatttcattaaaagctgaggcatagaggtgctttggttttcagcctgttacttttagaactatcttgggtagtgaaatctttgaaaacagaatccaccaaaccttttgcaggggcaaaaggaaaatttcccctttaccctctgaaggttcactggaaaatcagctcacaaaaggcagattcattggagaaaggacatacaaatttacttaatgtatatacacagaagccttcagaatgaatacccaaagatataggggagattgtccaattttatgcttaggttctacaaagtacgggcagctgtgtagaaatatgattgggcaaaaaaggtatgatctaatgctagcagatggagtggggaaaccaagcaaggttcttcttggcccttctgagaagcattcctgccttctgcgtatggggcagagccctctctgtaatggaggtttctacaatcaaacaaggtgggtcagataatttccttatgcccaggcttcacacagaaaggaagagggaaaattagaataatgtttggaggttttatgactggctttggggaaaaagggttctgatttctatggcctacctaggggcagagggattctagtttctatggctggcctcaggggaaataggattgagagaccagagggcagaaaaaggtcagagagaaactttcacttctgaggcctttattttgtagtgttttctgagctgcccaacaccttacagtacaacaaatttctgctgcctggaatggctggcgcaattaatggagtgagaaattaaatgacctggtcaacttagagcatccttttttttctagttttccataaacatgaaaaacaatagcatacacctattacaactgaatttcacataatgtaatctttgtattattgtttagaagacttttggtatctagcatggactcagatttattattatcaattcccattttcatatactaccgaacaaattgtggcttgttttgaggtttttgtatcctgtaatagttgattttattgtcgaaccagtctttcaattctaaaaagatggccagtgaattcattttgatgtagtgttgattatgtccacaaggtggagacattgaaacactctaacctgaatcttagtgatagccgactgagaaactcctggtttctttaaccatccaaaccagagcctttacctttgcttaaaagcaccgatgtttacatttcagttccagctttgccaagtttacgttttagcatgtgtgatagcacttagagcaagtgtagataaaaagttcagaaacgtaagcaaagcacccaattactgaaactggagaactttggtctggtttctcttcctgttccttttaatgtagaaatgtaccctcagcatgaggagaggtagcccagatggaacctaatgctccttctagttgtagcattctagaacacttgttaagcatgtatccactctgtggaaatgcatgtgaatttctgctttgaggccaagttaccagtttgtgtttacacgcagagttcagagcaagacacttaatgtcttttctactcatcatattcttcctataaactggcaaggttgtaaatattgaaaggctggttattctgtgcttcagaatgtgctgaataaggcattgttgaggcaattgatgtagtgaaagggaaatagactgggatatcatattgggcagaccagggcttaaaccctccccaacctcttgccagctctgtgacgttaggcatgtcatttgacttccctgagctttgaagtgctacaattaatatggtttttaaaccttcagctggatttctgtttgcagttgtatctgataaagaccaaaatcccagtcggggtctagatgccttatctccctcaaacatccaggcgcttggaaacaatgaaatgattaaagcttttgtccagatgtttatttggcttagtagaaatgtagccttgatgtatgagtaatatatcaatctgtacagaggctctttgaggaaagttcttgtaaaagtttatagtaagtttatttagaaaatctgatatggaagtaaattctggtttctaaaaacctaagacctctgtttttaaagtgatgctgtacttcggcttggcataacagctattttttgatgcctctagttcattttctgtactggtgtgtgcatgtgcacctgtgtgtatccttcaattctccctatggtagggctgaaattactttattaccatattaccatgtagtttagctaagaattaagggcaaatgcctcttacactttgtgtgtgtgtgtgttcttatattgtgcctggtatataccaggcatgtctaagtactttacaggttgttatctgatctcactcatcccttttattggattgataaattgggcattggctgtagtggggaggaaattaaaataacagatgaaatttctcttactaggttttgatctgtgaagtcaatcttctactcatattctaaaaattcaaagtgccatatggtacagaataaaattaaaggggcagactccacgtccatatgtttgaaatgattttttttttcttttcaaaggaggcactgagttgtgtaatgttccaaagtataagtagatatccctttatggacaaaaaaatgaccctttaaatataacatcagaagtttctccctctcagaacctttgatggcttcccattgcctgtgggaacagatctgaatgccttaactgactgtggaggctcttcatggcctttgcctcatctgccttcgctgacttgcccccggccacatttcccttcacacactccagacttcccactgctctaggctacctgccaccaccaaaagctggttcctgcatttgcaaagccctgcctctggttcctgcatttgcaaagccctccctcctgggacatgctgctttcttcctggaattcctttcccctcatgcccatctgactaatcctgaagaaaatgtctcccctgtgatgtcctctgggattcccccagtcacagttagctcagtctcacgtgtttctggtagtcttggttcacacctacccttatatataagcgtttcactttgcatgggaagtgtctgaaagccactggatggtactgaggaaagagtatgttcttaaaaggcagacagacttgagatttaatcctggctctgccaagtgaactggaacaagttcttaacctttgaatattagagatagagcttgaaaagaacaggcaagaatctgagatgcacaagaaatgtgcacgcgcgcgcgtgtgtgtgtgtgtgtgtgtgtgtctttctccactaaacttggagttcctagcaggcagacagcactcattatttttctaaacccagagactgggacttagcaggtatttaatattttgagaatggtctattcttgatgcctactctggcaggaccttatgcttatataactcgctaccacacgctatgaagctcaatggttctatttacagaacacttggagaaagccagcttagcctgtggtgtccatctagtggttgatagaggctgtggtctcaattccttttcactgtgagtcattgtgttggtttaaagctcctggctggtgatatttagggctaaggatgttggcttttgagaatgaggctgatcaatagcctagtgtagagagaaaacaggatgtaagcatttggtcttccacagtggctttttaggggctgctgtcttccctccttggtggcaggaattactccatcaacaaatatgggcacagatgcctgcggggagactccgttcttcagaaattgaggaactcattcatgctgaattaattaaagtcatccctcagtatccatgagggattggtttcaggacccccagaaaataccaaaatctgtggatgctcaagtttttcatgtaaaattgcatagtatttgcatataacctatgtagatcctcctatatactttaaatcatctctagattacctataatatctaatacaatgtaaatgctatatggatagttgttatactttatttttgtttgtattatttgttcataagagggtgcttcgtgctctcatgcatcatttgcatgtataataccttgtatcttttcctttattgcctgtcaggtcatctcctctctgattccatccaagcagaggtagtgacctttctgtatgcttccttgttacttgctgtatctgtattagcactggtagcactacatcagaattggtttattagtgtttgtatgtatgtatgtgagtatatgtgtgtgtgtatatgcatgtgtgtgtgtgtatgtatgtgtatatatatgtgtatatatgtgtgtgtgtgtatatacatatatatatacatatatacatatatatatacatatacacacatatatatatatatgggataggaaagacaaaacccaaacctgttgtaagttctaaaggttagggtcaaatctgtcttgaatgctcctgtatcttcattggctggcactgtgcctgcctgttgcatagtaagcagtcaataaatatttgttggctgggcatggtgactcacatctgcaatcccagcactttgggaggctgagatggggggatcatttgagcctaggagttcaagaccagcctatgcaatatagtgagacctgttgcaacaaataatttaaaagctgttcatggtggcatgttcctgtggtcccagctgaggtggaagtatcacttgagtccaggaggttgaggctgcagcgagctgtgattacaccattgcactccaacctgggtgacagagcaagaccttgtctgagaaaaaaaaaatgtcaaatgaatgctacaactaactttaaaaatggcaaggccaaccatattccgctaaatgaatttgtgcctatgattgtagcaccattgagtttgaggacgtagccacatgtctttcttcttctgggccctgtcagtttagactgcctctaaccctgtgagcttgacattgtcaatacaagaaaaagagagaactaggggcatttgccatgtggactgatggaagatagacatgcccctgttcatctcttccttctttcactgaacattatgggacaaatgtgtgaggtatttctcaccaagtcagcatagaacatagcagacagtaccctgaatcaaagggggtagattaatagcatgaaaggctctttcttatctggtgaatatgtccagaccagacctggagtgaccttgataggctgttgtttctggcagactgataggagagaaagccagagtgctccttacagcctaacgcaccctggagccaagataaatgaatttaggagaggctgtcctgaaaggcactgatttatggcaggttccagcagggtgtggcaggcatctcgagatttggaaaggatagattctcgtttctctaggccgatcccactgaaacgatcttggcttttggcgctcttggaacgcttgggaagttcaggttgccagccagccagtgggctggtctcagtgggattaggaagactgagctgtcaaggaaaggtaaagactcagctatgtggacagacccatctgtagggcttggagccaatgaatggaaagtctctcttcccaacactcagacactaaatatgtgggttgctttccccacacaaccaattctcctacaccagctgaacatcctataattcaattcaattcggacacaatctacctagagttagcctagacgccacaggttaagggctcagttccacaagattaccacacccccgacacacatacacacacacacacacacacacacacacacgctctctctctctctctctatctctccagatgccaatcacaagtcataggtcccaaggttacccacacttctgtccaacttggctgcaaatcaggagttcccatgacctcccttacattcagaaatttgctagaatggctcagagaactcaggggaacacttatttactgtggctggtgtgttataaagcatatggtaaaggatacagttgaacagccagatgaagaggtgcatagtgcacggtgtgggggcggtgcagagcttccatgccctctccatgagtgccaccatcccagcaacactgtgtgtccaccaccctggaagctctctgagtcccatagttgaatgtttttttggagactctattatgtaggcatgactagttaaatcattggccatcagcaattaagtccatctccatccccgccttactgtctccttactgtcttggaggtcagagggcaggaatgaaagttccaatgctctaatcccatggttggtttgtctcgcaaccagctcctatcctccaagagtcacctcagtagcataagcccaggtatgtttgaaaggggtttgctatgaataacaaaagatgctcctcttacccctatcaagaaattccaaagacttaggagctctgtgccaggcactgggagcagagaccaaatatgcatttctcattatgtcacagcaagtcacttgcccctaatgcactgccatcctcttaaaacagacagacttaaaagatgcaatgaggctccaagatgaaggaacaggcccagagtagcccaataggttggtgatggggctgggccagatcctgtctagggttctttttgtgcctctctgcttccctcagtgtctacttgctgacagctcttaatagtgtatgaattcacagaaatcataaatacttttccctgtctgatattttccttggtgttaaatatcccaggcaagtacaatggtctcttttcctaagcagctctctaggtagagtgagcaagcgcagagtcatgcagagggcaagattaatttccccaagtgctgcagaacaaatgacagctttccctgcatggttgtgatgttgtctgacatgggtggtttggcagatggatggctctggctactaatatcagtcatccctgatggctggggcagcataaactgaacacctcttctccctccacggtggacccacttgatgtactgagtgcaggaaacctactagcccttatcggcgtctgggtaggcagtctcatcagaggagaaagaatagctgagctgctagcccactggaggaggagaaattctccagcactcccatgcgcactctgtccactgctggtgacgacagacttagcaggctgagacctggattaaaaagagatttactgggggacagccccatggagaaatgaagtgtggtccagctttgacgtgggcagcccagactgccacagatgtctaatggcaaatgctggcttagtaatttatggggaagagagagagaaaaaaaaataaatgggtgtcttgtcttctcaggaaactagggttgggcctcgatttcttgggaatttcctaactagctttgaggcttgaatcccttcctgcctccctcccacccctgcatcctgtgggaaggaaaaagaagacgggaacaaaagtgggtgctttgggagaaggaagtctcaggcccttgttgagaggcctccaaatgggctgttccctgcctgccacccacccttacagatgtcctcctcctcccatagctttccaaagcacagggtcttctggccttggacactggaatcctttcctttggcctaccttctgggtaggctccaggcaaaaggcagtaaaatcccgtgtaaaaagtgtttattgagtttgttatatgttaaagactatgctaaaagcactgagaccaagggaaatgagtaagaccaggttgccaagatcctaacgctgtgaaggaaagatcatgcaacagggcactgtgtaggtcagcataagagtggtgagtgaaggaggccagtgaggaagtgatggcttgtgttgggacacaaacacccttaccataaggtgagggtcggtgggaaaagtgtgggctgtggagtttgacctgcagtccaggctggttccactactcttagctgtgtgtcctttagtaacctatttaatttcactgtgcccatctcataggtttgatgtgaggtttcagtgagatcatggtgtgtactctcagcccagtgcctggcatgcatgctttaagcactcagcagggttcgctaccatattgtccaccactgtcactaccagcagcagcggtggcaccttgaggacatgtgagctgggcctcacaggataaacaagggcccaggcagaccaatagcctaaggacatacaggcattgtcatgttattatgaggttggtgcttgggtgggttgcagattcaagatggaggttgggaggcagtgggctcaggttagaagctattccagagtccacgcagcagagccacagggctgggtaaggccagggccaggggaacagatgcacaatgagtttaaagacactttttacattaaactcagcctgatgtgggggccagttacacaggggacacaaaggagacagagaagataaggatggctccccagctccagcctgtgttgtaactgctgggaaatagctgatgtctgtcctcagcatcctttgtcatttcctagctttccctcttgcatgttagcacccaccctgtgctcccagattgtctcaggcctctcaggccacccccagaccaaggtgggttgaatgtttaaggagagtgtagaatatgattccaggagccttaggaaaacccagtcccacagcctgccaactcttgtccccggaggaactcagggcgcagaggggaagaacaccctgcgtgtccatagttcattgcaacccaaggcagatggtggtgaatgttaacatgaagaggcaaaatgtgggggctccaaagtggatctgaaactagagcaggtcctgtggggaccttgtaagttctcactttcacattctgggaagcccactgtgctcatctgcaaatgagaataataatgcctggagttatggtgacaattgaatgaggtgacacaggcaaagtgctagcccagttcctggggcattgcagacctcaccaaactgtcctcataatgagggtgtttcctagattcaatctgatataaccaaattcagcgcatcgtgcaggataaaagtacttaacatatttcatgctcttccccgcatgactcctccccaagccccaaagggtaagaagctagtgagccctctccttagacataagaccataactgatgttcatgtgggaagcatgaacacgataccctccagccgacagctaccgtgctgggcgagagaagcccgctgtgactaatcatgcttagcaaggtgctccttcttccccccccaccatctggactgtctgctgtcttgttggaacggacctcctgcccttccggggctcttcactggcaagcagcatcaacaaaacacagccagcatttgggtgttactgagactggcccagatgtttaagggaaattccaccttaagtccattaatcaacatgaccgagactctgcatgttagttgaatcaagttggcaagtatttagtaagttctagtcagttccaggcccctgactgtgccctggggcttgatggacaagaggaggagtcggttatttgttctcaaagctggaccgtttgatactgtactttttgtgccaacttttgatcattcaaggttcttaccaggggcccatgagctcacacttagtgaagtgtgcttacatgtacaggaaaaacatattccatcctactctggagctccgggtggcttatgggggctgatatgtgtggcatcccttctgtgtgctaggcatcttatctaactcccacactctggctttatactgtttttattaataaagaaaatgaagaccctagagggtaattgttacttaattgtcttaagcccatggaagagttgaaaaagatggcctaccattttattgtcactttccctttgtatcctgggattccagtgtgactttggtgctcttgttgctttgctatagttgatgctgtcctgcatcctttagggccacccttttttaaaattttatttatttatttatttatttatttatttatttattttttgagacagaatcttgctccgttgcccaggctggagggcagtggcacaatctcagctcactgcaacctctgcctcccgcattcaagtgattatcctgcctcagcctcccgagcagctgggattagaggcacatgccaccatgcccagttaatttttgtatccttagtagatggggtttcaccatgttggtcaggctggtctcaaactcctgacctcaagtgatgcacctgccttgggcctcccaaagtgctgggattacaggtgtgaaccactatgtccagcccagggccaccctctttgcctggagagtagtggtctgcaggcatcttctttctctactcagtgttatgcaaatggacctggaagacagagacccgagggctcacagacagtccctgagcccccctgtttttcctgctaagcctttgcatagttctcatctagaaaaccaaatccatatttcttttctttttttaatttaaaatttttttctctttttatatagtgatggggtatcactaggttgcccaggctggtcttgaactcctgggctcaagcagtcctcccaccttgacctcccaaaatgctgggattataggtgtgagtcactgcacccggcccacgtttatttttatcttaagcatgtagatcactcaagttgaaaatacccttcccagtatttttcaagggccagcagctacagagtggctcaacagatttatgatgggaaggttggagaataccaagttcgagttgaggtgaatatgaaaagaaacatttggacaaggttgggagtattttggccctgagacagtcggcccatgttgaaagactcaaaacagaaggctatgtgtgcctgtgctcagatcaagataagaagcttaagttttgttgggacctcatgaacctctcatcaagctgttctggaagaaatgtacaatggaaatggaagaaactttagagatagaggcagaagacctgacttcacatttcttgattggcagctgtgaccatagggaaatttcttcctttcctgagcctcccatgtgttaaactgtggcgcacctctcaggtgtgtgaggaggagtagaggagatggtgtttgtaaagtgtttggcacaggtagcatggtggctcctttagccctattggagttactacatctgcttgcctttttagtcttttattttatttaggacatttacgaagatgatgtcaggcacaacatcttattcttgagcacagtgaccaaatagctcctggctggatcagagttggtctgtgcattagtcaaggttctccagagaaacgaaaccaatagggtgtgtgtaggtttgtgtgggtatgggtgtatgcatgtgtagaggaattggtcatgtcattgagcaagtccaaaatcttcagatgccctcgttgcaggccaagaggggattctacctttagactgcctttagactcgagctgcaacatcaactcctccctgggtctctcagcctattggcctgcctactggctgagagatccagagtagagtcagtgtggcagctcaaatctaaaggcagtcttgaggtagaatcccctcttgctcagaggacatcagtctttcaaagccttcaactgattggatgagacccacctacattatggaggatgatctgctttactcagagtctactgatttaaccgtcagtctcatctaaaatattcctttgcaacaatatctggactctagtgtttgaccaaatatctgggtattgtggcccagccaagttgacacataaaatcagccatcccagcctgtaagcaggccttgccatatgatcagtgggagtgaatcatgtaagggaggaggcaactcacctgtggcccagggtcaacacatcagctttaataaacatctgcaagggctcaaagctaacgcaccctgcctgggatgtgaccacagatcaagactctatgcctgccttggaagaatcattgcatcccttccttcgtcccctgggtcctggtaagaaatctccctgagaaatggaggttttgacctttcctcttaatcctgaaataactgcagagtgagacagacacactggcatggacacctccagagagctgatgatttttgagacccaaaaatgaaataagattctgagcctaaggagaggccccaagtttgtctccagagccttctacctataaatcaagcccacattcacttcttgatcttgggaacagtgggagacagggtctgtggttatctccactgcatcactggagtcttgtatccctttcccagagctttgtgcttgtaatcatccagtcatctgtttcgaaattagaaagctcacatacttgagcagtgaagtttaaagggtgaagtcaactcaagttgtcagaaacatgggacgaaataaatgtggtgttggctctatagagaagggggaaggccacagaggactcaacagcgcctgctaacccatgactttctgccagtcctgctgtggtggcactgtaattcatagtcgctaactgctttggagagtttattatgtgctaggcactgtgttgagctctttacatgctttttctcacttactctttccactagttatttgcaatagagactgtttctcgtcccagttttacaatcaagggggccaaagctctgagaggtgaagttacttggccgggccacacagacagtaactggtggaagcaagcattcagccaggctgattcaaagcccgggatcccaagcaccctataggatggcagtttactatagctagtccccacactctgaatatccgaatatatggaaggcaagaccaaaaaggaagagtgtgcaccttctgaacatcggaagccctggatactcccagtgccatttgaaggagctatgaagggacctgaaagtgccatttggaagggtaaggtacagaggagtgagttatgtaggaactgaaaaaaatagctggagaatgcttgtgcaaggaccatggaggctgtggcaggggcagaggcagatacttctctttgcctcgaaagcaatattatgtgtttaatttcaattaaatgtcacaggtctttactgtagcatgagaaacacttgtgtcaacattccccagtgcttatgcagaaagtgaatgggggcaaaactggttctctgcgtgctggaaatgaaaaccgatgaggtgctcagaggcaggaaagttcagatcaagagccaattctgcacagtgatttaccgaagcgccttaccgcgatgtggcttcctgttgttaaatctcatgaaagtgggcatttcagtcacctatggtttctagacatgatacccgaatttctctgaggaaattccactccctcagcccctcacccactgcaaacccaaacaaaacccacaattacaagctcagcgccaccctgagacctcagaattgtgcacggcaagttagagctttattaatcgagtgacttttgccttactctttgggagttgttaattaaaaccactcaaccattgagttgagagagagggagagagacagagattgaggacagctaacagactggattttctccctcctttgcaagctggtgtagctattttagaagctgacacggacgttacagttgactaaaccatgcaccagatttgtatgtgaggctccttgggaacagctttcatttaatgccctgtagccaggccctcagggtacaaagaacctgcctagcctctgaccaagtatatataacggttaataataatgaccattgtaataatattaacacgactagctaccgtttattgaacacttttaaatgccaggcactgtgctttatatacattatctcttttcatcctctttttttttttttttatgagacaggagcttaggagctctgttgtgcaggctggagtgcaatagcatgatcatagctcactgaaacctcgaattcctaggctcaagcagtcctcctgcctcagcctcttgagtagctaggactataggcatgtaccaccacacccagctaatttttttaaaacattttttgtagaaatggtgtcttgctatgttgtccaggctggtctcaaactcctagcctcaagtgatcctcctgtctcagcctcccaaaacgttgggattacaggcataagccaccacagctggcctcattctactttttttttttttttttttttttttttgagatggagtttcactcttgtttcccaggctggagtgcaatggcacgatctcggctcaccacaacctctgcctcccgggttcaagcaattctcctgcctcagcctcctgagtagctgggattacaggtgcgtgccaccacgcctggctaattttgcatttttagtagagatgaggcttctccatgttggtcaggctggtctggaactcctgacctcaggtgatccaccccactcagcctcccaaagtgctgggattacaggtgtgagccactggacccagcctcctattttaatctctatgttctaggaactcctcttcccattctcctgttgaggacacagggatttgggggggcggggccactggtaacttgccttaaggttgcagaggtggtgagctagggagctgggactcaaacttggacagcctgacttcagagcctgaattcaaccactcatttcaggactttcactgaagctgtgtacacatgtctaaaatgtaatcgctcttctttcccccaaacctgtttttcttctgtgtttccaccatccatttttttttcccacacccagaacccagaatcttagactcttccattctcttgttcatggaacgccagtcactgaatttgatggattccatttcttaagtatctcttactatggtttttctctcatcttgctgctaatatttctcacccagatgatgacaattcatcctttcactaattgcctttcttctgatcccaatgcccatccaacaaatccattccacacattggtgagagagatctttctagagcacaaatctgattatattctctgcttacattcctcagtggctcttcactgcctgctgagaaaactctgtgttttagttactgtttctgtacaacaaattactccataatgtagcttcttgaaactaccatttcattatgttcatggggtctctgcaccaggaattgggacaagatatagcagagatggcatatgtctggtctgccatgtgtggagcctctgcttggaaaacagcagggctggcattgacttgatagctgaaggctagagttattccagagtttgttcactcccacgtctcactcctgggctgggatgacttgaaggttaagatggctgcagcctctccacatggcgtggcttcctggggattggcaaacttcttacatggagctcagggctcaagggcaaagggtacagtgaacaatgcagaagctgcctcaccttttatcatctagccttggaaggcagagactgtcccttctgccatactgtattggtcaaagcagtcacgagccctccagattcgagaggaaggtgcatagatcccacctctcagtgggaggatggcaaggtcaccttgcatgtgggatccagagatgttgctgtggtcatctgtggcgaatacagttcacaacaatatatccccataccacccagtgtgatatacacggccctccctccatagtctcacattggagtgtctgctccatggagacacaagccttgtctttcttgtacattatgtatccccagtgcctagcacagagcatggtgcatcatgggccctccttttgcatttgagaagctaacaaatgatcaacttgcctagcctcatttcttcatttcctgccatctccttcatcccctcactgaccacccgtcctctccccaccccagctgccatcctgttcctgccactctgaaccacagacgttttccttgatacagacaccatgctcttgtaactgagcctttgcatgagtctgctctgtccataaactcctccccatcaattaccacccacctgccacaatccttcaagagtctactgcagctaggaagcctccgctgatgcacattgatggacattgatggtctccctcctctgagtttccaaacgcctggtaacagctcccagatggcttctcttatgttctttgggctagtttgtcccccaggccagaatatccttgaacagagggattgtgtctttttactctctcacgtttccaacttcttctaccagacctgttgtgtatgcttgggtaatatgagcggaatgaaaagagagagaaagggggtgatagtaggagcagtgctgctgctgctgctgctattaataatacaggtcgtgttcattaagtacttttcatgtggcaggtgcttttcaggcattatctcattgaattctcgtagaaatcctggaaggcctataacatgtgattgtccccatcttacagatgtggaaactgaggatgacagaagtcccttgtccaaggtcatactgctactaaagggtgcggccagtttcaggaagcttgagagccaagcctattctcttggtgctgccgcctgttgcactttaggctctgtagacccaaggattttcctacctttccttagagctctacaaagcctaaccttcaactggattcatagaataagaatatgggaagcaacagagtttctgctagctagacaatatcaagctctgtcttattctcggtgctaggttttaaggggttcagaataaggcagaggtttttttttaggaacaggtaacaaggtgcaggattcaaaacccaaaacataatagaaatgtttgtagaaagtacaaatattggcttggcatggaaagtacttagaaaagcagtaggttccaggggaccaaacttgaaccataggtggaagttagacaggttttttattgcctagacaccaaggtgaccattaatcagcataaggaaaaatgtgcccaaaagtagacctgttaaaactagaggcagttttgcaaggacatgagccctgtcactccctgttcctgggaatattcactcagaatctggaaaactctgtatcccagatattacagaaggggttcctgcatgaggtgaaaaggagacaaagaggtgatctttcaaaggtctttcagttttatgattcagggtatccaggtgcccagaggaatcattacagctggattatagactgagcagactgggtattgtattctggagataaggatctccttggaaagccacgtttccacaggtcctgccagcctgggggtgatagtagaggcaccaaagacatttcttctgaaaaatgtttaacccatgactccttctaataaatacaaaaattgtgcacacctccctgctgccccaggttctgatctggaagataaggaagtggactgtggctacagtccagataagagtatgaggaccgctggaaacacagtgtctgcacaccagctgagatgttcatgaactttactacctagagttcatatgatgaaaacaaatagggtgttgttgttgatgtagttttgtttgtttgtttgtttgttttgagatagagtttcactcttgttgcccaggctggagtgcagtggcgcaatctcggctcactgcaacctccgctcctgggttcaagctcctggattctccgcttcctgattcttctgcctcagcctcccaagtagctgggattacaggcacataccaccacactcaactaattttttgtatttttttagtagagacggggtttcaccatgttggccaggctggtctcgatctcctgacctcaggtgatccacccacctcggcctcccagaatgctgggattacaggcatgagccactgtgcccagccttaataataggtctttaaagtgtaaacatgttttactgttgaatgtgctctctcagtatgcagatcctagggaattctgctttgccttcaatcccatttgaattatgattttagcttatctgtctaccttcttgtggaagtggaagcgtttgaacaagttaaagagtgaaaaaagtcagataccccattatttggtctgtgtagcagtatcagtcactatgaccagctcctggtgcactgatagaaggtaatttgagtgtcctataggcaactgaccatagcttggctcctactctggaggtcattggcctgtgtttcggcgacttctcagcctgtctttccccccagagtgctccgactgctgctagggcacccctgccacaccctgttcccaaccgccttggcttctccttgtccgcaggctggctgggttgcctgggtgcttggctgcttggcttctgagtgtctcatgcccaggttacctcaagagctccagcagctgccttcctacagggagaaacgtgctcatccacacagtttgtgccacaccctgtccctcttgtgaacacacctgtggtactgtcctgacctatacatattgaaattctaaaagagaaacacagttcttttgcttttcaaactgtgctccccactatactgctttcacttttctaagaatcaaatacaatgggaaatttggccatggagaaatgaaactcgcttcagctcaagttcaggatgccttagggtgtggcagtaacattgttcccaatacagtggactctttgctggagccatgctgtcccttaaatgagacccggaaggcccacatcttcctggaagtcctttttggaccctttctgtatcattgtctactattgatagtatttgacttatctctaaagcagatgcaaggatgcatcttatttctctttgtgttctccagatgcttaatgcataaaatatacatacactattcctcccttttccataggagatatattccaagaccctcggtggatgcctgaaactgcagactgtgcttaactctatataaactatggggtttttttcctatgcatacatacctgtgataaagtttaatttataaattagacacagtaagaaattaacaacagttggctgggcgcagtggctcacacctgtaatcccagcactttgggaggctgaggcgggcggataatgaggtcaggagatcgagaccattgtggttaacatggtgaaaccccatctctactaaaaatacaaaaacaaaattagccaggcgtggtggcaggtgcctgtagtcccagctactcaggaggctgaggcaggagaatggcgtgaacccgggaggcggagcttgcagtgagccgagatagcaccactgcactccagccttggtgacagagcaagactctgtctcaaaaaaaaaaagaaaaaaagaaaaaagaaattaacaacagtaactaacaataaaatataactattgttacaatatgctctaataaaagttatgtgaatgtggtctctctctctctcaaaatatcttattgtaccatactcacccaatgtgagaccacagttgactgtggatgactaaaaccatggaaggtgaaaccacagacaagggaggactacagtgaaagcagttttttgtttttattgagacagagtcttgctctgttgcccagggtggagtgcagtggcatgatctcagctcactgcaacctccacctcctgggttcaagtggttctcctgtctcacgctcccaaatagctgggattacaggcatgcgccaccatgcctggctaatttttgtatttgtagtagatatggggtttcaccatgttggccaggctggtcttgaactcctggcctcaagggatccatttgcctcagcctcccaaagtgctgagattacaggcactgcacccagtccaacaatttaattgttgattgttatttattctttcttcagtataccaagaaacacttggtaggtacctatctcgagagttgaaggcacagttatagggactggggattttgaagcaaaagtattggttctgaaataataataacagagctacctttattgaacttgttgggtgaaggctggagcacaagaagaaagacaagccaacagttataataaatgtgaaataagggagccaggcttcaattttatcataaaagacagaaaaaggatttattgaacacacaaatacatttaaatgaaaaaaaccttagtgactactttctacttgtattttcttggacaaatcactccaattctctgagtcttcattttgcatctgaaaaatcattaaaccaagtaatctttgaaatccccccagatctaatgttctgtagttccatgaaactgcctatcatgaatgtttttctcaatgctctgttgcacttaaaatgaggttttagagttcacaccttctcagtgtggtgtcctcaagtgggaggtgggggagatgatctaaaagacatcctgtatttcgacattaatatgctagatgaggcagaccatcatggtgtgggaacactgcatgcccaggtgaagataagcacaagtgttttagtcattgagagcacatcatctggttttggggagtttgtgtcatgtctggccccacaggcacgtttttgagtaggacacacttttgccaaccttagtagaaaagggcatttttccattgctcactatgcgagggacgggggttatgtggtatgtgccaagctgaagaggttagagtgattgttcttttcttgtggcctgtggtttgcatagggtgccttttcactgtgggattttatcttaagactttctaccatggcctgttttctttttagggggcaaggggatggagagatgggtttgggacctattttgcagggtataaaaaagcctttttacaccccaaagagagagctgtgagatttccctttcctggctcagggcatgggtgggccccccggtaacaccccagccacacagccttgtttccccccatgtgaatgtatcatatgcaacttttgtggatgtacaacacacttttggatagttcctgttaatatggaaatctggtaccttaattagttcaaaatctgaactctccaggaagacaatgactgatttccatcctcacatattttaactcaatgtttttcaaacttttttctgttttgagacagtcttgctctgtcacccaggctggagtgcagtggcacgatcttggctcatgcaacctccgtctactgggttcaagcaattctcctgcctcagcttcccaagtagctgggattacaggcacgtgccactatgtccagctaatttttgtatttttagtagagacggggtttcaccatgttggctaggctggttttgaactcctgacctcaggtgatccacccacgttggcctcccaaagtgctgggattacaggcataagccactgtgcctggcccaaacttttttctttttagatgtcatgccccatcctgaaagatctcacaccctgacttgggggtgaggaggtgcagagctggagggtaaaattagatgtggcttttcagaatcactgtatctttaatagctccacaacaactcaaattttgtcaaactttagctacagaatgcattatcaaaaacattgggccttgaacatacttttcaaattcctgctccctccctggagataggatcattcctacagacaaccagtgttctcagctgcctgtgtacagtttctgaaggtgacatctggacgagtgaccagggccagcatttcatgttgtcagctgtcatgtctgctgttcttgtggattcaatggctgctaatttgagcatccgatagtcacctagttttgcttaatcctctacccttgaaggccaaaggtctatatatctgtttccttggtattggtggtttattttttgaatcccatttagaataagtgcccagaataatcactgtcttgatgaaaatatcacctggtagaaacttagcatagaaaaccatacaccgagttcactttacatgttgggtcctttgtgtttgtacatgcgtgtctgtgtgaactacctgatctccctcccccaagccaatattgcctggcagacaccttcaagatgctatgggaggctttctttctctaaggagccttttctggcctctctgtgctttggcctttactgaaccccatgcaaatatttacacatctgcttgccccaagctgacactaagcccctcaagctcaaggactgagtctgatttttatgtccccaacacccaggctagtgcctgcctctcagtaggtactacataaatgtttgttgcacaaatgccaccaccttaaacataggcctcctctgggcaaagtcctacatgtgactctatgtgagcccttcctgcagcctccctacagtgcttccagaaatctagttgttcgctgaggttgaatgatgttcccaaggtctgctttttgcctttgtctacagcagggattgtctcacaattacaaattagtcgccttctcattctgtctattctcagtacaccgtggcattctttcagctgcagtctagaaaagacaaggtgaaacttgcatgaacctaagccaaagtgccagctgatttctccccagtttggtaaagacttttgttgttacctgggggggtctacatgaacccagaagggaaacagacactagatgtcagattcccacccctacaggctctagtcatcttccaaagggaacatacaatcctcaaagccaacaaaaattctgctgacttaatgtgaaaagtgagcctgtgtctcagagcactctgaggcttggggagccgtagcagaaatcgcaggaatgataagacttaccagcccacagatgatgattggcaggtgtgtttcagtgcatcagaagtgttcgggagaatgcattttccaaaagacgcatgaagcttggtagtatgttttaccaccacacagaaattctctacttgatcaatctctctgctaggagattggtgaaagccaagacccaagcagtggtgagattaagcgtgtgtgctaaaattcagggtaacatgtgaattgtagcattgccatgagccactgcggaattggtttatagcaaacagacaagtcttgcaatgtagaaaccattgcagaatacgttgaaggatctactcagccaggatccacttctgtcatattctgttgacaacgtagaaggcttttccagaggaagagcatctgattatgatgccacactgagctacctgtgtgttgtccataatgctttgaattcagcatgcctaatactgctccctcttgccacttgccagccatctgagtttccaacagtcggactgtcctgaggccggtaggcatttaactatgagaccatgagtcacttgatattttagaagaaacttaaagtagtaacaacttttatcaagccttgatttgagatggaggaaacattggggatcagcttcaacctaggttaatgtggatattgtcccctaacacagagggggccaagagtagttactaagaggatctgaagtttaaattactgttacagtgtagccacattatagtcaactaattcttagggaaactgaatccaatctagcacacagttcttccgcccaggtctcatgatttaaggcaacatttctcacagttttggcctgactacctgcaagagaattacttgcatgtctgttaaaaatgcagacttgggggaaaggatgaataggtggagcatggggcatttttaaggtggtggaattatattctgtgatactgtaatggtgggtaggtgacattctgtatcaaaatcagtagagctgtaagacacagagtgaaccctaatgtgactttagttaataataatgtattaatattggttcatcagttgcaacaatgaaccacactaatacaaaatattaataatagcccaggagcagtggctcacgcctgtaatcccaacactttggaggctgatgtgggaagatggcttgagcctagttcaagactatcctgagcaatgtggcaagactccatctctacaaaaaatttaaaaattagggcatggtggcatgcgcctgtagtcccagctgctcaggaggctgagacgggaggatcccttgagcccaggagtttaggacagcagtgtacagtctaccttgggtgacaaagcaagaccctgtttctaagaaaaaagtgtacataataatagagcaaagtgttggggggaagaggggatataaaggaactctgtaatttctgtacagtgttagagaaataatctcttaaaaagtaaagtctgttttttaaaaatatgcaagatttgggcctcactaaatacatcttgcgtgtatgaagctgaggccttggaataagcattttggtcaggctctccagaggatctgcctgtattctgaggtttgagaattcctggatatcagtccatctcctttcaccatctgtttcattctaagaaagagcttaaaggggctttgtctagagaactgtctcttgtgtgttaggatgtgtttcatctttcagaaggtggacaaaaagcttcctgctaatgctagaaatatttgctgcaattccacactgacagttgaaccacagtaaagacaattcaggcaagaccagtttcagacacaggaactgtcaattttcgaacgtgtgcagcctttcttcagaagtgtgccctgcctgcgtccatttcaaacaagcgtagccatggattataattaaaattttacatatctctattggtttaagggtgataagtacactattgttataatccttggctctttgtgcatcggagtatgtattttattagggctattataggcctttcaaattaaaatgctcctggactttatatacgtatagatctttttcaaccaaaatgctctggaaattagtattagatggaattttattaaacttgtggaaagtcacattgcattttgcaaaagacacacaaaccttggtagcctgtttcaccaccacacagaaattctccacgtgatcaatctctctgctaggagtttggtgaaagcaagacccaagcagtggtgagattgagcctgtgtgctaaaactcagggtaacgtgaattgtagcaatgccatgagccactgcggaattggtttatagcaaacagacaagtcttgcaatgtagaaatcattgtagagtgtgttgaagcatctgctcagccaggatctacttctgccctgttttagcaaagtcactgctaaggtggggcctcgaggtctgtgagccaactcatgctggatgtgaattttgcacatatgtgagatgaggtccctagctttcactcgtttctccaaagaggttaataagaaagtttaggaatttctgatttcgataatggtctgtaaactggatttggttgtagttgtttttaaaatatatatgtgccatgctattgaaatattgcatatactctatagcgtgcaaaaacataggaatcagaaagatcttgatgagaaataaatatacgtagaagcacttgcgttttcactcctggatcatctgtgctcccctctacagagaccactgcccgggtccagtgcttctttttctttagtgtgcacacaaatcacctggggggtttatggaaatgttgagtctgatttagaaggtctcggatattgctttttaagacagcttccaggtgatgttgaaactactgctccatggcccgtatttcaagcagcaggtagatggagaggcgtgtgttgagttgagctgcagacagcgactcccacgctatctcttctgtctctctctctttcaagcagtcctcagcactggctttaggaagtagaaatggcaaaagtctgtgacaccagttttccctggcgaggctggcagggggcccctgggaccttttgactcctctttaactcaggcccaccttttcctgctgctgcctctgtccccatggcctgctagatctgagcccttgtttgattagcttagcaacatctttgcagtactccccagtgaggtgtgctctgttgactgggactagccagagtcagctccagaactcctgagtgagttcacttctgcagcagccttgacttcctgctgtaccttgaccagaggatttatctgggttttcctggttatctggctcactttgcagcagagaagcaggggctggtgccccttcaactgtgtgttctcctgggggatggctcgtggccattgaagaaactttgcagcagtgcagtctatatgccatggtcacgtcatcctatgctctgaaccaaggtggtgtgtgttgtggccacaggagactgttccaggcttgagtgacataagggaagattttactcacgatgtacattgaactcccaaatcctcctaaaaagaacaagtcgctatcaacttggtgacatcctgaagagctgacagtcctggaggacagtaggaaatcgcataaagggtgccccaattttgcatcaagcagaaaggtaggaaactggttggattctctaagtcacatttcccactggcctctgtcagcggttgttggaagcattcccccaaaggcatgaaggccaaagatgtgtgggtctgtccgaagaattgcccactaagtcataaaaatgaaagattacatttcttacccctcttccacctcacatcctcttgtttcttaactgtgtggattgtgcagtctgtcttatttatggttaaagtcctgttaccacagggaaccccaactgagaaaggcattgtcaccttgggctttctctccaaaggttgttgttggttttgtttcatcttgtgtcagtttggggtgacccataatcaggaagaggcaatactgtgttcttcgcttgaatttcacctttatttgattctaaaatatgtaagaatatgctgtgagtaggatattagagtcactgcaacatgtctctgaacttgtcgtgggggacaaaggttttgataaatatgccacgtttgcctgaacatttatgcctaaaaactcattgaggacaaagtggtttccatgtgtttccttagcaaaattttaagtattcactaaattttagtgctgcagttttataattcgcactgagaaattaagccctttttttttccagtcatatttttgcatttcagagcattctcttcttccttgagccaatgtggccactgcttttcttttcagagaggtcaacttttttctttttttttttttttttttttttgagacagggtttcactccggttgcccaggctggagtgcaatggcacagtctcggctcactgcaacctctgcctcccgggttcaagcaattctcctgcttcagtctcccgagtagctgggattacaggcgcctgccaccacgcccagctcattttgtttttttttgttttttttggttttttttagtagaaacggggtttcactatgttagccaggcaggtctcaagctcctgacctctggtgatccacccacctcagcctcccaaagtgctgggactacaggcgtgagccaccacacccagcaaggtcagtttttttttcaaaaggatgcaggcagctttgttagactcgctggccggtgcatcctcctacgacccggagtgaagttgattcatctgtcttctcagaggccctaaactaaagggattcttttccaggtctgtccagaaactcgatttgcatcctaataaactcagagaatgaatgtcacactgtattataactgagtagaggggcctgtgaaagcatatgatgtttggggatctggatgttgatgacattgctcaacaacaagggcttttcgtcagcccccattagttttttcaatctaatgcaacaaagtatgtgttgatatatacgtccagatatttatattgttattggcaaggaatattacacacacatttgtaattattccatgtttctgtgtccacgtttcaaccaaaagtgtgtccaaaaaatagagacaggctgacgtgtcttcgaagaaaagtaattatgtaggattgatttgttttctgtttgttctttcatttcttgcatctgagaggttttttttttttttttttttttatgtcatgctctattagaaatgcactcgactagagcaagtcggtacgtatttctttccttctctgtcccctctctcctcacacagttcttgacagaggtgatttctggtgagattagtggcagtcagtttgtattacttatgcaggccatgttgaactgtgaactttggaaatgagaagccacctttcgccgcttctgaaggtgactcacaaagccagtttcacttggttccacattgttgcatcattacatttaaagaaagggaagaaatctgtttactaaatgttagacttgaagtctggagtatttgttctagcaggtcctgttagattccacagctttttcatagctagtgtcagttaccaacctattctgtagagaaagttccttttgtaaaaggcatgttgccttcacaggtctgtcttgactggagggatggtgaggactacccttcaagtctggccagctcccagaggtctgggatgactcagacaggactaggaaatggtgtgttctgaaaaatctgtagaagaaagtactgatgagaaaatgcccaccaaaaattgaatacagaatgttggaagaatcgaaaagtcgacgttctctttgaaacagaagccagagcctgttactcattagtaccttcatgtatcccccatcttacaggcagaggcctggcatccaagatgttcaaaaccatcccccaggtcccatgcagcccagttcctagctgtgatcccagtgttctaacaatagtgaactacttacccttctctgaacataccttcccctctgccatttctctctgcttttgcataggttatccatgtgtctagatggatcctcttttggctggcaaactcctccgcaccctttagggccaacttaaacagcactcctctgcgacgctttctcccgtgtgttctcaaagccagtcatgcattcatctgttataccacttttatgtagcagtagagctatttgcatgtcttagtccctagtaggttttgagcttcaccagagcaggaactaggtcttgccactcctgtaagcagctaatgattaggaagtgctccctatatgccaggcactgggctttctaaacatatgcactgtctcatttaacctgccacaatcctatgagggaacttaaactagaagaaattgcgctgaaatgcgacagttgggatttgaactcacctgcctgcgctgggatcttaaccacagctctgttttcctcatctgaacaatagagatgacaataacacttgataagattattttgaaggttgaatgccatgatttatgtgaagcacttaacacagtacccagtgagcatttagtaccattagtgcttactaacaatgatgtatactaggtccttcagccagcaaggggcagagaaggcatttgaacaacttgggtctaacaacagtcatgttccttaaccctgatgctcatgggccaccccagggaagcaagaaaaacaccccacagacaccttgtccctttagcagaggctctgactctttccatccaggggtctctggggaagcttaagaaggtggatgcggagagccgcctccacccacctatcatggcagaactcgggagggtaatggggagatggttcagtagcttagcaactgaggcaagagtccactcagaagacattaggatgttaccagcacctcattaggctccagcactaattatttatctctccaaggagaaggaaagtgtggcatgggtgttctgagattgagttcttggatcagctggttcctttgcttgtgacctcagacaagtcatttcttcttcacccagtgtgagcctcttataaaagctcctcaagtggaggatgaggccatcagtcctctggctccctgaaccttcagaaacacaagcttttttaacacttctgggcaaaagccagtgtttcagataaacacacccgtggctgcttcatctgtaaattatgctttcttaaggccttcactttgttaaggcagtctatattgatgtatacaatagccaattcctatacaaattttggtccagcaaacccaaatttgtatatttttcattgactgtataatacaggagttatttaaaaatatatacagagctgtttgtaaatcattgtaattggtggataataatttagaaacattttaaattaatttcttgagtgtgaggctggctctaaccacagctctgtctctggtgctgtgccgtctcccaaggagagacatacaacagaatttatttcaaagaatattgttgtttaaaaaacagttgaacatgtgtttacatatctctaaaagaagaggtaagttccccattttccttatcactctgcctgccctccctctacatgcgcacgataagtgaaatagacttgcagtcttgaaactagatcattgtcagactagttgcattcacctccctgactttcatttcttcctacagtttgagaaggcagaagatcctgatttagctttgcctttcccctcccctctgccaaaacaaagtcagaattcccaacagcaagcccagctcacatgttcagttccatttcagtcccatttctcagaggctttcccgcttttctggggttgtcgttttctgatacatccacgttgcacccgggtgtagctgggctggggctgcaacgtttctcagcattctgtgtctggaatgctcaccaggccccacagtctggccttagcaggaagccagggttctgtacatgtgggccttgtctacatgcctgtgtgtgtgtaattacccaaccgtgtgtgttgtttcaccagcaataaaaatccagcagggaaatgaatgctaaaattagtttgtttgtcctttgacaagatctccccagttgaaagaattttgtttatctaactggctgggcagacttggctaagatcaaaattaactgccttgcttaatggtgtaatagatggtattttgaagagcttccactgagttctccttgaaaggacgtggggtctagaaagtccagcctctggcaaagttatggcattttggtgtaggtgttttttcctccttgtgctacctgtaggatggatgcccataacccattactctaccctgagtcactctatctgttggagggtggctggatggatggatgatgggtagattggcagatcgacagtttaatttgcttgtcatatgtcttaaatgtaagtttgttaaagcttaagaggaaagaaaacctgtaatcagtgttcttgcaaaaaaaatttgcacagccctatggctgtgtctttgggcttcattcattcatgtgttcattcattcaacaaaaacagcatttaataagcacctagtatgtactaagctcatgggatatagatttgaacaaaataagaatctctgcctgcaaagagcttactatttagtgtgagagacatgcattgaagggcaattaaacaaataattatttaactatagctgtaatcattttttatatttttattgagatttaattcatatatcatgaaattcaccattttatttatttatttttggggttttcttttttgttttgtttttgtttttgttttgttttgttttgttttttgagacggaatctcactctgtcgcccaggctggagagcagtggcacgatctcggctcactgcaacctccacctcccgggttcaagtgattctcctgcctcagcctcccaagtagctgggactacaacaggtgcatgccacgtgcccggctaaaaattcaccattttaaagcatacaatttgatggtttttaatgtattcacagagtggtttttaaaatgataaagttgagtgaaaacttcagtctcttctgttgcattttcagcacaagcacaaacacttagtctgatttactccaacagatttctcattatgttgatattgtgaccttggggatcattaatgtcataaagggaggagcagggaacattggaggtgttgaatttagccacagtagcttagaagcttcctgggttcctcttacccattctggaaggtgcttttcacatgagataactccagtgagaattttcttctctgccccttacttgaacttcctggtctgggcagcctcgtctgcatctcataattctgttcttgaaaaatatatcctaaaaaggtccccagctacaggtagaagaaattcaaggattgggaaccctcagggtcgactccatatatgcaaaagttaaaatggcaagtgcaattaagctttccatgacgtagctcagctgaccctgtttcagaaaaataatgactcattggtcctcttactacatattacttgatttgaaatgtaaaatgcttgcattttcagataccttgcagggtgatctgatggggcccataagggattgaagggatccaagtttggtttctggctctgcccaagttttgctttgccttcctgttctcctctgaagatgagggaaatgacaaaaccagtctcctttatgggggctgtgaggaagccaaggtagatatgaggtacagctgccttggactgagctacctcctactagtggctaagctttcaggaacttgtctggttggtagacaatcagccatctgtacagaaagttccagacatcctccctctcaagaacagcactgatttcatcagaagacagctttgtagtattaccaaaaaaagaataaactagcattagtgttgttcagagttttgtggcaaccccctgaaaacatcagtatcaagggtgaaattcacctcatgatcgtgacaaccgtaatgtcttccacttatatagccttacacaaatttcagtgcactttcatattccttatctcactaattctcatgcccatgttgtgatattcccacatgtcacaggccgtgatagtcctatagcctgggtgaaaaactcaccatccagggaagggactcgcctgtgatggcaaaggccactcatctatcctctctcctttctttccccctctctcaaaagcctgcctgctttttccactcactgttctgtaatattattgcctatgatttgctaatgatttgtcagttccatttccgttactcaggtaaaacacctgcttgtataatcgctgacattgaaaagaatgtcatgaatccatgtgacagttaattttattccctagttcccgtctgcgtcgtaggtacctgtgagtttgggttaattaagctgagttcgctctcttttttcacctttttgttagcgagctggggatcctctaggttggatcagcagctgagttatccttgggctgtgatcagtgccagagcctcagggaatcctccgtttcttcccccttagagcacttggcggctgtacaggcttctggatatgaatgcaagcctggaagccacttgctttggacattcatgtgcatcatcttcttctccttttaaagatacatgactgatggtggacttggcctctatacccgtcgcctgaaccggctccctgatgggatggctgtggtacgggagaccctgcaacgaaatacctccctgggcctcggagacgctgacaggtaagcttgctgcacttggggctggtcagatgcagaggtgatcccaggggggccctgagaaatgagggttatgatattgggagagtgaatggagacttgaacccacagagagggaggggaggcctggaatctgtacctggggttaggagcaggtacagtaggtaggaaagggctgccgagggttcttgagtcctgcttctgtgtagggtggtgcttctgacagcagtaacacagggagttcaggcttgggtggttttggttattgttttgcttgttgctactgtgtctttgtcagttcagcaggccctagggatgtgctttacttcctctctcattagccagctttctaggtattgcaccttgtggcacagaaggtctgtgtgcagaagggatctctcctagccttggctgagcagccttcaccaaaaagcctcctgttgcatggtaataggaggcaatgcttaaggacatgggtttagacaccacatgctaagtagttgacatcatagaggttgatcaggcgtcactgccactgctgtcagggaagaaaagaggttcagaaaatactgtggtaataaaagaggactatttggcctccaggttctagttcttactctgacaaactgattctatgaccctgagcaaccgatgaagtgaggagtttggactatatgatttctatgatcccttccagttctaatgttctataattctggatttcagtgcagatttcaaatacccttaatgatctggctgtttaaggatttgctggaacacttgacttctttccacatctgggttgatgagatgtaacatggaatttagatgcaagtggtttaaaatgaccatagactttttgggtactaaaccttttatgtcagaaagccaaatagtagcacaacaacagcttcctgctgttcccagggcatgctttttacaaagagctaagtgacttctgtaattgtgtggctttagagaaataggacagcacaccaaagagacagatactgaaatcacacccagagatggaatttgctgaagaagaatcttcatgttctctcagggaaggctgggaaacactgaatgagttgttaggaacttgggatctggcccagtctctaccactaacttgaatgtgtcctccttagagtccccccagtgcccaggcttgtgatttatatcagggatgttaaaaggccttccactagggttctagctcaagtcagattttttcctgtaattaacaaagaaaggaatgggtttgaaaagtccatagaaacatgaaccatttgagaaaaaaaagttttttttgtttttttgttgttgtttgtttgtttgtttgtttttgagacagagtctcactctgtcacccaggctggagtgcagtggcatgatcctggcttactgcaacctccatctcccgggttcaagcaattctcctgcctcagcctcccaagtaggtgagattataggcgtgtaccagcatgcccagctaattttgaatttttagtagagacggggtttcaccatgttggccaggctggtctcgaactctcgaattcaggtgatccacctgcctcggcctcccaaagtgctgggattacaggcgtgagccactgcgcccgggctgagaactgctcttactaaggagaaactaaactctctgtaactaaaatctttatagtaaataataacagtaaaaaaaaatcagttgctacaacacccccactggagatttgacaatttgccaaattattttgcttatttgtattcttctatccgttgtttagtaaatctatccacataaaatacagtccttacaagatacagttttccttgtagcagaagaatctatgctaggcagtttaatttaatgcttcattgtaagattaatgggattactatagatcacagttgagcttgtttcctgcttctggagatggaggatgagggtggggttgaaaagataggtagcacttgttaggttgttttagttcagcctgtatggttaaaccaaatggacaacaatgtcctttggttctctccagactggaatgctccgatatgatcatttatttaaaactgaatgagtccgggcatggtggctcacgcctgtaatctcagcactttgggaggccaaggcgggcagatcacctgaggtcaggagtttgagaccagcctggcaaacatgatgaaaccctgtctctactaagaatgcaaaaattagccgtttgtggtgatgcacaactgtaatcccagctactcgggagagggaggcatgagaattgcttgaacccgggaggcagaggttgcaatgagccgagattgtgccattgcagccattgcattccagcctgggcaacagagtgagactcagtctcaaaacaaaaaacaaactgagtggataactgacaaagttttaaagaaagaactcagatggctttttaaagacataggatttgcaaaagactacaaatttacccttgttttacataagttctggcctataggcaaggagatattttccattattctagaatatgctaaatttttataacttccaaagttattatgagctgaccatagtaatacttcatctttggctaagttgaaatagtacatttgtttctgtaaaattctttatgtaaatcgcaaatttagtctcatgtagttacaaaatctatattctaaatgagtgtttcccaaagtgggaggctatcatggtggtataggagatagttttagatggcagataggaaaatactcctttttaataattacattttaattttaatatttttttaaaaacttacaactagcacatcaaacctgtgattttacaaatgctgcttaaggtaaggatagtgtagacttgagacaatttaatgtgaaatatcaaggaagaatatcacaggtggtatgtagttatatcagaaaacaaaggtagtatgcaagtggctgcaatttcgataatactgttcttgtccctgtaattggaaatatgttctttaaacaacttagataattgacccgaattctttcctttaaacctgaaaatcgaaggtcccagagctaaggtttttccaggaagttctgtataaaaagatagcctggtcctttttccattcacacataagcaatagaccacatgagttctacaaaggaaagaggaaaagtactgagtgattagacctgattagacctcagcaaacgaaagaaaggcagatcactgtgtgaataagaaaattaataaccacagccaagcagctggggagaacagctcttccaggaaaagaccttaagggacgctggcctaccaggcagaacttgcctgtttgcagcagaatgtggctggggtatcttcagggttattaaaagtaactgataagaatggatgccttcagagcctgggagatagagactgtgtcagttggtgagtctggtatgttaccagccagcttctaagaaataataaatgaagatagtaaagtgtgcccttgatctcttgtcactctttagggttgccactcctgggctccaggtttttcctgatagtgatcagtgtctacttccagcagactagagccaggtgtctgagaagagaggatcaaaagggacaaatggagtggcttattacacatcataggctccagataacagacagataaaaggagctttggcatggaggtctccaaactggcagactgggaagaagaagaaatatggcaaggagggccaagactaggctaacagacagtcaaatggctcattgaactcctgccagttcctacatgcactgctgtcctctcagaacccatcaaaagttcccgaactccagcaagttgagagctttgatagtgtaaagatcagctctgggaaagttctaaatctctttcttggtgactgcaaagccacaccatcctcctcatccttttctttaccaacctgtgttttagcacacaacgggctgagccagttagatgctcctctcgaatgtcatcccaagatcacataaacgccattgagagcacaacgaggacagaaatcaggcttggtgtgacattagatcaggaggaggactttggaactacttggtaactttcttctaagccgttagaatacttactgaacttcagtgctttttattaatttaggcgataaggccatattacttcaaaccttctaaagacaaaaaaaacaaatgctgtgtggtaaagagtcagcctgaaacttgaacaaaatgaaaatcgccctccacctttgagccaggaaaccaagcagaaaggagagatttttcttttcttcttgttataagtttttcattacccttcaaattctgaatgttttaagtactgagattgctgtttcagtgaaggattcagagtcactgtacagactttccaggctgcatccagggccttggcactcagaggcgtcccagtttcagcttgaattgggaggcctctctcaaggagagtctcatggtgtgagaatgtaactatgcaacctggtatttgagcagcctgccaagctgagccctccttccttgctgggagtgtcataagaactccaagagcccaggacactgcttggctttgtgattcatatggaacaaagcaggcctcctggcaccaagcagtgcattcatggattcaggtctgatctggaggaaagagtttaatccaggccagaggtccccagcctgcagatgcaattggcgcccttaccaggtggtaggtccccaacaagccagttatttctgaagcatagtccctactgagagccacataagagaagcagcaaaaacgggaagagactgctcccctcacgcttcattctaagcctgtggtaggtgtaataatcatccccaaagatggccacattctaatctccagaacctgtggatatgttaagtttcatggcgaggggaattaaggttgccagtcagctgacagggagattactctggcttattcaggtgggtccaacataatcacaaggtcctcaaaagtgaaagagggaggccaagaggaggaggtcagaatgatgtcatgtaagaaggactcgtcatgccattgccagctttgaagatggaggaagaaggctacagcccaagaatgcaggtggcctctatgtaggggaaaagccataggaacagatgctcctagagcctccagaaatgaatgtagccctgcacatacccatcattttagcccacgagacccatgtcagcttctgactcacagaactgtgagctaatcaattttttttgtttttagctactaagtttatattaacttgttatggcaatagaaaactgacataaacttatgtcagcaatagaaaacgaatataaacttatatcagaaggtaataaaaccagtaatagttgccatttcctgatgggttgctctatgccaggaactgtgtcaagcaccttgcaaatattatctcatttacccctgaccctttgagaggagatgttatcctggtttcatagatttgaagcagtggtgctcagagagggtgagtaaacgtgcccagggttacacacctaatgagtgtccaagctgggattcaaacccaggcctgtctgatcaccccccaaatcctccggtcgcctaacatactgcttcttttagggagctctctttgtagagattccctaattttgagttcttaccatggtatcgtctcttcaaatgagcccttagccactgaaaatacaagcaatgcccaaacagctggaaaagtgaactctgtccttcagagacaatgcaaaatgattcacattaagaggaaaaagggaatagttcttgacttgtctccctcccagacctgttgcacatggaccgtgcgagtgggcttgccctcaccccttttctcatcactgttctcagacttcaaggaaaaggtcctttcttacacagagctgggccagttgcctccttggccttcttgcaagtttagaaaagggatgcccatttgtgaattctgacttattgcaatttttgtattgttagttgagggaggagcctgcaatgtcaagatcacaggtcaggggtgatgcttccctttagtgagctaggaattccaaggccaccagatctgcagagattctgcagtcattcaaaaacttttctctcctggtcttggctaaccactacatggacccttaagcaattgctagaggttctctacccagagcttggggatctgtagggcctccagaggctgggaccatggtttaagaagggcaccctaaaataccttccccctccccccattacctcccctctctacttgttatgtacggtctgttcctaatcttcccaccgtcatcaagtaaagcaaaggtgatctctcctctttgaccactaatcccacttcatacaatctctagctgccagtatttgagccttatctcccctacatacatgtggtagaggtgagagaatctagatctgtgctgcctactataatggccaccactatttaaaattaatgaaaattaactaaaagtttggtttcttaatcacactagcctcatttccagtactcaaaagtcccatgtggccagtgctctcctagacaaagaacaattcccacactgtagaaaactcttttggacagcactgatagaaaccatcacagttatattgccaaggaagctataaagaaaagatgtgagttttgctgtaaacatgccctaattccagtcctcactctccatgtcacttaactgccctgagtttaggtttttgtctctgaaatgagggcagtattcatacctgtctcacaggactgttgtgaggatcaaatgaggtgaatgagggtggtgaaagtgtttttgcgaagcacctaagacaaatattttatttttattttattttttgagacagtgtttcactggccccatcacccaggctggagtgcaatggcatgatcttggctgactgcaacctccaccccggctcaagtgattttcctgtctcagcctcccaagtagctgggattacaggtgcatgccactgcacccggctaatttttgcatttttgtagagacagggtttcaccatgttgcccaggctggtctcaaaatcctgagctcaagtgatctgcctgcctcagcctcccaaagtgctggtattacaggtgtgagccactgtgccaagcctccaagataaatactctaattcttaggtcctgcaagctacttaggacaatctaggctctacctcgttgcaactcacttttctttatatttaattaattagctcataattaaccccttttatttctataacagcttataataactgcatttaataaaaagaacaattataaaataaacgagtatagcattaagactgtggggaaatgatgtgcaaaatatgatgtgcaaaaaaaggtaaaaatagagaacacggattgatgaaacacaacccgtgtttcatcccacatggttgcattttttagtaattcagcattgagcttcctactggcccaagtgagaatgaacttgtccttgcttttccctccttccttcatgacttctctcgtattattttgtcttcatcttttcttgctagggtcaatcaattgaccctctctctgactctctgttattctttacctctcattcccagcccttcccctctcttcctctttcattttccttgccttctccttttgtctgccttataactttctgttatactattagtgcccctgagcatttttcagtcctgcattcaagagttatactcattgtcttgggatgagaagatgcttccagcacagtggccagcattaacgatcttcactggtttctttccatcccctttcctcttctcctagttgtgtataacaactagaaacaaagtaagagacagtgaaagtcattttcattttaaagctcataaaaggagccttagaggcaaatgcctgtttcctcagtagcagggtaataataactacattggccttgcccaagaggctcttttatgctagtgccactacctgtaggatcagtggctggagccacaagtgctgaacaagggatggtgctgacaggaagtaaaccatctgtaacttaaaccacagaggaattctaccagggggttataaagagaggagaaggaatagtctgcagagtatcattcttgtgcatgcagtgttttcactttaaaaaggaaagagctgtatggtggcctcatgagaatctctcattccctaatgttgcccaacttcataactttgttccataacttttttacactatagtaaaagcagacctgagggtcagagagagtataatcatgctcctgaagtacttttttttttttttttttttttgagatggagtctcgctctgttccccaggctggagtgcagtgacacgatctcagctcaatgtaacctctgccttccaggttcaagcgattcttctgcctcagcctcctgagtagctgggattacaggtgcacaccaccatgcccagctaattttttgttgttgctttttggtagagacagggttttgccatgttggccaggctggtcttgaactcctgatctccggtgatccacctactcagcctcccaaagtgctgagattacagacatgagccactgcgccccacctgaagtacattttctaaaaatggtaactgttcaacagttgtttaaaggtgattgtttaaacttaatcattgttcaaagtgtggaggaaaagatgtctagcaatatgaaagcaagaataagaggccaaagagaaaggccaagatgggtcacctttctctatgccaactcccctggtcacccaaagcataggccccaatcccaagtcagaatttgactatatctgtgccctgcaatagaaaataacttcatgtgttttaatctgggtacctgtgaatgtttttgtatgagtcaggatagcataggttatgctgcataacaaacaattctcaaaaaactctatttggccataacaggtcagtggaaggctatttgtacatcattctcactctgggatccagagttagaggaactaccatttagagcattgacagtcttcactgcaagaagaaagagagcatggtgaaccacacacagtttcttaaagcttctgtctggaaatgacccacgtaacttttcctcattattggccaaaggaagtcacatggctacacttaaattcaaaggtgaagggaagtacagttataccatatgcctgcaaggagaacagaaaatatgtagtgaactgcactaatgactatcatgcttttatcacatgcaagtgagtgcctgtgcttgatgtttcccccctccccccgttatttaaccaacgccttatcatgcagttcatcacgtatttactgcatgcagtaatatcagatgccaggcattatgccacccagtctgatcacatggcctctggtagctcctctgggtggagaagagtgagcaggtaaaattgtcttcttggtagatgaaggaacataatagttgagttggttaaggaattttattcaatgctatgagtcagttgtatttcaacaaagtatatggaccatgttttcatatgtaatggctcatagaaaatgctggtgattgtttagaatttactgagcacctactatgcaacgggctcttgggatccaaggatgagtgggatgtagtccctgtactcaagaagcttacgatcaagtagagagagaaagacctaagtaagccattgtaacgtgatgtgccaagtgctatagagactttaaccatgtgccttgggtgcagagaggaccagaagcatcggggactgcatatggtcctatactgggaacttgctgttatcctaataaaatgcaggaaatttccttttcctgccagtgatgatgtgaaagatcctttagaaacattacccaagtgtccaatagtcctgcttatctcatcaaccatttgggattttcgttttatttccctaagtatcttttgtcatgttgaaaggtcagcctagggccaggcgtggtggctcatgcctgtaatcccagcactttgggaggctgaggcagacggatcacctaaggtcaggagttcgaggctagcctagccaacatggcaaaaccccgtctctactaaaaatacaaaaattagctgggcgtggtggcgggcgcctgtaatcccagctgcgcagcaggctgagacaggagaatcgcttgaaccgggaggtggaggttgcagtgagcccagatcacgccactgccctccagcctgggcgacaagagcaaaaaactctgtctcaaagaaaaaaaaaaaaaaaaagagtaaaaaaagaaaggtcagcctagccatgatttctgttactgaaatgtaagatctgattgaaataagcccagaatataaggcacttacggtggcctatggaaaagggtccctggtttcactataaccttttgcatttgtcatgctggacagctgtgacacccagagttgtagtgaaccgatgtttctatccaagattactttgtatataaatgtattttcccagggctgtctctcctcagccagttcacaccagatagaagctttcaatgtcaaggttgggtttgttcagaatcatcaattgtagccctgtcattttgccaatgaggaaattgagattgttagtagcccagtgactactctctgtcctctagccttcgggggtaaggtcatctcttgggtttggaaagcatgaactctaagtaactctgatgaaggcacacattatttatttggtgatgattatgaatgcaatccaggcgataaggaaaggagtgcagtaggaaccaaaagaccttgttctatacctggctctgccactagtgaattaccttgggcaagatgcttcccctctctgcacctctatttgttcatttgtgtggtcagcccagctgatctttaaggtccttgagctcctgtaagtcagtgttcttgtttattacttgaagggcagagttaacagaatgactcatgggtatagcttatccatgcagggcagggactctgtgaactgtttgtctctgacggtgatgatgacatgtgtctcatttgatggtatttcagttaggagtcaggttcttgcccaaggcccttcatgtgtacaactccagcaggctgagtggcttcttgcagctggcatgccgtggggccccctcttgtgcaggcagcagaggagaaggccttaaggtgtccattctcgctgtacttcaaagctaagcctagggtaagctgtaatgcacttcgaggtgtttgagagaggtggatagctgttgttgctgatggcaggtaaagaagaatgtctggacctgaagaaccagaatgaaatcttcccaaggagaagtgcaaagaggacagctgcggtggagagtggtggggtcttggacttttctgatgctttggagaaaatctgctattatacattgcaatggattttgttctaattggagcttcaccaaaattatattcagagatgacactcatgaaattgtagtcttgttttcattgagataacaaaattccaagtaactgaattgtttttattttttttgggtgctttgactcaggatttaatcagacttggatgaacgttgttccctaaatcagcactaatagtgggtgctgcctgtcctgagcagggcagtggtcagcctggagaatgggcaatgtcaggtcatttggagggactctcctatgctgtgatttttcatgcagttgacaggctttgcatggtactcctgagtgtcagaggacaaaacagctcttggaatgagttgtaagttacacaaggaaaggataggcttacaaataaggaaaataaggctcagaaaggtgacatttcttccccaaagccacagtgctataaggggcaaagttaggatttgaattaaggtctctctggccacaaaacttctgcttttaatcattgtgcttgcctccctctttgtttaaagagtcagttgttatccttccaaaaagcaaaccttgtttagacctatatgagtaataagtgagcatcccctagggcctagcaccaactgaggtgcttgcaaagccactgcatctggatttctgacctttaagccagtccgccttccaggtatcattttccccatctgggaggctcagcaaaaagaaagcccaagagtgtggctcaggctcaggccaagctctgctattgctgagggaattctatcctttacttaagaagatcttagggatgcttgaagctgtgagtataatatttttctctgaaggacatttaactgttttattgccagaacccccagctgaggcttcagagtttcccctgtcatgttgatcacaccagttgaccttcagggtctgtcttccattgcctcctctaggagcagcctctgctgtaaacccctgtggctgttttgcgtctcagtaatgcagaaagaagaggctagccttgtgtgtttcagctgcagtcctgttattttcgctcgtccactgtgctctttgatttatcttcctcattaatctgtggcgctcagtactgtaaaattgcctgaaacgagatctgaagagagaccctgacattttgagggatgttgcaggattgtgtggaggagattaaatggggacagagggaaatgaggtggctgcatggctcagtgggctcaaacctccaacttgaggatttctattggtacctctttctttagctgaccctgaggtttggagagagagactcacaagcctacggtttctgtactggcaaaataaggcttgaaaaaaattctccctggccgcttatttgagttgcctggacattgcttgtgggcaacctatgagtatgcagtaattgaagccctagagaagatgtgaacagaaccacaggccattgtagtctgggtaggagtctgtcatgtcacctcctatggggtgcaaagtttgacactagaaggtgagtgcagggacgactttgggtgccctacacctaaccagaagctggtggagcactatgtggggagatgttggtgggcctccagggcccctccaacttgtggaagagttttgtggagagaataggttcatttttccattgtcagtgtggtagcaactcatgagagctctgggtacaccagaaacagaggctccttgggaggctgcttaaactctaccgtaggactcttgacagtttgggatcagtggtcctagtctgaatttcatcatcaaaaacaacaattttcattcactgagcacctgctatgttctaggtgttctcctaggtactctacatactagctttaacctcccagaggacttaccacatcaggaattatccatatttcacaaataaggaatcctggctcagtgagcttatgtgacttgctcagggttacataggcagagagtggcagagcttgaattctaacttagggctgtctggctctaaagccagtgttatatcagagacaccaggctgccccatctctaaaaggggagggcaggccgctgttgactagtcggtagatccagcaccaagaataatcaggaaaagcttcctggcatcctttacgttatccagggaatcccgactcatggtccatggctggctatagccctgccttccacactcctccctccaccccaggtaggatcctctgggggctctcatctatccggggtctctccataaccatgttttgttctctggtagcccttaacatgcctttggaacaataagctcctaggtatggtctcccccaagactgagaggaaggaagcagaacaaaagtgtgtttttctcagcattcccaggctttgcacagagctgggcatatacagtaggagacgtttgctatattttaggtaattaatattatcctaagataattgataagactgactgaagagttttcctcccccttttccttccagtcggcaaactccccccaaacagtttcaaatctctcagcttctctctgtctctgtgtttctccctgtctctctgcttctctctctccctctctccgcccacctccctctccttctctctcattggccatggtgcaggggtctaggctgccgtcctctctcatctgagctctcccactgcagccttccaggcccactgtacccaccagggccttcatgcggtacgttctccacccagaagctattgtaaccttaacatatacatcagatctcctctgcccttgcctgaaaccctcccttagtgcctttccattgcacctagaataaaggtcagactccttgccgtggcctccaagggggtgtgtgttctggcccctgcgcacctctccagcctcacctcatcacgctttacctccctgactcctgccttcatccattcccctggacgtgccggatcttctctttcgtcagaagctttgcacatactgtcccctctgcatagactgtgcttccccccctctctccttttctccttataagcctggcttattctcttccttcaggtctcaactcaaacttcaccacttagagaggctgctactgaccactcaatctaaagaaagtttcagctgttggtttctttttggaaactgtttatttgacatctcttactttcatgtgtgttaatttttatttatttgcctgttatgtctttcccactagactatcagtatcaataagacagaaaccaggtcagctccgtttgcaggtgaatcccctctcccagcacagggcccgtccagagagggtgcttattacatataccatgaaggaataaatgactgccaggcactgtgatgcagggctgatgtgcaaaatgtttaaaaccagtgtgcttctggtgccaaccaaccagaatagggcactagccaataaccagaacagggctgtgacccattagaaaggggcatcagtcggctgtaagccactcatgcctggcataaatcaaccctgctgttgtggcacacagtgaacccacccactcagtcctcagccagtcctcaaagagagataaccatggcccaacttgccttcaaaaaaatcgggttattcatgttcaggaacttctcttgtgggagactgactggtttaacccagtctattattgctttgggaaaatgtggggtttttttggatggagttttgctcttgtcacccaggctggagcacaatggcgcaatctcagctcactgcaacctcagcctcccggattcaagcaattctcctgcctcagcctccccagtagctgggattacaggcacccgccaccatgcctggctaatgtttttgtatttttagtagagatggggtttcaccatgttggccaggctggtctcaaattcctgacctcaggtgatcagcccatctcggcctcccaaagtgctgggattacaggcgtgagtcaccgcactgggccaggaaaaatgattttaacctatgtgacactcttacaagttcagatgctgactgtgctgctacgtagaggtcagttaaccatcctgagcccccatgtcttcatcgggctgctgtgaagattaaatgagacagtgccaggcacaaggttagcacagtgcctggtccagtcagtgcccttgatcaatggcagcaatttttatttagtcatgatcagaatgctgatttcacagataaggaaagtgaggcacagaaagtctaagatacctaaatcggccaggatatacatgtgggtcctctcagccccaggtccagcaccgtggccactggcctgtgtcacctccatggtgcagtgtccccttctctttgtgatctgctttgggaggtctcactcagctcttattccctgacctctgtccttggggaactctggcaatgaaaaaaaggcagaagatatttaaggcctgagaccctgatggataactggcaaaacccgaagtagttaacacgctccacatcctggcaggaggtctcaatctttggaactggcagactaaccaccgtgtaacaacatcagaggtgcaaacctgttaaaatccccagcaaaggtcttgaaacagaacatgaaagggtttatgaccctgtggatttgaacttctcatggagccaagctataattccagctctgtttttggaagtaaagatcagaaccataatttgaggagggcctcagagcatgcacttattatgtttcaggacacaagctgtgggatgaagctgcctgggggagggcccggggtaccgaccaggaaggggtgtggagggtgtgaggagagtaaagcagggtgtctagctgaggcaattaaatgtacttgcttctcagtttaaacaaaggcctcaaggaaacctcccagagggctgcgttcttaatgatctggaataaaggggtagtgagcaaagccagcaagctgggggagctaatgggagccctggccttgaatgtccctgcaggaagtcagctagggaggcttctgtacacaagcagcacttgtcatgctaatgacccagcctctctggtgccacagaggtcagctctgagacttcaggtttgagctccactggagagctgggacgaacgcttcctctccctccctcatccactgctctgtagcacgtccttgtgtgctgcggttcctggcactgtctctctgctctcactgctactgtcctgctgtgcccgtcctgttacccagcgcatcatcccagcacagccacagtgatcctcctgaaatgcagatctgatcctgtgtgccacctgcctgctgaaaaccctttgtggctctgtgtcacatacaggataaagtgcaagcctcagagatgaccctccagccttggcccctgctatcacacccgcctcgtccccaacatctaagccggctgcaccaaacacttggcagtctctagcacgctccggggtattgtaaacctccatgcctttgccccctgggatgccctctcctgacccttctttgccaggctaacacatcctcttcctggattcagctccaatgcccacttctaggcatctcaggcctagtaagtcccttcctcagggctcccaaaggaccccgtgctatcctttattttaagtctaaccaaatctttaccttcttttttcctattttccctgttgcttggcttgaagacagggattatcttatttatcactgggttttcaggacccaaaaatatgatgtctgccacatagtcggtgctcattcagcacttactgaaatgaactccagttttagatggatgggttatctctctccatccagagaccttggctttttcactatgaacactgttgtttttctcactctcaggactgtctcagcccttagcacagtgggtgacacagagtaggtcttcagtaaacatcagggcaagccaccgcatgttctcactcataggtgggaattgaacaatgagaacactcggacacaggaaggggaacatcacatactggggcctgttgtggggtggggggaggggggacggaaagcattaggagatatacctaatgtaaatgtcgagttaatgggtgcagcacaccaacatggcacatgtatacatatataacaaacctgcacattgtgcacatgtaccccagaatctaaagtgtaataaaaaaaaaaatcagggcaagcctccctgagatgatgtgggggtgtggctgtcccacctgttttaatccattcaggctgctataacaaagtagcacacattgtgtggctataagcaacaggcacttctttctcacagttctggaagctggaagtccaaggtcaggatgccggcatggtcgagttctgatgaaggccctcttctgggctgcagaaattcggacttctacttgtacgttcacatggcagaaagagggcaagctagctctctgggatcctttttattaggcactaacttcactcacaagggctctgtcttcatgactaatcaccttccaaagactccacctctaaacactatcgcattgggggttagatttcaatgtgaatttggggcatgggaaggggaattcagtccctaacacctctcatcaggcatagtacttgctgggaactccttgtgtaagaggtgctttggggacacagaggcctggagtggagcctttttcaaagatcccaaagccctctctctatctcagagatcaggtcgtgagcgactaaaggaagggacagcgcagtcagggagatgtcagtgcgttcagattcagagggcagaacaagagcactgtagcatgggtcagaaggaaggcttcctggaggtggtaggcttttagctggaccttggaaaacaggtgggagttataggtggtgagggagagaaacagcagtcccggtttggtagaaaggaagacagaatgtgcgggagggatggagaaaagagactgagcctggggagttttgttctctgggaaatcctatcgttgaaggccaaccacttgttttccaggccagtaggtgccccactctgatactcaaagccactgtaatagccacctccggtagctgtgttccactgtgcccttcagaagtaacctaccccagcgcccctggaactgtctgtgtcaggggtcagccttgtgttcttggagagaagccttccaaaaacagactctgataggttgaagcaaatagctgacttattcatagatgccctggggctcacagtattagaactggccacctcctaatgattaaacactacacaaacacccagtgaccagattaccccaccataaatgggctgtaaaccagagtggacagtggctgttccaccaactgggaggaagcgaggctacagaaatgctttctgtcctaagcaactagcccttcaggcagagcccagaaaacaaacgcagacctttcctgcaccctgggagggaagtcggagaggggaaaggtgggattctgaggtcactgagagtggaaaatgacaagtacctccctcccctcccctgtgctaggtgctctaaacatgctgcacattaacttacatcataacctggtgagaactggcaattgatcaggatggattcggatgacatctgtattgagggtctattttatctgcatatccatttatgaggggaaaaactatggccactacccttaagttagttgatacagctgattcagagagactaggtcttttgtccggaatcacacagcaagcaagtgactagaaacaggaccagaatccgggtcctctgaccctgcaatacaagccttctccattatctgaaatgattatactgagcgactcccaggggtaaatgactcagcgtgccaggtgtgggacactgcctctcttgttctacccacacccacttccctccatctctaagttagttctacttgagttcagcaggtaaaagaatcacccctgctctggtttgttgcctctccaggaaggaagcaactggaccctattggtgggaaaggtgagagattcacatccacctacctgcacacctcccactgttctggacaggccagaccagggctgtgggcatgaagcagaccctcaccagtctctaagagctggggatgagaacaaagcccttccttattgctagcctgaattattgggatctgttgctcttattcttcagtaagaaaaacagccattctgttcattggatttggatgttctagcttctggttttgttaaattgttaataatactatctatttctagttactgctagaaagtatggaaggctcatgtgagttcaggaatatttgagaagaaaacatcttaggaaaattgcatccagtctgcataagcccgttctcttaacttgctggtgaactcctgaaaattggttcccaaacaccaggggtctttaaactccagagatggagacacctcctgaccatccagaagctcacctggaattcctagtagcagatgttattacactggtcctacatttccctccatatcacctcaaaaggcttaatttgctattttgtatgttcaccagaacagttagaattgtgatgccaaaaggtggtaagcttgccaggctaaaatatcctcaggaggaatctttaatttcacaatccatgtttctggtgtaatccacaccttttttgtgcttcagtttccctttctgtcaaatgggcatgtaaagtcctggtctctcctctccccactgccgtaagtcaatactggcgaggagcttacagcacccctaggaacccaggggcattgtaaatgcagggctctggccagagaagcctggcttctctctgctgccactgaagaagtgactgcagtgggctctgatgctgggcagttttggtattctgatcaggttacagtgacttttttcagaggggctcagtcctgccattctcacataaattccctctccctcccagtgccttagtgtaacttaagggggtgctgaaagaagatagcacctaaatccactgggttgcttttcacattacaaacatgaagccctcatcatggactacactggccttggttgttgttccagacaccaccagatgtgttttagggagtcagggtttctcgtctgccattccttttttccaatccttcttttggtgcaagaccttgaacccaaggcagtatagcacagtggttaagagcaaaggctccagaatagggttcagctcaaatcccagctcagtcacttgctaaccagtgaatgacttggagtaaattaatgcagatagtaagaagtgcttcttggtggagttgtgaggcttacttgcgataatcccaataaacaatagctattattgggaaggaagtttaagctccaaggcagagcaggaacggaagtgtcttctgattcattctcactggcccacaagctctctgacaatagagaccctttctgtctgtcttaacactttaaagccaaggcctgagaagaaactgccacacgatagaagttcaataaatgtttgagaacaatttcaatcccaagtgattctgctgagttttaatcatatatatatatatatttttttttttttttgagatggagtcttgctctgttgcccaggctggagtacagtggcacaatctcagaggaacctctgcttcccgggttcaagcaattctcctctctcaacctcctgagcagctgggactacaggcgtctgccaccaagcccagctaatttttatatttttagtagagatagggtttcaccttgttagccaagctggtcttcaactcctgacctcaggtgatccatctgcctcagcctcccaaagtgctgggattataggcttgagccactgcacccagcccagtcattctttaaaaaaaagaaaaaaaaaaaaaacgagaaatgagtcctatctgtaataagacagattttcaataaggagaggaatacagggacagggaatcaacatttctgtgcacttcattgtgccaggcagtgagctgaatgctcaaagtatttcatctcacttcacccttcagaactcctgcaaggctggtgtgtccttcacttttcatgccagaaaactgaaatgaggctcagagaagtgaacttgcctgaggtcggacagctgggtaagctagaataatagtagaagtagtaatagcagcagcagcagctaacatgtatgtagcatacactgtgagccagacactttacctaaattgactcatttaatcctcatgacaactcagtgagatttcatcattttaaagatgagggaaccagctgactgcagtggctcacgcctgtaatcccagcatttgagaggccgaggcgggtggatcacctgaggtcaggagttccagaccctgttactccctgttcctgggaatattcactcagaatctggaaaactgtatatccccgacattacagaaggggttcctgcgtgaggtgagaaggagacagagaggtgatctttcaaaggtctttcagttgtatgattcagggtgtccaggttcccatagggatcattagggtttgattatagacaaagcagactgggtattgtattctggagataagggcctccttggaaagccaggttcccacaggtcatgccagcctgggggtggtagcagaggcaccaaagatgtttcttctgaaaaatgtttaacccatgcctccttctattaaatataaaaattgtggccgaatgcagtggctcacacatgtaatcccagcactttgggaggctgaggtgggtggatcatgaggccaagagatcaagaccatcctgaccaacatggtgaaaccccgtctctacaaaaaatacaaaaattagccaggtgtggtggcaggtgcctataatcccagctacttgagaggctgaggcaggagaatcacttgaacccgggaggcggaggttgcagtgagccaagatcgcaccattgcactccagcctgggcgacaagagcaaaactccatctcaaataaataaataaataaataaataaattagccaggcatagtggcacatgcctgcagtcctagctagtcaagtggctgagatgggaggatcacttgagcctgggagattgaggctgcagtgagttgtaatcataccactgcattccagcctgggcaacagagcaagaccctatctcaaaaagaaaaacaacagaggaccaaggtacaaaaatgcaaaataatttgcacataattggtggtagagctgagactggaccctggtttctaaagatcattttcttctttttttttttctttggagacagtgtctcactcttgtcacccaggctggagtacagtagcacaatctcagctcactgcaacctccgcctcccaggctcaaacaatcctcccacctcagcctccagagtagttgggactacaggtatgcaccaccatgcccggctaatttttgtattttttgtagagacagggtttcaccatgtcatccagtctggtcttgaacttctggactccacggctttggcccctcaaaagtgttaggattacagacttgagccactgtgcccagcccatttttagtaagggctttattggtgtagtaaggactccataggactttctgaaacagaagaattaggtgattaagtaaaatggtggcactgctctctctaacagttttgaaaatgagactctgttcatatgcccaggatgtgtgaacagaatttttcctggaggtgcagggcaagtttgagaggacctttgagtggccttgaggctttgcctcatctctccacattgattgggttggcagtattttcactgaagaaactgatctgcttttctgtggagtgaaatgacaggttagaaaggctctcaaagtctaaatttagccagcacagtgtattcatgtgctgttttgcacccgggtcaccaggagaagatagatttgacaggttggctgggggacaaaagccagcccttgaagaaatcagttctcctttgaaaggtaagtcagactaattatttttctctatcaagcctggtgtgtgagctcattgatcagcagctgcaatgggagaatggagtggtggtactaggaggcacaactgccaccactatggggcttcagctgtaatcatcttccaagatcagccagtggtacagtaactgcctgctatccccgcacacactttagatcctttgctttatgatgctgttttggatttgtaaaaacattttatgttcacaaaaacaaaaaatatttttatagaagagaacgttatcatactttaccccttgtagaaatcttgtgagactggtcattgagagagccttgttttatagagcaaagttgcagaaaccaaatattgcagaactgtcagcctgtgtattttaagtttaaatcaggccaggcacggtggcttatgcctgtaatcccagcactttgggaggccaaggcgggcagatcacctgaggtcaggagttcaagaccggcctggccaacatggtgaaaccccatctctactaaaaacacaaaaattagccaagtgtggtggcgtgtgcctgtaatcccagctactagggaggctgaggcaggagaatccatgaggccgaggttgcaatgagccgagatcgcaccactgtactccagcctaggtgaaaaagtgagactgtctcaaaaaaaaaagtttaaatcagtgtatgtgtatgaatgcctgtcatcttctctgtcttttctctatcactttgactcttttcagctacttcttgaggtccaaaaacttccagagagcttttcctgccccttaacagccaaacagagacttcagggacacagcaaacaagcatgcttgccatcagcatcttaagcttgacccttaggatagaggctcagatgaaagtcattcacaccaaagctgtgtccaggcaacagccaacagactttgaaaaaggacttaaccagtataagagatgactaaatttagacttgtgtatttctttttctgttgcttgtgtctttgatccacttggcagttaaaaattgaagttcctcagaccttttttttttttccgcctgcttgttttgctagataaaccgtttgcacagagtggtgtgtgtgcttgcacatgcttaatttccctggcatctgataaatgttttgaaatagaataatgctggaaacattttttattactttaaattgctttgcttaaatagaattgattcttttcctcgactgctgtattgttgctgcttttgtttttaaatgaataagatcactctaactacgtttccttcttattagtcccatcgtgttcaaccatcacttcctgtagtgcttactggcaaatgagacttcccatcctcacgtggctacacaggcatcagtgagacctctctgaccttgggctaggaatttggaattcctggtctgtaacggggagagatgaagctgcaaaacaaaaaagcataggttggaggttggaggtctgaggtttaaccttggatctatccctaaactctgtgacctcaagcaaggtacttttccccctgagcttacttactcaaatttggatttgagtcaaatggcccctaattttcttttcagttgtgagcgtctagagtaacttcagtttactagataaccaaccctgtataaaatttgagatttgattatccaaaatgaagtgcatgaaggcaggtgctcgttgaactcaatggtgtctgaacgagctctagaacctgtgacaaatgagctgtgagatagtgttatgatttacagctttccatggggtggacatcataatttttaaaacgctgactttgtcagagaaattagataaaatgcaaacagcgctgtgagatttctgaattgggaagcagagctggagtaattttcctttggtatgtctgcatctctgctacccatggcttttccaaaagcagtaaatgcctgtctatgagcttccgatcccccttggataaagttcaaactgttaccgggcttactatgagatctggctcctgctattcttcccctccttctcctctcttcaaccacactgaattacttgcttccccaacgccccaaaccatcctttttcttgccttccaatctttgcagagacattctcttcatcctcaccccatcccttcagggctcacgttaaatgtcacctcctccaggaagccttctctaccccacaccaaagaccagattgggtgtccctcctatttgctcccatgatggcctgaacttttccttatcatagtaccaaatacatcctattataactgtctgctactagcctgtcacctcatctatactctaagcatcttgagggcaagaacctatcttgttcaccagtgtttcctcattacccaagccacatgaggaaactgctcagacaggtagactagctccagtctgtatagctcagcttattagtgaagccagaattcactcccaagcctgcatctctcaaaccccacccccttcccttctgtaagacttctcatcctgacccatctttcccctaattgtgaagatgtcttttttcttgagatggcttctgtgatctcataagaaggactggggggaaaatggaattggttttgcagacctttgatttagagactcatttacaagattgtctgctcccgtggatcaggactgcaaaggagaacacttaggtcaattggcttaaatggcactgcgtctgctgtgcaaataggggcttaataattgtgagtctccttttctccctggagtttgacatactgtgccatccagatgcatttgtgagataagcgtgacagccccccaccaccttttttttaatttgcgaattttgaaattcaaacacgcctctctgtctcttggattccaacagctttaaatgtccttggattttttagaaagcgcccaagtctataatatatgtacagccgtggcttttatcaaaatgtagacatgcctctcattactgctaattgcagttctaccaccgggtgatctgggctcaaacctcctagttctgtgactggttatctgttttatagcattggctacttaagatacattacagtgtcttccaggcagctgctctttaggtaaattaatacctggggatctttttccttctctaggaaactttaagtactgtaacaggctttcatttaagcctgtgcaaggcttatttcaccagattgctatttagaagttctaacaaaacacctttatgaatagtgactgtaatacccttaatccgctaaacttcctgacattttaaactaagtggatagctaggaatgaaatcaggctttcccatctctctagtctcttcctctccgcaggcctgcctatgcatcttcaggatcaaggtgctggggtgcaaattctttcttgctgttaggccatcaaactagcaaagacgaggaaacacaatgcactttcttcagactccaggttttgtaattacctggcctgacccatagcttttttaaaaaaatgagttttggtgaggtttctgtttctgataaaagattgggatttaaaaatattaaatgtgattttcttgtttttttttaagcctatgtttaattttggaaaaaatattgaaaatgcagataagcaaacaatagggataaaagaaaaaggttgtaatgttatatgacacagagaaatctatcgttaacaccgtggtgctttccaggtgttttttgttcatgtaagcacttagacattttgttttttgaaagaccaaacatgtcttgaatacttgcttgcaatgagtcacacactagtttaaattctttacatgtattgattcatttggtgtttacaacacctctgggagtaagaactcattgtacaggtgatgaaacagacacacatcgcttaagcaacgtgtccaaagtcacacagctaaaagtgacagagccaggatttgtagctagacagtgtgactctatagtctttaattttaattacattatacagcctctaaaaaatgagagatgttttataatctaattttgtaattgtgtagtacagcatgagcatttttctttatcaggattcattaacatcattcttaatggtcacacacaggattccattctatgtggcggagccataatttgattaactgtcttcctactggtgaatatttagggtatttcacttcttttgttcttataaacaaaaatgcaaagaccattcttggacctaatgtatgcacactagtgtgggctgccaataaagcttgtattctatatttcccttataattctgacatttgtgtgtgcagatgatgcccttgaggcactacagaggagcatagtctcgagtatcttctggcagtggtgatggggctaccctgaaccattcacatactttttctatccgtactccattgttcctggtatggtgtttggaagaaagttggctgaagaatggagtttctgtctaggtccagctagctccctgcagctgaacctccacatatagcatcagtttacattgtgctctgaattgaatgagaacatttatctttctctctaaacttaagcaaaaatatagaacttgaaactattaggttggtgcaaaagtaattgtggtttttgccattactcttaattgtgaaaactgcacttacttttgcaccaacctaataccatgatggtgcctactgatagaatcacccactcatggccgggcacagtggctcaagcctgtaatcccagaactttgggaggccgaggcaggtggatcacctgaatcaggagttcaagactagcctggccaacatggagaaaaccaatctttactaaaattacaaaaattagccgggcacagtggcacacgcctgtaatcctagctactcgggaggctgaggcagaagaatcacttgaacccaggaggcggaggttgcagtgagccgagattgtgccactgcactcaagcctgggcaacaaagttagactccatctcaaaaaaaaaaaaaaaaagaagggggaaaagagcgaccaggggatagggttgttgtcaatacacttttaatactcaaaccagtgaagtggctgtctgtaaagtcaagaaaatcatccccaatgtgccaattaccagtctcaaggcaaaaatccagaggtgataaagagtagttttaagcatgggctttgaaatcagaagcctgggggcttaccagcagtgtggccttgggcatcttacttaacccactgctccccaatttcttcatataaacttgggatgattatacctactgcatagggaatgtcagaaggatgaaataagaccagaaaattcagcacagtaaacaccatgataagaactccataaatgggagcttaagaaagccccagaaggacactgatttatgaataagttggacctgggtccagattttggctttagcattttttggctatgtgaccttgagcaacttacttaacctctctgagttgtagatcatctgtatatgagagataataaaatctatcatactgggatatgtgagttttgataccaacgttgtatacaaagttagtagagtctctggcgcgctgttggttttcagaaccaatagcaaaatttgtaagtactttctgtgtgccagtcactctatttaacttctcttcttccattcaaaacagtttttctcttagagactaatggtcaaatggaaggagtttaattcttaaccagtctataactttttcagctagccttcccgctaggcaaatacctagaatgagttgggctctttgccaaactttttttttttttcctttcattgtagacaagactgtggttcagaggttgggaaaggttttgtgaacctattttatagtccctataaactcagaagggaaacaatgaaataccaaagctaaggtatagaacaggttttcttacaagagaaattacgacctcatggagctgtaggaagggttctgcgggaaaaggtatttacagcatttcatacaatgcccggtccctagaaagtctgcagtaaattcaaggtctgtccccagtaggggacagatggatcatgagtcaaattcacaaggcaaatgaattttcttttgagaaggaattcagtgggagatctaggggtatagttttacaaaacattcatacttggaaggttcttagtggacctctggggtggcagcctgctcagtaagcaggagagtaatctgagagccacagtcaggaagtgatttggccaaagtcaatgtggtgacagatgtaggggctcagccccaagcttctgttctgttccggtgttctctcctctgccctgcagcgcatcctacaacatgagggctgcatgaccggggccagtgggaaaactttgggtgaaggaagtggagtgagatcagagtccccaactgttggcttaagtcgcagtctgcctaggggctgccaatgatgagcacctacaagtttcctctccaatcccttccttctccccgattacacttccccctcctcaccccagccacctgtccctctccctcattatcaccctgtggtagacacagtcaaggatgtccttggagctggactcccattggaaaaagccaaagagtagcactgaaacattttcttcattccccatccatcttaatagagataacagtgcagctgcaaaaataaacatttgaactctctctgtgcccctacagcacccttaataaaatatagatcctcaaagcccatcatgttcttttaaatctcctttaattttctgtttaaaagaccatggctaggtgtatttggtcatgtctgtaatattccagcactttgggaggccagggtgagaggattgcttgaggccaggaattcaaaacccacctgggcaacaaagcaagaccctgcctctacaaaaaattttaaaagttagccaggcataggccaggtgcagtggctcatgcctgtattcccagccctttcggaggccaaggcaggtggatcacctgaggtcaggagttcaagaccagcctggacaacatggcgaaaccctctctctactaaaaatacaaaaattagctgtgtgtggtggtgcacacctgtagtcacagctacttgggaggctgaggcaggagactcacttgaacccgggaggcagagattgcagtttgccaagatcacaccactgcactccagcctgggtgacacagcaagacttcatctcaaaaataaataaataaatataaatataaatataaatataaatataaattagaggcatgatggcacatgccagtagtcccagctactggggaggctgaggcgggaggattgcttgagcccaggagtttaaagtttcaaggagctgagattgtgtcactgcactcctgctgggcaatagtgaaacactgtctcaaaaaaggtagttaattaataaataaaagacctaattgccacatggatttgcttctttgggtttttttcctgttttcctctaaataaccagatttatgatcatgaccaaataggcacgatagcctcacttcatactgttccctgaaatacgtgtcgagcattgccatctgctgctactccttatggccttggagacaatgacacagaaatttttgtggctgttgttcttagccagggatgtgtgggatggggttttatggggtaatctaggttttgctatttagaaagctacatctagggtcaagtttcaagattttcaccaaaattgtcaactttcaccattgcacagcattcctatacaggcagcctgagtacagatttttctgactttgtggacaataatttccttctcttcttccctataatatgtcctcacagtttactatttctttttttctttcatggcatatctcatggattgcggttaaatgtatttgttttttatttgactgcttggtacccccacatacacccaattataagctccacgagggggtagagagagacatcttctctttgacataccactgtttccccagcacaatgcctggcacacaaaagtcaatatccagctgatattttaaagagaacaatcactgcaaatataggaggagcgactatagtgtggaatttggtaaatgacagtatctcaattggaccaaacccaaaagtattagaaggagctgaaggactgtgggataacctgtgaatggccctggcccactaagtgtcttagtgtcatctgttggcatagtgacctggaggtgttcactcctctaatgccgtgtcacggaaatcaaacaggatttggctccagtctgtcgcttggcagttgtatgactacgagcaaatcatctaaattctctgagcgccggtttctttttcataacatggggataataacgcgtgttagaacagttcttagaattaaatgagatgagatgtgtaggcagtaaagcttataaagtttaattatcgttattgttgggagtaacttcgacctcttatgtcctttactggaaatgctgccattttggagttgatatagccgattggcacccttccagaaaagacatccctgatgttggactgagggtggaaagtctggatttgtgagttgaggctgaagatgctggcacccacatggtcctgttccttagctgtctttaaggttttgttaacaatcagctggtttcagatttagaatgggaagggcataagcatggataacagattggatactgttcctgctgaatgaaatcttttgtttagagattaaggaatatgtgtgcttttacatgtgagtactcacaaatgtggagtccagacaatctcaacaattaaccaacaaaaggtaacagaaactgcagctctataagataaaatatttgaagctgaaaggcagctcattctgtttttgtaatataattggagcacagtatcaccacttcactggaaacagtagggagggagggatccacaatctgggtaaatgcaaagagtgaggtcctgcttccctggacccagtggaaatagagattctgcataagaacatgaatagggccaggtgcagtgactcacgcctgtaattccagcaccttgggaggccaaggaaggcagattgcctgacctcaggagttcaagaccaacctggcccacatggcaaaaccctgtctactaaaatacaaaaaaaaaaaaaaaaaattagccaggtgcggtggcgcacacctgtagtgctagctactcaggaggctgaggcatgagaattgcatgaacctgggaggtggaggttgcagtgagctgagatcgtgccactgcactccagcctaaacaacagagcaagactctgtctccaaaaaataaaaatagaaaataaaataaaagaaaaagaactttaacaggaagggaggccctcttgcttatcctttaggtcctaattcccagaaaagaatagaggaagtggaaaaggaatgggggagatgcagaggcacactgactacctttcaaagctctttattgatacttttctaggatcagttgttattaatggtttgagagttctccagaggatagtctttcttttccactaatgtccccacacccgcttactaagcttcaaacatagtaaccacctttcagcccctccagcacacccagcctctccctctggtctctgcacttgatgcgtcccccttccactccccaaccccttcgtctggaacacctggctttctccttctgatggctggttggtgccctctcatctttcatgtcttcctttaaatgtcacttcctgggaatggcctttccctaccacactatttaaagtaagtgcttcctgtgtgactctctttcacagcaccctgtttatttctgtcatcactttccccgtaacatccataatgattttgcttgtttgtctcctccatgtaaagagctctgtcaggactggggcatttccttttcctccgccttatattctcagtgtccagtctagtatctggcaaaggttttgcattgactatttgttgaatgttgttcattttctaccccaaagctgcctagtttcctataattcttgttgaaaataataaactccctagtattaactgctgtacttcaaaatctttgctaaagactctccttcccactgcctgttgcagatcacacccagtaaaattccacaccaggcaatgtgatgtgtgtcacatcttttaatgtgtcccatacacacagatcctcttttaaacctttatgttttccttcttgttcattcatccaggagagctttccttcctccctccctcccttccctttctctctttgttctgttactagcaagcaagaagaaagcaactgaattgagtataatactgattcccaaattaaggaaacaaaaagtcagtataaaagtgaaactgccaggtgtggtggctcactcctgtaatcccagcactttgggaggccaaggcaggcggatcacttgagatcaggagtttgagaccagcctggccaacatgatgaaactcagtctctactaaaaatacaaaaattaaccaggaatggtggtgcatgcctgtagtcccagctgttcgggaggctgaggcatgagaatcgcttgaacccgggaggtggaggttgcagtgagctgagatcggcccactgcactccagcctgggcgacagagtgagattccatctcaaaaaaaaaaaaaaaaaaaaagtgaaactaaagtggtattacaaaactcagaagcagctgcgcttaacctgggctttatggacaggattcaggggatcagtgagtccctggaaattctgtgtaaaatattgtttgtgtatcttttttcttatggagagacgggcccctaagtgggtctgtgaccaaataaaaccattgaactaaagtccttggaagtactacacagtccccaggagactgcatggaataatcagttccattttgtcctcctatgcttggttgatccaggaccacatcagcagtgatttaggcactgggaggatatggctcagaacaaaggcaaacagtacacctgtgctcgaggagctccctgtgttgagggaaagacagactgttgaaagacaatgtgttgactggttgatgccatgaagaaaatcatatggtggaatgtaattgggccagagtctaagaggaaatccctgaggaggtgccattccaaccaacatctgacccgtgagaagtgggccgccagtgggagacatggggaggagcattccagaaaggaggcacagtgcgagggcctaggaagtgggaagaagcttggtgcatttgtgggtcctgtctttggacgtaatgaagaggagaagccagatcacatcagggcttctaggccaagggaacaaatttgaattttattctaagttccctgggaagctatcagtgggctttaagcaggaatgtgacagaatctgctgtacactggagaaagattgctgcccctggggtgtgcaggatggagcctagcaaggcatgagggaaggctgagcgacccgggaggtgtctgttgcaggaaagagatgatggcatcttggtccaaggttatcttattgcagatgttcagtagtgattgggttcaaggtatatttggggactctaggcaaaaggccttcttaatggattacatcggaggcaagaaggagggagagaattaggactgttaatgtagagtcatattctgagatacagaagactttgggagtgggggtgcggacacattggaagttgggagcaatagttttgagtaaggtaaatttgatttcagatgtgttgggtacacaaaggggccaggctagagattacagactttagagttgtctgccttcacctagtatttgaagccatggatgagatcacccaggaaaagaagttagttagaagtggtagttataacttagttagaagttagtgagaagttatagttagagaagaggaggggtccagggatggaggccctggagttctggagaggtgaagaggagggtgagcctaggagattgagaagcgcagttagggaggtaggaaccaggtacagatgacagtatggaaacccgggatgaggcccactcaagaagggagaatctgtcgatgctacctgctgctgaaaactcaagtagggtaaggacagagagttgaccattggctttggcaaggaggaagccattgatgttctcagggaaaagagaaagtggtctcagtggagtagtgggaacaaacatcttgcctggtgggttgaaggatcacggaacatgagaagtacaggaaaacacctcaaaggagtggaggagaatatgggcatgaggtaaaaaaaaaaaaaagtttttgtttgatttgatgagattagtgatatatttttcagcctgcagggaaaagccaggaaagagggttgaatatgttggaagaaaaggaacgaagtgtcttcactagcattgttttcataaaatactcattagaaataagtgaacatctttttagatttgtggttttctgttttgtctaattatgtactgtattccaagaataaagttttcttctactctttgatacctgagtagagttcatcaactacatcttggttttatagatggctctgtgagtaacctggaaaccttaacatcactgataacattgtttctgtggagaaaagtgttatgagttctgggagccctttggaatttggcctgtttagaagcaagcgtcaaaaatgacagagcaatcctggctcttgaaaagcgccaaagggcatctgccctcatggagttggtttactttcccttttcctctctcgttgcctgggtctcccttatccctactaattattatctttcaaaccatgagaaaaccctgactcaattagaacctgtagctgcaaataattcagagcctctaacatgaaaggtgtgattcttttaaccatagaaagaaaactaagacctccttaaagcactatgtctcctacaataaactcacccctgtaaaaatcatgtgtaatcaaaacgatatgtttagtgttgtacatttacatgaacttttataaaaagaagaaactccatctattaaacctccaatgtatcctctctccctcagagtaaaagacaagctgcttacgctgacttgcagggccccatttaggcactctcctctctcgctgtacccttggactctctggcctgaccccctcctcaccccactttggttcaccgctcactgctccagccactcattcttggaatgcattgcaagtcgtatactatctcagggcctttgcactgaccatttcctctcttgaaagtcccttatccccaggtattcagatacccagctcccatacttcttttagatttgtaataaaaaccatgccctcagcagacctgccatagccagcccatgtaaaatttcccacaccccaccttgacaaatcacatcttcttctttacaatacgttgttctcccgagcatttattgctaatgtactgtaaaatttacattttgtctcatttattttatagttctaccactgaagctaagttccattagagttgagatttttggtctattttgttgactgcttgtatcttctgcacttagaacagcacttgccacattgcagatgctttataaatatggtagttgatgaatgaataaatgaatacatcaacatttcctagcttaccttgatgacaaatcagaatgtttacctattatgtttgcctagagcgaggaaacaatggaaactttttagagcgtgtgtgtgcatctgtgcccatgtgcctgtgtgtctccatacacacaatcaccatcccattcccaagttaactcggatgttggacagattctcaaagaagtaatatcgtaaagatacagtcagttccagggacagcatagaaggtaaggggtggtttgaagcatccttgtcagccagaacttgggtctgtcccaacttttttgtcttaatatatctggacactactccttccctcaaactcacccactgcccacccccacctctgcttcccactccccacggcagatgcctcagcagtatttcaagtggacgagggccctgaaggatgagatgtgaatgattaactttggttgggactccttcgagattacaatctttttttcattcacctgggaatcaccaccagaccctcctctcctctttgagcagatcttttattccctcccttttcagtgggagaggaatggctcttcattcccctttgaaagcttctgtttgctgagcaaatgctgaccacacagagacctcgcttggagccagttactgcttccttccctaaccatcccccagggccacaacccccgctccctgcttccactggagaggccaccctggccagggggagagcctttcttggggaaagtctttgaaagctaccaggaaccaactggtaggatttttggagagggagtcagggttttggagaacatcttaatccttcgttttcaaataaagcttgtggctataacataagtttgcttttgagttctcagtagtaatacagttgttcattgttcatagcatctgtttacatagttctttctgagtgccttgattacaggttttaatagggattagtccatgcaaccccttcccatcccagagctgggactctctcccacccacctccccttccagcctctgtaccataatgtttaatgtagccatgcctagactgagattctttttcttttgaaataagtagcctgcggaattaatgcatatttttgttggcactgcatcaaaattgacatcaccggaaataatgtatgtgtgtcgttgttaactgtacaaacaggtatcatttcctttttaggttcagaaattctctctgtaggctaatcttttcaatcgaatgctttgccttcagacgtcaatggaatgagctaagaaatgttatagtcaatgatttttgcatcattaaaagtagcacttagggctggaaagactttctgcaatgtttctgtgcagtctgtgaggatttaaagtagtttttcattcttagattttcttcaatttgacccgctgttgcaaactcccctgggaccacatggagggcccttccattcagtgctttacggtaatggtttcagagtttggtgttagcttttgctttgctgaaacttttcacagctgacttgataccagcactgaggcctgacctctcgatccttcagcacttcagaggttaattttgttgggggatcggatttctttcctggcctggggaatggtgatccctgctagctagtcctttagttacagagttgctgggtgcctgggattccctggcccagtgtgggctggctcagctggctaaaggacttgccatcctgtgagattcattcagcttctttgtccgctgttctccaagggccgcaatgtagtgaaatgctctggcctaggaaccttacaaggtaggacgattttctaaaatttctggggccagggggtgggtgtggtgcatgtactgccttgtcttccttggccggtattgaaaagcctggtggagcagcctgtggtgcagctgcctaaatcactgtgagctatgtggtggtgtgtgagtgggggtgggagggggcggggggcaaggttgctggtcaggaaattcacctcttctcctcttccgcccccattgattctaaccttgatggtttcagaggaaactggggcattacccgaatgtcctgggtccacctagacatttgggtaatgtcaatattttccaaaccgtcttatcaaattaggctactgagcccgaaaatctgggtattgatcacctagctgtcttaagtcgttattccggacttttcagctggtgggggcagtacagaggggtgagccggaaaaaggcagtgtggccccaggcaagggctgcttgtggttcagagggccctgattaaaaagacttgcagttggaggttttgtttggaatttaaggatcctggtgaacttgtggttgtgtttatacagcaaattgctgggtgtgtgtgtgtgtgtgtgtgtgtgtgtgtgtgtgtaaactaggctccaggagagatggcatgggaggtttaagcataaggacttttcttgctaccttatgacctatagagctgcccagggaagcacatttctgtttttaagccagacaaggggagaagaaaacaatgttcatgaccacctaccacatgccaagcatctagcagacattgtgtcattcaatttcattgcaaagccagggagattacattcaattttgaaaatcaccagtgggaaccaagagaggttaaataacttgattaaggttacacagctgataagaggcaaagctgggattggaacccaggttcactctaccaccatgccttcctgggtgggcttggcatctgagctcggaatggttttacctgttaattttaaatgtgacttcagctggatgaagggcgtactttgttgtggaggactcaccgaaatacacaggatgctagcagcacagcctgcctgggcttctcggattcagcttgtttctggaaggaagagggctgtgtattaagaagcagccctgctttggcagtaggacctagctgggagttctgtgatcttgaggctccggggctgctggattgatcaggctggagctttagtttgtacctggttcaggaagacttgatcccaagtgaaggtcaaatcaggaaaggccagtgaccttggagctggccttgggctgctgaggctgtgccctggaactctgggtctgcttcttaagacgctgaatgtatggagtcttggagggagaagatctacacccagcatattaatgctgaccaaagctattggcgctagctgttcacatgtgtgctggaggtgcctaattagctaaagctgagcttctcttgggctgtagaaatcttgacctgaggtcccttcgctttcctcttaccccaagaaagagagagcttaagggcaagtccttgacaaactgcaaaatgaggccagcctgtttttgggagatagccgcctcccttggctgccctggggcaactgtggttctgttttgtgcattcaggttcccacatccctaagatatattgggagcttagtggagggttggagggagggagactatgggggtattgaactcctgtcccattctacttagttttaagacagctggccaatgccctgtctgggatttgtcccccatcccctttcctttaatttctttgagatgttttaaaagtaacttgattgcattaaagtgtcctgtgtattttgaataacagttggaagttctgagttcttatatgaccatgatctatttagatgcatctttacctctgttcttaacattgagtcaatgtgattttaaaaagcttgggtttcagaatcaggcagatctgtattcaaatccagctctgtttgttagccctggcaccttgggcaggtcacatagcctctctaagcttcagtttccacatctatccaaagggggcattagtagtttgtgcctgataagaaagtggagaggtgtttatgggatggtgcttagcatggtacctggaacctattattaaaacttttcaccttgtataaatgtttactgttattttcatttgctataatatgctgaactctgttgatgtttaggggaaatatatcttctggtaaacagaaaactaggatgagtttgttgatatccttggcaaaagccagccagcagtggcccaagggtaagcagccctctccagaggagccttgaaggagagagggctttgtgtagctgaggtcagcagacacgctggtgcctagtgtaacaatgagggtctaaggcatccggagctttggtctgggctttctaacgcgaccaagctcctgaagccaaagggaaaaatttcatgcttactcaggggaccacctacttgtcaaggaatgagttaccaaaatgggacaaaggtgcggtggggtgaaactcaagcctgatggctgctaaatccccttggagccttttttatgcggtttgtgttttcctctctccacctcaaatcactggccttgcacctggcaccgtctgtagacgttgcttctcccctaggacactatccatttatggcagtaagaagcaagttcttacactagaacttaatcatctgtttgagaatgtaggcctgcatctccttcctgcagtccttgcagcttccctggatcctgtactgcaactgacatgcatggactctctcccatatacatggagagctgtacttaggctacctgatttggtcccaccaaaatgattatgctaactggatgttattagaacagtgccacccaggaggtaaaggtgccctgataaggagatggcagagccagaattcaaacacagacctattttcattttttctgcagagctgtggtctctccatttggagcctcctggtattagtggtactagatgagactaaatttgctggggttagtgactacattctgtccttgcattaattccagtttaggctctggatcatcttgcaccagaactgcaaactatgtaagctggtcccagagctgtagtccagagacaggtggcttgcttatagtttttttttaaatttattttttatttttattttttttgagacagagtctcactctgtcacccaggctggagttcagtgatgcaatctcgtctcaccgcaagctctgcctcccaggttcacgccattctcctgtctcagcctcccgagtagctaggactacaggtgcctgccaccatacctggctaattttttgtatttttagtagagaaggggtttcactgtgttagccaggatggtctcgatctcctgacctcgtgatccacccgcctcggcctcccaaagtgccgggattacaggcgtgagccatcgtgcctggccagcttgcttatagttttaattaaagtaactgtatcttctttggtgtgggaaactttgaagtccttcaaagtctaatgaacacatgacgagcgttcattaaaatgtgtaaaatgaatagataaatgcgatggttgaacactcatgtgtctgtgtttaaatctcagcctcaacatttcttagttgtatgacccgtgggactatttctccaatcctcaattgcctcatctgtaaaatgggtatagtgttaatatttatctaacagtaactgggagaacatatgttacataacaacagagcctgacacatagcaaaccattaataagtgttggtgattatttttatcagagtttggaggattaactgaaataatgtatgtagtgcagttagcacaggggctgacaactgtaaatgtcgattaaagttggctattattatgctttccacatagactacaaaaggtaggactctgcaggagccctgcttcattctttgaaggtggattttcttaacaggccccagcaatagttagaggagatgatgctcccgagaaaacctcctggggaggaaatagttaacatacctgtttggtgggaaatgtaggtagccaaaccctttctcttccccaggggttactactaagcctacagttaggcttgctcactcatccacaccaaaggatctcgttccgctcgggccccggggtttcacgggaacaattgccttgaacaatagccagaaaacgagttccaccagtctggacttttttgcaactgaatgcagctgtctggcggggggcatgggccagccctgtaaatgggctgtgccttgattctggagcagaactggaaaattgagcaggtaagtcctggatgcagctggtcacagctgcgcagtgtgagcttagtcacctggaaagaggcagacagaggggcgggggctggcccagactgtttccaaggacagtaagggcctcctggaagcagacccagcctttggagtttggggaggattaggatccttgctttgtgaagactgcttttcagaaccgtagttagagaacctcatctctgctcaccggctgtggttttattagtaagtagagaggaactaatatatatctacaatctgattttttttacagcatcgtttagcatgtctttcccttgaataaacaacattatctcacagggagttcatttgaaaggtgtaatgatcctccctccagatccttcaataactcctcctcccggagtcttttgctgaaagcaagggtgtgtatatcctagtggaaaaatctgtttaatcatccctggaaccttgggattctattttgcttttttgcttcatgagagatgaaattgtaaatatcatatcacattaattcaggaccattacagattcttgcttcttttagatacctctctggaagagcttgatattaaaaatttgcctatattaaatatagtttctcaggggtcccagtgaagtctggtttactttctcagttctgtggaattctcactcctcacaacagtggagcaaaatagatgtgtgaagctgacatgatttatgcttctttcacctgcattttttcatagcaaatcgcttgtcttggggttgttaaaattgtgctttaagccctctgagtggcatttggattcctgacacggtgatgtcagcatcccttctaagactgaaactggatctcctggtttaatgggcccttccatgtttgaatggattttctggtcacttttgtagaggcttttcccttcacatctgtatttctccaagaggtagtagagaaacagctgaggctgaggctgtgagagccttgattctggttaaaatgctacatgttggccaaaatggggtctgttcttgatacacttggtgactgctggtagatggaggttctttttgattaagctagttaacagatttcaaagctgatctgtatgtactatagctgtgcgctacaatctataagacactgccatctttcagatgagctggaaggctgcttgcagtcattctgccgtggtttgagtctcatccttctgatgagctctgcgtcctaagtctcctttccatccgggggaaaatgggggtggaataatataaataatgtgcctactacagtgcctggcatatttggtaacgctgtcagtggtggctttaagtattaggcaagattgcatcctctttctttggataaatagcatggtctggttcagacactctattgtgagttgagttgtaacgcctctataccagagtttgcaaactcaaattgcaggaccaagcaggtagcacatgtgaactgaaaggctcccatggggattgtatcaaataagagaacatacttctgtctaaaaagggccgctaactcagggctacctaaaaataatctgacaggtgaaatcagcaatgaaaaagcccagacattagaaaatggagttacctgttcggcagcttttactgaacgaggggagaccattcagtgtggagacctccagtgtgcccacttgcctttgtaccaacttttctctgagcataaatgtaaaggacgtccgttggaaaggaacctttgggatggcttagtccagctactccattataaagaagagaagactggggcctggagaggatgtgtcttgtctgaaccctcacgggtggtagttctgtggaagcctggagcaaaggcctggctctccttgctcctggctcttgctgtgtccatgtgttgaagaagaaagcagcatagctaaaagcgttggtgggcccgggctttggaactctgccagaagagctctttgtgctccaacttggctggtggctttaggagatatgggaggctatagaaatgatgtttggaaccagtgttgtttccacttggtgccctttgctcatctccctattttatgttttcatttgtgtctaagctatgttcttgtctgttatgtctactggatctatggtcaaggcagggaaaactctgaattctcactgtatccccaccgccttgcacagtgcctggcacacaggggcagtggctcaatggatgagatgaagaagtgaattcaaagcccttggctaagggtctaaaaatgtggagtttatgagaagaaacatagaaaatgtttcataaaattccttccacctatacattggctaaaaatatgtgaaggttattttaaaatctgatcacttataactccagttacgttcttatctgacttgaccaatgtagggcatttcattagtggagaaaaaggtacatagctgtgatctggttaggaaatcatgcttttgtgttgattgttctgatgaatcaatggaagtatcttctagccatttctctagatgtttcagccaaagaagtcaggtatatctgtgataggctgtcttaaaattattaaaaaaccaaaaagatagggaaaccagccaagctctgtgtcccatattcctgttagtttccaggaggaggccgtggggttgttttgcttatttcccaaggttgtcaaacacaatgctatctccagcaacattttcagagcaattttggagctgctttgaaagttttattgtgtagagtgaaggtgaactggagtggcaaaacctggtgaggagagaagatgccatcgtgggttcatttattcttctagtcattcatataaaaatcattgattcattcaaaagatgaaacctgctttaatactttaaaaaatatcttatttttaagagtgcttttgtgcccaaaaataacttcttagagttaactaggatttaatatttaatcgaagttttccgttttttatctagattttcttagaaatcacatctataaaacaagtattttgttcataaattaagatcattttcacttgttgtcaattagtactttattcaggcaacagattacacttacctacaaaattagtgctgtttgaaagcttggataattaaattttcttaaatattttagactgcatttgtaaatttaacatacctggtttccttaagctcttcagatgtctgacagggtagatttaccagccaaacaagcaaaatctttctaagcacttaagcaactcttgcaaatcaaataaattagagttacaaatgtcacaaattattttcataaagatttcaattctttttacaaccgtaatccaattcttaaacatttcagcttaaaagtctcaagtaaaaaatcaatagtcatttaaaattgaaatcagaagactgttttgtcagatcctgttatatgctgtgtattcttttaaatgttataaatacatactgattaacccaatgatcacaaagccttaatcttaatattatgatttacttcatcattctttttcatctttttaaacctttcccagatttaaaatcacacactctgaaataagggtagtcggtttatcatctcaggtgggctcagcgccatcatatggtttttctccgactgtttcaggaccaggacacaggaatggtccaatcctcttccaggaatgatggttccagaatcatagctgcgtacactgtagttctttctgctgtgttatcgaggtccccaagccacttctctggaatttcatttcaccacatagtaaacacgaattctctaggttcctttcaagttgctatcttaatcactttttgtaactgctttcaacatttattgcccgatttgggtcagtggacttttgtgcctcatcccaggttgtacctaatttcctttgtcacttgattagattcaaccagtgtccttactgcctgagtgaattctgcatgctttccacatttttcccatctgactctcaaccacatatctggagttattttacaaacaagttacgtttccccattagttagcatgagtatgccaagtgacaaaaagcaaaagaaaggaatttactatttctcatggctggatctcccaggggtgcttctggctttcagtatggctggatgtgggcactcaagcgatgtcaaaggcacacttccatccctctcagctctgcttcccactgtgccagcttccttctcagggaagtgagaatcaagtagccactggcagctctaggctctattgcatttttcttcattttcgctttgtgtgtgtgtgtgtgtgtgtgtgtgtgcttcattcttctcagcgtttcctgtgtagtcacataagtttggggaatgctcctttaggcaaagttatggtgatctttactggacttcacagctgttaaaatgttgatgtactgtttacagtgtgaatctccaacaaggcaggagattccacattcccttcttagggcaacattcttatcacagagcatctggtggaactggttttcctcagaatacatctgcaaactcactgaactaatcttggtggctcctgatcatttgtaccctgaatgggaaaaggacaagttagaactaagtgactttatgtcaagatgaacttgccagtatcccagagacccagaagcaaaggagacatggctggttttccagctgcaggggcagctttggtttctggccacagacagctctggcaaatatcgaggctgcccttgctcattgtggccttccctcgtgtcactgcccttcatccttgtcataagtgtcccccactcccacccatggattagatccctggcttcccctcttctgggtggctcagttacaaaggcttcctgtcaactcagggtaagcacgcagtgctccaggcactgatatgggaagaatcctgtgtatcaagggccacatgcccctccggaatattatgttggtgttgaaaggacatgggggaagaaaggttacaatttcaaagcacaaaatctgggacttggattcatgagcatctgttacaactgctctctttcctccctgccagccacggtcctctcccaccattcccctttcttcttcatcaaattatgagaaattttagatacattaaattcctaaccccaaagagcagatgcaagaaaagacacatgagattttcttttaatcactagaacaaatttgagtccttttccatctgtgacgccatgctttcccaatcagatcctcctgtggttaccagcctaggtgaaacaggcacagaagctgtgaccctgcaaagaatcattgggcagggagctgggcttagaatccactactggtggtgagtttgcagcagaaacttgctctatcttgcctctgcacattgagtttgtcaggaggtatttaaggagcacagactgtgtctttggagatggaaggcacgtggtccaccgaatgaacttgacattgctgcagcattgcccctcagtcctcacggcctcagtttcttcattatgaaacacccttaagagtgactaggagagtatgtgcaaatgttgaatagtttggcatgtggcacaggctcagggaacagccgttgttgctacagaaggcagcatgacacagactagaaggagcacatattttgcaattagacatttgctttttaaacccagttccaacactgaatgacatcggtcagcgtacttattctttcagcctctatttcttcatttgtaaaatgggcaggatgatacctaccttgcaggtatgatatgaggactggagaaacctataacaatatatttaaagtacccagcacaatgcctgatcatgataagcacttagttgttatcgctaagcaggcccctgcatatatttggacgataggacggccctttgtatagagaatagctagaaaactgtgtaagagtgtatagaagcaaatagaaatgtgtgacactatgtaggaatttaaagtaggagatgatgtgggtgggctggagtatttgaagaaagccttaaaggaagaatttggaacaggatggagggctgggcacaagaagtagaattacaggagtgaagtgtgcagagttccagagctgctggacccttgtggattcattcacaataagccccttttgagccctcactctccctgcctcatcctcccaccttgggaccaccctcacattcccctgcatttctgtgcgatgttccaggttgggttttggaagccaaatagtgttgaaggagaaggtgatgaaaacaggtttttagtaagcctttgtcttcctgcctgatcagcagagctcaagatgtacaggcaggtatcttccaagctgctggaatgaactagaactttggggttatgtgtgtgtgtggcagacgttctgttggctttcaaaatctcaaccactcagcatttcccaggttccacgctgccactttgtagggctttcagcaagactgtggaagactgagtggtagaataatgaggttaagtcaatgctttggtatcagacctgccactcctggctgagcggcctttaaccaggctgcctggcctcccaagcctggcgtcctcctgagaaagtgggctgtgtcacatctggtgtgtgctgagaattgacataatacaaaactgtctgcagtcacagtaaagagggtagttggttctggaatcagaatggctcgatcaagatccactctgtctcttcctagccctctgaccttgtacagggtatctatttttttctaagcctcactttctctgcctgtacaatagaaaaacaataatacccttttcccctataggtcaattagagtagtgtcacactgatcttggaattctgctttattgtctacgtgacttctcacttctgtaagtttcgatcagcaagttttttttttgtttttttttttttttttgtttgtttgtttgtttttgagacagagtcttactctgttgcccaggctggagtgcagtggtgtgatctcagctcactgcaacctctgcctcccgggttcaagcaatcatcctgcctcagcttcccaagtagctgggattataggcatgtgccaccacccccggctaatttttgtgtacttttagtagagatggggtttcaccatgttggccaggctggtctcgaactcctgacctcaggtgatccacccgccttggcttcccaaagtgctgggattacaggcatgagccactgtgcccagccctcgattagcaagtatttattgagcacttgctacatatctgctacaccacagcaaacaaatgagtaaatgcaacagggtgacgtgacagagtgtgacaggcttgatggctggtggggtggttttcctgagaaggtaactcttcagctgagatctgaaagatgagaggaggcaggggcaagtgttcagaaagagggacaagcaacagaaagcctcaaagagagcaatcttggcttagaaggaacagaagtgcatgtgatcagagccactcgcaatggagaggggtgcaaaacaggactggggtaggaggcaagctcagagggtcttgaggggccatatagagagtttggactcttaattacctgagaaacaactcaagggtattaagcagtaaagtgacaggatattctgactgctgcgggcggatggaccattagggagcagaagcagaccacagagaccagctggccttttagcagtaatccaggcagcattgaccgcaccatgaactgcagggtggcagtgggggcagagaactgcacatttggatatgttttggaagcaaggtgataggactgggtgctggattaaacgtggtggtggtattggcaggtggggagatggtacaaaagaaaaaagaaagaaagaaccattgctaggagactggacttaggcagcttgggactgacctcattcggttggagggttgggaaatgaagaacatctattttagatgtatttggggatattattagagttagagctgctaaccaagttgacaggtttctcctaactgttgccgctctccctcgctcggcgtttcattccaggagtgaagtctgcagaagtcatacagcagctctgccctctgacccgacaggtgcctgctgcggagtccttccctgcatgcttttagctctagtccccagactcactgcccctactctgccactaggcctgggaaggaacaaattggtttccataaaattctcaggatgaagttgagaatggggtaggacatgggtagtgtctgtagccacccctgctatggaagcacttagtttggggaaggtatctgtcagcctcttcacccagcttccaatcccagacagcaatgattgatgtggagatgagtcacatctgagtcaagagagctttgtccggggcttcatggcacagattggatcttttcggggatggtgtttgtctgtctgtgtcatcagcctgagctggaacagcctgaggttttggtgctcaggatgtgtgtttgtcttggcagctgggacgacagcagctccgtcagcagcggcatcagcgacaccatagacaacctcagcactgatgacatcaacaccagctcctccatcagctcttatgccaacacacctgcctcctctcgaaaaaacctggatgtgcaggtgaggaacacaggccctcccaggctcctccagcagcctctggcagcagggaaccttgggcttgtggggtaagagggccatttggggcaaccagaatctccaggttgatgagatgaggcccagcctcctgccgcctctgctctcacctcctgaccctgacctgtgtccacaagggaggggtcaggcagcggatggtggacacgggagtagggaggcttcaccaccctcactgtgtggacttgatgaaatcactcttcctccctggacctcggtttcataatttgtttaaaaacaaacaacagaaaaggatgtgggactttagcaattttcagcccagagtgtgtgtctcttatttgccgcagcaagccactgctatccaggggcacgtgtctaatccctgtaggaggatggggtggaaataaagattgagaaccctggaccggaaggccgggatgtcctgacctgtggttgagaactctgtctctgggttacattcccctgctgacgtgttttatttggcccacagtgttacccttcttttaaactagattccctgtcaaatttttagaattatattatttcacatgaaaatgtcttcctggttgctcttgagaaaaacaaagatattgcttccttgagcctacattctccatgtggtgacaatcaacagatgtcccagtatccaaccccttagacctgccactcctgctccagtgtgcacagctgctaccctgctggccagctgtactccttaaattacctgcctgaccccaaggcactggagttttccattcctactttaaggcttcagatttcatgtttcaaatgtggtgtagtttcatgtggacacgttcactgaccctcagaccattccttcatgattggcaagggatggttctgaaaggcccattttactagtggaaacgtaaagtgctgtcctcacagcttgtccccagtttgggactgaccagcaccagaactggccagctgtggtggcattggcgtcgtaggctggaatctttttcatgattgatccctcccatttgcaggcgccacccctccccaccccccatctttggcgaacccttggagaaatctgtttgggacaaagtctctcagagcaaccttgcggggaggcagaactagcactgccccgtctttcactcccttccataacctcttcctttctcagcagtgctttacttcatacagataggagctgatttggaaatctattttcttttaaaggtatctcttctttgacaatagggctaaaaaaaaaaaaaaggatgtatcagagtgtgggagtaattctgtcccacagaaatggaaacgtttaatgcctgatgaaatacattaggtgttgcccctgggattcccagttacttcttgtattcttcatttgagccagactttctgattattgttcagaaacccaacctagtgacagtgggtggtggtagttgttttaagaaacaaaaactacccatatgactagaaagggggccatgggtaatgctctgtatgttaatctgagcagtggctatgtaagtatgttaattttctaaaatgtattcaagctatgtacttaagatttgtgtactttactgtacaaaaaccaaacaaacaaaacctaagccacacttcacaagccgatcactgtttcatcagtgattagacgcaagtcagaagtgcccagccaggctatgctcctgccaccaattttcctttccttgtgaacactaatttttttttcctgaggctcattgtatattcaagataagaacaaccagactgtccttagatactaaggaaggaaccaaggaattgctcaccctgcatctacatattcaggaggcaggctattagaggtactgcagagagagagagagagagatccatgaggtttccatttttgacttacaaggtaggagaagcttgctcctgagatgcaggtggagccagtaaaacactgtactggaagaatgtccttgcctttgttcccttcttgcaaagctggaattgaaatctctggttccacattgataaacaactcggatttgtacatgattttctagctgatacagtcgccccagctctttagaccagctctttgctttcatcttgtaaatgtcacatcagaaaaggctgcaggattctgcacaaacatgccttttgatcaagatcagaagttattttaagggatgtaaatggtttactactcattgggtaggttttttttcctataaaactacctgagtttaaaatgttgaaatgaaaactaaaaaaaaagtaggtcttaaagtaaactaaatgcagattacaccaatagttactaagatttctaacgcaatggtttctttaaatggatttttagtgacattccttttgttcctgtccagggagcatctcaaaatatttgaatcagcataattcacaggctcccatcctcctccctcatatcacgctgaggaatgctaagggccattactcctgtctgagcggcatcaggcaatgggaagatgtgcgttgtacccttcccaagagctgcgccttctatgctgtggctcatttgggttcctgtcacatactggtttaccctggaacaggtgggcagcacacagtctgccaggcaaggcgtggggaggcagggagaagtggctcagcatgtccatcaggaaagcaaattgaggacaggttgcctgcctaggtttttgctgtttgaaaagcctctgagaaataactaaagcatctcaggaacagggaagttattgtctggaaaacctaagaaacagcctcgtatagctgattgaaagaagaggagacggatcattgggaatggagattccttttgtctgtgagggactccgctatcactggggacattgaggagcaacggagaatgccccccacagagcacaggtgcccagctgtccagcatcagctcctgtgcccactgtttcctcagggccaggcagagaatcccctgcttgaggcccaagagcctcttgagcaactcctccaggagagctggtgagtccggttggccaagcaaattgaggtgtcagggagtaggtgtggacctggaagccacatgatcttgagttgtgctcctcactctatgacatccttggatgaactaagcactctctccgagcccctgcctcctcatccataacatggcactaattagatgcaccttcaagggtgagtgtgaaagtaacagggaaatgctttatcagcacatgcttccctaggtgcctgagactggatggttcctcagaagttactttctttccttcttccttccctccatttctcttatctctccctcccttcctccctcctctccttcccttcgtcccttcccagcccctgccacctgggttaactgttcctctgcctccagcctccattcatggcagttaactaaaggttgactacgttcttaatatattttgtttgtagtctcaaagcaactcatcttactttgcagtattttattttgaggacagatgttggtggcaaagggctttaacaaacacacgcaactccctcacatattcatctgtacattcagtattttctctcagttctgtggaaggcaccatcccaggtgctgaggagcaaagatgcacacatcaagatttcctctcattttcaatgcctgtgaaatgtttaataacatatgcggaggaaaaagataattccatgtcagtttattttttgctactcagggaaataaaattctgaattatgtggcaaggattcctgtcttgtgtggccttgagtgaccctagagctctctagatgttggcatggatgtagggatggggtttggctgggggtgaggaggggtgcccccttctgctcacccgctgggtaagttacttttcctcttcagccctgtattttcctgatgtgtaaaatgtggataataacacagcctgagaggataagatgagttcaggatgtatgtggagggacacagtgcctggcaggatgactggcaggcgatgatgttgatgcagataattatctccatggtcactggggcttaaacttgagccagctcagcatctagatccgcaagggatatggcacagggagggaatatccctgccttccaaaggcctgtggcccagtggcagaagagacaagtacctgttctcccataatgcaagacaaaggcaggataaatgctaaagatggacaacagagtgctggggattttcagaggcaggaaagttggtaatgaatagaaccactgtttattgagtccccccacactgagttcactgagttcaccatcaatgctgtaagagacctatttatcatccatgttttatacatgagttaataagttcagataagtagggcaatgtcttccaaggtcatgcacagcaaatgagtggcagcaccgaacacttgaacccagatctgtcagacccaaagcccacactcttcccccacatcatgctcctcaggcctcacctcttgctctcagaagactggcctcccttctgaagtcccttgtgcgtggcttctttcctcaccttcccatgtggatatcgaatgactacatagacttccaagaacaggcagaagaaaacccttcagaaaggaggtaccattgagatggaaacaactggccgaggcatggaggggaaggcaggatagaactcttcgtacgtccccatgtggatgtcctgttggctggttccgctgttgcgagctccaggaacagagaggctgggactttctcgttttttaatcccaaggggtgccaccttatagtccggcatgtagctcatgaaggattcagagtagagctgggaaggtgaccaccctggaccaagctagggagatgtgatggctggatgattgttctttccagagagagaaagtcaagccacattcccaggccaggggcatgtgcgctgtctctgccactgatggaaatggagttgtatgggtcccacctagaggctaagctagagctgctctagaactggggttggggagcctgccagtatggaaggagaatctgctgggtatagctattaggtgctactgagtatgcacaaatgtatcatatacctcgacttatccttagggagggcagtgtggcatggtggttaaaatgtgggctctgcagttagactccctgaattccctgcatctctacttcctcactatgtgatcttgggaaattttcttttcactgtttgcctcagttttgtcatgtaaaattgagactattaactgtaatttcctcataggtttttgataaggattaaatttaatgatacatatcaaacactttagcttagtgcctgggacgtagtaagtactcaataaattgtagttgttatgctactagtattagcaccattacagtttgattggggggaaataagtataggaacattaaaagaataaataatgcagtaacccaggatgtggcatgtgctaaattttcagtacctcttagagcatattagaatatgttaaaatgtacttgaatgtaagctccatgaggttaatgatttatacttgttcattgcagtattcctagtgcgaataagctttcctggcacgtagtggcacccaataaatatttgtgaagtgaatgttccaaagccaagttattttctgcctcaggacctttatacatgtggttccctctccctggtatgctctgccccaaactcttcttttactaagtaagtttcttttctttctttagggtacttctttttgaactgatcactgtcgcctacccacctcattgtcatctaaattaggtcaatgtctatatttatttctcagactttttgtctttttccttataatagtcttcgtagtctacaattacacccttgtttgtgtttatttattctatctctgcctgtttcactggatcgtaagctccaccatgggtgggaaatcagtcttatccccagattctctgaccctccgtggtgcctggcagacagcaagcatggagtaaattctggttggatgaatgtactggaagtgtttagaggaaggaaactgacctgaggtagttgggacaaagaatgggcaactttagtttctgtaagattgagataaagataacagtacttgagtacttgtgtacttaccctttctgattaaatagaggctgagatcggataagataattttgctaatgtctgttgtggcctgaaaagcgtgtgttccttggctccttcctaggctcattcattcgctcatcaagctttgagtgagctcctgccctgtgcccacatgtaggaactcccctctctctgtcccttgccacagctgaatgatgagcttctcatagccaggcagtgtgtgtttgtcctcctcatatctctagtgactaatacttagctggaaaaaaacaaatgaaagaactcataaggtgtctgtaatggatgagtggaattcataaggggagaaggggttggggtggtgttggggaggcgattgaacttgggctgcctatctgtttttagcttttatcccattcagccattgtattccatggaggaaggcatttcttccactcttggatgacaggcgttaggcagattcttgccaggtgttcattttaatttcctatcttgcctactctcggtagttaagcattgcaaatatgggactggtatcttagtatacccaccctgaaagcgctcctgacctcccttccccatttaccgtgctgcttctcgctactgacatcctccaactggcctcaaaccccaggaggcctccaaagcattctggtcagctttatgccttttagctgcaggagatcattaacgtcacacttcggtccccttctgggttttatggccagcaggtcagggctcttccaaagaaagctggctaattatatcccttgtcagaacaaaatcccacaaggggagcaaagcagtggcatataaataatgctggggtcggagcaggcatcattggctctccgcatttgggggaagtagcatttgaggatgcgcttcccctcagctcctggctctccctgatttgcgtagaaccagcagccacccttgctcccttgcttggtgtgttagatccaaagatctctctgcggtgcagtgatgggaagaaggcagaacaaagggaaacgggccaggagactggatgctggttagagatcagccgccagagttggaggaggcttgttcaagtggcagaaaataggtggtggctgaattcccactgcatctccatctgctctgccccttcccctcgctagggctctttccttcttttttcctgggccccttttcctctcttccctcactcctttcttttgcttttcttttcttcttttttgagacagtctcgccctgtcatccaggctagagtacagtggtgcggtcacggcttactgcagcctccacctccccggggtgatcctcccacctcaaccacccgagtgggtagaactataggcgtgtgccaccacactcagctaatttttctattttttgtagagatggggttttgccatgatgcccaggctggtcttaaacttgtgggatcaagtgatcctcccgcctcagcctcctaaaatattaggattataggcgtgagccactgtgcccagccatctcgttccattccattccagggatacattgatattatttacttttttatttttttttccaaaaaaaaaaaatcagtctttctaacaagataaccagagtacaaaagtccaaacatctttaaagtaatgcttatttttcccttaactactccagtgttttggcatttttgcctttggagtgaggggcttcccagcctgggactggggaaggactaattcagagagtctctgtccacagactgatgctgagaagcactcacaggtggagaggaattccctgtggtctggtgatgatgtcaagaaatcagacggaggctcagacagcggcataaaaatggagccaggttccaagtggaggcggaatccttctgatgtgtctgacgagtccgacaaaagcacgtcgggcaagaagaatcctgtcatctcccagacaggctcatggcggcgaggcatgacagctcaggtgggcatcaccatgccaaggacgaagccttcagccccggcaggcgcactgaagaccccaggaactggtaagaggccggggctgtcttggccctacagttgacattttgaaaaccaaagccatagttaactctagcaaggacttgacattatatattttgtctcaggatttatactctgctaacaacgagcttccataaactttcacatccctacctttttctaagtggaaataagtaagcatgggagcctcttaagctctgaagatggttcggctgctgagacatactgaattggtttaactagacactgggtgagttaatgcagccagttcaggctattcaacagcatgggtttatgagctgtgggtgtatggtgagttgatgttgtccctgacttagggaatatttataaacaagggcagaggtatcccctggacatgttagggacagcgctttaatggacagagggtgaaagatcaggaaaggcagggggttctttccccccagacatatcagtgattggctggctttgctttatcctgggtaaatttagactgctttgcaaatgagtaaaattattgacatttcctaaaaggctcacggtacattagtagactatattatttttataaaaagctctttcctctgcctccccaagggaaaagtgaaccagctcttcagaggaggagagcatcttaaacagacgagatggatgagctggctcttggcttgcaggctaatcttgctgatctctctcttaggaaaaacagacgacgcaaaggtgtctgagaaaggaaggctttctcctaaagcctcccaggtgaagcgctccccatcagatgcaggccggagcagtggtgacgaatccaaaaagcccctccccagcagctctaggacacctactgccaatgccaacagctttgggttcaagaagcagagtggttccgccgccggcctggccatgatcacagccagcggggtgactgtcaccagcaggtcagccacactgggcaaaatcccaaagtcatctgcactcgtcagtcggtctgctggtcggaagtcaagtatggatggggctcagaatcaggatgacgggtatctagccctaagctcccggacaaaccttcagtaccggagtttgccgaggcccagtaagtccaacagccggaacggggctgggaacaggtctagcaccagcagcatagattccaacattagcagcaagtccgcaggcctgccagtgcccaaactgagggagccttccaaaacagccctaggcagctctctaccaggtctggtcaaccaaacagacaaggagaaaggcatctcatcagacaacgagagtgtggcttcctgtaactcggtgaaagtgaatccggcagcccagcctgtgtccagtccggctcagaccagtctccagcctggagccaagtacccagatgtggcctctcccacactccgcaggtaagtgagtacataaatggtgcagagcagaaccagaatacagggaatggatttagtaatttcctgtttcttagttgaagcaccctctgtttttctccactttagtcctccagtaaagctgttttgtcagatcaggccggcagttttgcagttgactattttcccatgttgggatgaaaaacttaggcctctggaatcaatcatcttagaatcaaatcttaggtccattttaattagctgccatataaccttttttaacaattctgccttagtttcctcacctgtaaaatggggatgaagatacttttttgtcagggtttttgtaaagatacatctttgtagctgtgtctggtcgtagtatgcactcaatagaagttagctactgctgggcaccgtggctcacgcctgtaatcccagcactttgggaggccaaggcgggcagatcacgaggtcaggagttcgagaccagcctggccaatatggtgaaaccccgtctctactaaaaatacaaaaaaattagcctggcatggtggtatgcacctgtagtcccagctactcaggaagctgaggcagaagaatcacttgaacccaggaggcggaggttgcagtgagccaagatcacaccactgcactccagcctgggcaacagagcgagactccatctcaaaaaaaaaaaaaaaagaagttagctaccatccaatccagaatgaggtcttgatacacccttggacctaggtgggtagctcaggggagcagatacatttttttcttgtgttaataattcttcagctgagcttcctcattatggcaggcagtgatcttgaccagctccttcctttactcaaaaagcccagtgtccccacatatacttttacgctactccggaattccaagtcagtctgaaattttaacttccccctccccatcacacacacacacacacacacacacacaaacctcttaaagaagaaatatttctgaaaaagagaagttgatttcctgttaccttaaatagacatcatttccccacattttcacactgggtggaagctctagatataaacaaattattcacttgtttaaagtttcttttaaatttattcagcttttgcctgttcgtattatcttattataatatccactggaccattctcaaactgcaactgctaggttacagttcatcctactttcccaggaaatttcttatcataagaaagaataagtcccaagaaaagaaaatcaagcagtgagaaaataaaaattatatgcacatgtacatatctggggatgaacaggaatgtttgaaaagacttcagaagaagcattccacatgaaaggtataatgaagcagttcactgttctttgtccagacttgattattagaatttcagtaacgatttttttttccaggggtaagtctgttgtgctgctctttgttgttttaacagattgccttgtaaatgaaaatgttctctgtttcttgcctcaagtattatatgtaatattcactctttggtattatagatttcctttactaactacaaaggcattttactagacccttaggctagtgtaatggaatgcttgaaaatgcatgcagctcctacggctctacattgaacaccttttagccaattcctggtaaattacatttcttcctaaatcgttaaggtattcttagttctcttgatgtgtattagtatggtgaagaaaaatctttggtgaatttgatagataactctcttcaaatgatttcaaggactaacagaccaaagattagacttttgtatgtagtcatgcatagcagaatgaggagcaatatgcaaaagtcagaaaaaaaagtggatgagatttgggtttcctaataattggaagtgcttggcaatggaacaagttaccctttgaagtaacgaggtccctgtcatcactggaagtatgtaagcattctaaagccaagattctacattaggatatttcattccctgttgtcaccaggcacaaagtgtttcctttctgccaccacccactgtagtaaggattgattgattgattgtctttacaatacttgagatttataggactgtctagagagggcagagatcaaactgtcacgactttgagcacccaaggccacctgcatgtcagaaatacatagtagttttgtcacttgtgagatacttactcaacacaggtttcagtgagtgtaatagagcctttgcattactagaatgtggacaattctctgacttaaagataatttcaacattctaccagagagttctctgccagtggaagagggggcatttatgtcattccttgtagtctgatggcacatttttggccacgagcaggggagatgacatagaatagcatttctgtgtgtctgtcacagagacacagttcccacccagtgtgtctggtctaatgtcttgtgaaccaagcaagatttccatgtatgtcactggataagtaagctctctggcttcaaaagatacatctttccagttgcgttttctattgtggataaatctctgaagacatttttcctaggccccctccagatctaaattcatgctcttgattctatgtattgtgctcagaggtcaagaaaccaaatcccttagagttgagctgtcataaactgtgtgcctgctttatgcctggggccgcagagacagagatgatgaagacaaccatcttcctgggccagggcagttttctagttagtctatctattgaaagaaagggaagcaagatcttggcccagtgtcatgtgaataggcctgtagaaaattattactcatggctctttggctcagatggagtcagagtctcagctgcagcttagaatttgaagacggcagcctgtgatgcactagtgtctaggcccactttatggctgacctttccctgaagtaccgttagccatttcagtaggaatggctgtgcttccttccccaggaattctcaccaactcctctgccctacccttctttaacagtccggtgccccttggcactgggtgttcaacctacacaaccctttgtctcttcacagactctttggtgggaagcctaccaagcaagtgcccatcgccacagctgaaaacatgaaaaattcggtggtcatctccaatcctcatgccaccatgactcagcaaggtaacctagactccccgtcaggcagtggcgtcctgagcagtgggagcagcagtcctctctacagcaagaatgtggacctcaaccagtctccgctagcctccagccccagctcagcccactcggccccttccaacagcctcacctggggcaccaacgccagcagctcctccgcagttagcaaggatggcctgggctttcagtctgtcagcagcctccacaccagctgtgagtccatcgacatctccctcagcagtggaggggtccccagccacaattcttccactggcctcatcgcctcctccaaggacgactccttgactccctttgtcagaactaacagtgtgaagaccacactgtcagaaaggttggtgctgtgcctctggctgcctttctcagaaagacacccttccaaaaataaaaagattagcttaggaatcccaaatgtcgaatagcctttgcctgtaagatttctctctttctaattactgctgtctttcatggggaagccacttcaggatggaatcaagcttggctctgctccctgttatcttttcctctgtggttatttttggtgcttggagctgctcagtctctcgggggcagatttatgctaccatttgaaatggcattcagcttttgaaatccttcagttttatcctgtttgttcatcaacagcttcttttccctccccttgtaattgtgcaagcagagcaggtgactgggtgcagacatggagtgtttagtaggatgctctttagacagctgggtaggtttgttgtcattgtggcaaacaccctcctcctggactgataggaaatcaagaaattaaaagtgttctcagagccctggatttctctgcagcagggataaatgtgtccagtttctgcatatagggaagaaagcgaggatcagcatggggaatgaaaaaaatgtatataacaacacctctcctttcttccaagctaacgttccttctcttgttttctacctgcctggacttctagccctctctcttcccctgctgctagccctaagttctgcagaagtactctgcccaggaaacaggacaggtaatgacattgcaggccggggaccaaccgagcctctaggttcttctgcccattcgttgtcaagccagatgtcttgtgcgaggctgttggcctaagccacctgcttgtgtttgtggctctagtgtactctgtgacacatggacatgccagtgagagtctgttcctctgtctgctaaagcccagggagaggtggagttgggctggcctcttcattcccattttgggaaggcgaccttaaaccctgccacttgatctggggcagcggaagctctcgcttgcatctcttgtggcctcctgtggcatgttcctgcttttcagcttccttcccattccttttgccacccccaaccccaagcccagaaatgacctgccacccactgtgtagcttggccctcacctttgtctacccctccccatgcagctgcctcttctccctttcaaaatcctttgctgaagtttggctcattatgtcttgcagactgttgtgttctgtgtgcccatttcctgcgatgataatgaaaaagaatgtgtagagtattaagactttacaaatgtacacgcttgtgtttgcccccagctgtaggtgggcctcagagatggatactgtccttaattttgtgggggagtgatgacctggccaaacataacaaacagatgttgtctcctgccagaaaaaaaaaaaaaaaaaaaccttcaccccatcaacagtgaaaactttgtttttgtcagctcacaaaccaagcctttaaaccgttggtctttagaaatccaagtgctttgacttcatcagccagcaagttgtaacatgccccacccaggactcagctcctagctatgcctgggccgcagaaattgagagggacctggaattcacttcgttacagatgaattccaaatatgcagactgctggcctcttgaaacctccaacaagtctgttctcccatttgaagtcattgccagtggcatttagggggtgggccagagttaggggtgcagggaagtgggcatccctctctctgagaagccgtgttggtgcagagagtgcccctgggcagtagaaggcacaggacctctgctttgaggtggagcaacccctgaattttgctttgaatctgtggaaaacgaggaacaattggggttaagggactcaggcctcctggtgacctggggtaaagtatgcgctggtgtcagctcaggctgaggattgggtttcttttgttttccacggatgtggatgtgttgcattgcacgcctagctggataaggcacttcctggtgatgtgcacctctttctccagggcccttcagtcccctccctagctttccctctctctgccttctgtgtgctgctctgaagttcttatttttgttttaactttcctacagtgacccgcaccttgataggaacactttgcctaagaaaggactcaggtatctgtgtttcctccttgcatctgtgccatctgttgtggctttggagcttggctgtgtgactccttcatggctggtgggggtttgggctgggctggggtccccgctttgaccaccacagcaggaccttttggatgacggctccccttgcaccctctcgttctcactctccatttgtcagcttatttgcttgagcaggggctgtgctttttcaggcttaatgtggtaaaaccatctcatgaaaaacatccctgggcaagcccaaggagcagtcattactgcttctggggccaatgggtttaatttctgagcacttcaccatgaccattctgttaacatggctgtcttccaagagaaaggacatgacttatagcatactgatttgtaagctaggacaagagcacaggaggcaaggaatattttcccccaatttgaaaatatttaacttttctgcccataaaaaattgctagacagatactttgcccttgtctaaatattctaatggaaaattggtccactttcattgcccaacaagacatgggtgtgatcattttttggtggataataaagaaaagactcccaggaaggactgtccttccattcctggtaagtggtggctcaggttcgtttttggtgctagtcctggcaaaacaagatgctataagtcaccattgctcacaccatctatatcactttgccaatcagagaaaattcagtttgctaatgcctcccctgtgatcttgctgtcttatggttgcagccgtcatttcttctgctttctaaacaccacatgccctgtagcatcagcttcaccctgcactaagcattaagtgctttcgcataaaatgggacttggaatgaaatgtttcattgctgtcatgtatgtctatagttaataacctgcagctcttaagactgagagcattttgaacagtaatgtgaggtaggtatcaatgcttcctttcaatgggatcctctgagtaaagccagttctaagaatctaagaaggaaagtattaaaatctcccaacagtcatcctgcaggaagttgttgagcagtgtggccttagagggggccttggcaaggccttttgtacttaccagtttcaatcgtgcctatgagctgcttgtcagcaaccatgccagatgcttaaatcatggccactctcactgtgagtttgactttgatgccccactggtgccctgagagaaagctaacttctaaatgttaacattgtgaaatggtgtgtatacttctgtagcagatctagcctatcaaaattatgtagctctggttttttaaaaattcagaatagagatacatgacaggctattttcaggcaattgatgtgtcctggaaagttgcatgtctgtcagatatagtaaaaacattaaggagaaaacatttctgtgctccctctcactctgattcttcctgtgtagctcacccactccatacacatgaacatccagtacgaacacactgacaacatctttccttaagcccaaagaatccccctattgacataatcagtagtcactccataatatataagtccgaggataccctggccacttggcactcagaaatttcagatgcaggccaggtgcggtggctcatgcctgtaatcctagcactttgggaggctgaggtaggtggatcacttgagggcgggagttcaagaccagcctggccaacatggtaaaaccctgtctctactaaaaatacaaaaaattagctgggcatggtggcacatgcctatagtcccagctactcgggaggctgaggtgggagaatcacttgaacccaagagacagtggttgcagtgagccgagatcatgccacctttctccggcctgggcagtagagcaagactacgtctcgaaaaaaaaaaaaaaaaaaaaaaaaaggaaagaaatttcacacgctacttatgggcataatgaaaagaacatgcattttaaaatcaaacatggattgaaatctcaactctgtgactaccagcagggttcttaccttccctgaatgtaaaataggaataatggcatctgcattgctgagtaggtctgaggctttggtaagataatgcacatgaaggcacctagcacattgcagatgttcaataaatcatcaccatatacatttcagaataaatgaggtggtggaccacataacttctgaagaccctctcctataaaactcaacaatttggggttgcttttatgaagatttgtttgtgctctattacagcaactactataagcatcagtgtcctcaaaccttgctttgtatgtctgctttttcatatgctgtgattcatggtcatttatttgtgttgtagaatggcagatgccatgagttgtctaattaaaactccctcaaagctctaacagcagctcattttgttgcttcagtcctgtcaaggtgggggctttgacgtgacactgtcatgaagcaacatgttacagatacgcccagtgacggctcttctgagcatttaccaatcttcttccctttatgtgttccctccaaactgaaagggagtagtcattttccccaaacacagccaaatagaaaaaaggttttgagaaacttcataagtttcaggacgtgtagtgatctgattttaaaaaaaatcatcttcggatatatgttttctttttatatatttaccatcagctccacagagttcattttaataagcattgttcatagttaattccggcttgatttctgtctgtccaggtatactcccacctcccagcttcgcacgcaagaagatgcaaaagaatggttacggtcccattctgcaggaggccttcaggacaccgctgccaattcccccttttcctctggctccagcgtgacttctccctccggaacaagattcaacttttcccagcttggtgagtagccacttgtcattacctatgttgatcagctccacagggcagtggttatcttatatacataacatatttttatttcaatagtttttggggagcaggtggttttggttacatgggtaagttctttagtggtgatttctgagattttggtgcacccatcacttgagttatcttacattttgaaatagacatatagtcacatcccgctcagtgtctgattagccctcggcaatatagatcgattacaggggattgacagaaaaataaatagagaaaatagtaaagtttttgatactgtaatcaataattttctttatttggttgatattggtagggctatagcaaagaacatgttatcccattcttaaaaagaatgcattctttttctaagacctctgaagaaatagattttatcgcatatcccatgttaggtcatcctcattgctttattaagttggaaataaaagttaagttttgattgaataggtattcttaacaatgcctacttctgacataatgctttgactggcacagtggggaaaggaaaagaatttgtgtcacagtccctgctgacatgtcaatggaattctttttcaggaagacaaacacatcaatgcacacctatataatagagtaaaagagaacaatccagagctttatatgaaatcatgtaaaagctgaatataattagatagcaagcattagacacatttagaaaaaggaaagattagtgctggctgaagttataggcagaggttatgtgaaggtggcagagtaggagctgagccttgaaggactgatagagggtgagaaatcttttctaatctcatctcactctttagagaggcaggcttttctgaatatagtgaataacaaattcagagtctttaaggatagaggtggcttgtaatcaagtgaggtttaacacttcatttctgattgactaaatgagtacctctgaaaatattgcacatgactcaaatggacaggattttcataagaaagctagttttagctgagacaaatgtaccttccttgcattgaaactctttatataccattattaaatgtcccccatctgaggcaatgggatctgtgttcatactgttctttcccagccataactctttgaggcaagagattcttgtcatgcacaaatgcttcccatctgatcaaaagcctgattggactattttgggcttttggctttagagaaaatcattccagatgagcctggggagtaattagctcatgcctggaaggtgatactggcctgtctgaacgtgccaagttggaaagctgaggcccagagccttgctttggagctgacctgcctttttactcttatttttagctcccggtgtgtaactcaaatgctgatgggactaccttttagaaaacagatgggagaagagttggcagaaacacatgtggctaaaaataagcagtcttctctttgtccccaaccaggatttgaacagagacatgaatgtctaaccttttgattctattccttttattccagcgagtcccaccactgtcacccagatgagcttgtccaacccgaccatgctgaggactcacagcctctccaatgctgatgggcagtatgatccatacactgacagccgcttccggaatagctccatgtccctggatgagaagagcagaaccatgagccgttcaggctcattccgggatgggtttgaagaaggtaaggaaggaaaggaagaaggtaaggaaggaaacttccatctcccaggttactcagtgtagttaagggtcctctatgctaagttcacttccttaacctgagagcccacctataagtgctcccacctctcccacctactctgggggtcaggggtggggatctctgaagagtaaggtctggcctgacccttaattaaccttccaggcctttgaggaagaggctgcttaaaaatcactggtgaaccatagagctgactgaggtccgctttaggcttctccctcctggacttgggccacagcttcttggcatgcgcctccaccttgaggctcagccaccggctcaccatcttggcagagagaactactggagagttcatttccctgtgctgacatgcccctgtagctctgggggccgggcagccacgcctttctgctctgctccagaatttttcatctcctttctcaagcactgggtttttaagtgtattgttttcagttatgcccttttctttctttggttgctaactgagaatatttggggttggatttttatgtttggttcattttaatcagaatcatgggagaaaagttctgtggacaactttgtcagccgtcttcacagctcacttcatttctctcttcctttgttccatcacgcaaggtatgagttaggtgagtaagcagtcaaaattctgtggaggatatcatccccaccccatgaagatggggctgatgggacattggcggcaatgctcattaaccaatgataagaataggagtcagactagcagagtttaaattccagctccactgctttttaggtatatgattttgatcaagttgcttcacctctctgtgcctctgttttttcatggataaaataggagtaataatagtattcagctcatggaattatgagaattaaatgagataatacatataaatgttaacacaataatgttattacatgtcatggcctgtaataacacagccgtaaagctctaataacatagctgtaaaaacacagcttcagcattgacttcctggcagctcaaagtccccagccagagagtggggaatcttggagcaaacggagcctagtctgaggactatacatctggttgtccctttgttgccattgaaaaagcagaatgtggagggtgagttataggtgcttcccggtccccatatgagtagggaaaaagggccagcatcctcccagcatgaaagaacaaacaaatttgtgattgtttaggaagtttcaagtcaaaagggagagaaacacaaggcacaggattctgcttttgcctagtgttctttttaacagaagttttaaagaatgtatttacagagcaattgccccctggtttattttcttggtaacttaatactttgcaccctgatttatgtatcatttgcataccatgacattcagtgaacaggcacaagtctgtaaatccatatatgggaagctgctgggaccaaggattaaggaggggagaagcctgagtcactgaggggcatttgtgagatttaagagctagaaattaatgctataactgctcagaacagtgatagtagagaatatattgtgatcctaaggtgaaggaagtggcagtttgtcttgaacttctttctagtcagtgtactggccaagcatcgccacagagcatttcccaacctccccgggaaggatttgcatatggagtttgtcccgcactgtattcctcttctctgccatgtgtcttcctgagtgaaccacgtccagtactgaaacttgtccaaacaagcacacttcgcctcataaaggtccaggaccattacagtatcgtcatcagatagcttttatttattccatctggaatcaagctggcagacagcacaactgtggaatatctgggatgtcaaaatgacattgataaaaagtgcttgcccacaagcagtgtctagacttttgtaaacctaatgattcatggtgacatggaactgaagcacagaggtaaaagtcaaactttaggggaatggatagggaccgctgtcaatacactgtgaatacataacattatcatcttttggaaaatatggcatcagattgattttatttcttctaaggttattacattcaaaaataaaatagagtttgtgtaattaggtttttaattcctttcgttgaaattcctttttttgaatttattaactcccagtattgcaggagcagttggaagaaaattgacatttcatgtttggaccaaacagaacctccttgtaataatcagttaggtgtattatacgccataaagcagaatagaaatttaggaagaagtagcacaagtatttgtgtgaggtttttgtgcaatttaattagctctttccactttgaaggagttttaggaattataaatatgtagattaggtacaggcatggccagatgcagcctttcaaaggtgtttcaggtaaattactttctatcagatgcattatgcgatcttaaagtcaactttaatagcgtacatttaaggggatgcttgaagcattattaaaatggattctagagaaaaaaaaatcccatgacttcaccaatcatcactaagagctaatgcagtgaaaaacacagaaaccctccaccctatcaatttatatggaatccccaggagcacagaagcttattaatcaagaaagcttgtattgcagcatgcttgtgtatctaggccctgaattgctgaagtggttcaaatcctggcacctctactgttagcagtgtgattctgagaaaggacttgacctgctcagcctgtttcctattcactgaaatgtgaaaaataattgtacctgctttggaaaattgaagtgaagattaggtgagatgaatcttggaaagcatttaacaaataactttgaaaggggagtattgtaagtgctcactcaatggtagctattgttataattgtcatattatagccttctccccaagggccattatcatcctcatttttttaatggccaaattgaggcaaaagtgacttgaagactttatgcagccacaatgatgtcttaagcttcttgattccagtccctctttcttttcactcaatcctaccttgatatctgactcagttgggttttttttttttaaacctgtctgaggcaagctctgatctttcatcaatgtcttctctgttttgtgatgcttcctttgctggtggagaggcagggcagtccattagccatcagcactgcatttcattcttctgactctttccacagtacccaattgtggaatgagaagtagatcgtgatgcctagatccacattctctttctgctcctgactagctgtgtgtctggccacgtcacttaaccattctgagatgtaatgtactctgttgttgattaacggtggaaactcctgcctagtctgggattgttacctgcagattctctgtgatgagggtcagaggcacttgattgctttattggctggaatatgcctagttgtttcattctatctagtgttttcactcctactaaagcatctttcttctcaaacattcctaggttgtgcccatgtgttgactgaatgaagggactaggacaccattctaaaagacaccaaaaggctctttaaaaaaaaacaaacaaatgaaaaaagaatcagaaaccagtacaacagattactcaaaggcagagcgatctccggacttctagtcagcagatcctgttcttgaattgctgtgtgaccttaaacaagtcatttcacctctccgagtttcagatttctcaatggcagaagtggcctagatattctctatggttccttgtagctgaaaaaatgtgaggtatagctatagggaggaaaaatatgtagcctgctttagctgtttagcttctgtaactcccacaggcattttgttgtccaaaaataaccacattgcacaacctaggctctgacctggctcaattcccttgaaggaggccgaactgcaatggttcaggtaaaacacattcagttttgggttgactcagaaaatcaaggatctgtctctttggaacacagccttgctgttgctatttacaaagtgagaggagttaattattgagaaaaataattacctctaccttaagcctgccagatgtgctcttctctgcctgtggccccatgcttgtaccgagttgttgctaaaactgtgtcagtaaatgtatgtatatgagatgtagaaatagaaaagaaaaaacttccattttccattagccacaggccatatagcagccctgtgctagtctctggcaggccagtcatgcaagtgtgtgtggctatgtgttacacacatctcttcacccagcttggcctccaacataattcctccactattgtctgtgtcgtaagctgaattaacttacctctgtggaacattaggccacaaagttgggacattaaaggcctctgttaatgtgtggacatattaacactgaaagccattattggccattaacaccttaacctgattttttatgggcatgagtcagattagtcatggatgaagaaagcacggaggaaaagatctagaacgcagggcattgctaaggagggtggatgtacatgctgatatagggacagcttagagcattagggagctgctaagagagaagagggctggaatagcaagccaagagttacgtgggctcagagggaggaggaagccctcccaggtggcagtctgcgaaatgaggaaaggtcccatagagaagatgtcatttgagcagatctgttttgatagacagtatttagatgcagcctaaacgaagagaactgcatgggcagagactctgaggcaggaaagtactgtctagggcaagcttgggagagcagtgcagaattcatagtgtaacaagaacatataagggaagaaggagaggtcagggaaggtttattggaaagatgacagagaggaacctgagtgttaggctgagctacttatcagctatcttgttggcatatagcttctgctgactgctaatccaaggtgagttcacttcgtgggtggtagatgaatgccatttagtacacgtggaagttaccccagtgcctcccactttagactacaggtcataactcggtgtgggagtagagccattccacccatggccaggaaagctgtgcccagttacaagtcctgtgacgccttaacataggaatagttctgtttttcaaacaagttgtcgagaagttaccaagaaaataaagaaccttcttcccacagaagaaggcagccagaatacccaagtcctagaaaacactatattgcaaaattagaacaaataataagatgtcttggccgggcgcggtggctcatgactgtaatcccagcactttgggaggccaagctgggtggatcacctgagactgggagttcgagagcagcctgactaacgtggagaaaccccatctctactaaaaatacaaaactagccaggcatggtggcgcacgcctataatcccagctactcaggaggctgaagcagaagaatcacttgaacttgggaggcagaggttgtggtgagctgagatcgtgccattgcgctccagcctgggcaacagagtgaaactccatctcaaaaaaaaaaaaaaaaagatgtctccactggctgggggcaggaagggtgctaaggacatataagtggttctagtccaaaagtatcagtttgaaacagaaaagaagacaccacttgctcatcactttgtagacatgatagaaatcaaataaagaatctatattttgatggatatgttttctaaacaaatattctgctatatggtcatctagaatgaacttactgtggccaacagcctcttaggttaaaaataatcagctctttttttgcatatacaactgacagatgccaacagggtaaaaaactgtatttggaacacagtcttaaccctaaaggaatacattagaaaaaagagtgaagcgaaatatgctggaacagtaacaggttgcctccgggcaatgcaattgtgagtcagtgcaggttgtgacagtgaatatgcttcttaacacttctccgtacttgaacatttttgttcagtaatcatatattattttgacagtcaagagaaaaagtattcagaaggttgaagggaaaaatgcggtaatagaaaagtgacatccttagcaaactattacttatttgtcactgacctatcgccaaaccaggaaaggttgtgtcaaggtgagattaagtcattccaagcctggagtgtcctgtattgctgatgttctcctcccctgtcccctttttggttccataacagccatctatcaattcaccttttttttttcttttaatagttcatggatcctcactctccttggtttccagcacatcgtcagtttattctacagtgagtataaatcaatgctgtgtggctgtgatcatgagaactggggttcctttatcaaatgtgtcaagaataaaatatatgcatttatcctagggaaagcatttccattataaggggatcaattaattagggaacaagatttaaaattcacaaacagctattaattatattataccaaccccaaaatccagaactggctgccttgttaaagtggcattgtgctttaggtgataactatttagaatgtgtgagaagccttggccacctgctgatggacttggaaaataaaggccttgagcaatttattaatcctttgtctgcctcagtttctttctttctttctttttttatttgagacggagtctccctctgttgcccaggctggaatgcagtggcttgatctcggctcactgcaacctccgcctcctgggctcaggtgattctcctgcctcagcttcctgagtagctgggactataggcatgtgccaccacgcccagctaatttttgtatttttagtagagacagagtttcaccatattggccaggctggtctcaaactcctgaccttgtgatccacccacctcggcctcccaaagtgctggcattacaggcgtgagccatggtgcccgaacagcctcagtttctttatctgtaaagtagaaataatagcagttcctaccttatagaggtgtaatgaggattaaatgttataaagattacatttcactacaatataaactctttctagacaaggacatttttgtttttattcctagtgcctagaacagtacctagcacgtagtaggtattttttaagtaggtttgaaagaaatgggaaaatgaatctaaaacaatgaatatagtacacacagctcagagcaagcactcctaaatgctagctatcatccatgagagaggtttagtaaacgaaagccaaatgtaatcaaatacatttagatcttcagtactactggatttgttcagtagtatttactttttatagctgtacactatttattttattttattttagacagactctcgctctgtcgcccaggctggagtaaagtggcacgaccttggctcactgcaacctctgcctcctgggttcaagcaattctcctgcctcagcctcctgagtagctgggattacaggcaggcaccaccatgcctggctaatttttttacatttttagtagagacgggatttcaccatgttggccaggctgttcttgaactcctgacctcaagtgatccgcccatctcagcctcccgaagtgttgggattacaggcgtgagccaccgcgcatggctatagctgtatgctatttactttaaaaacagtaatttgggaatttctacagggaaaaaaaaagtctctttgttaattgtgaattggaaattctttagcccttaatcccatggaaacaaatgttttaataatttaggttttgataatgcctggtttctatatagcagaatacactgtgtatagctcctggaaaataagaggacaccccagaatcaagttaaagataccagggcctaacttaggcctgtattgagcaaacaaacttcagtgattgctgatatggtctgttttgaaggacctagaaacccttgcttctacccacctcacccctccaactctaaaattcctctttcctcagctagtcatcttgtttgaaatttcatcactaagtcctagctttccttttaaaggctttatatagagtaaccttggagagaggttttttaagccatcatctgctaagaaagcatagagatggtctttcagctgtcagccagtagataaactatgtcctttcttctagaatgaaactgtgggatatgggtaccaaggctggtactttcaaacctaaatgcacttcttcaacagtatttactagcaccatggatataccaggctctggactaacccctaggatataatttaggagagaaaggagcctgctactgacggaggaagctgtaggcaccagagggacatgggactctagcttcacaggactggcacagagaagctgtagtggatgtttcagtgcccagccccgtgttttccctgtggcattcccaagggttcttgccaacacagaggggagtgggttttccagaagagtaaaaaaatgggagactggccagcattatgcagacttggagggaaagagcttaagcttctcaacctgtgtgtcttcagatctaggaaactgtcacatgcagttcctgggggcagccccttcatgccaaccactagaagtccttacagtaaaagactctccttcagtagctgttgttctgggtatggggacgtgaagatactgttttcatgaaatttgaaattgtcttttctgagctaatataaattcaatgaattagtaaagacctaataataatacttttgaattccatttttatctggataacaagagacccgaggtgtaatcatagcgttcttctcaccatatgactttggacaagtcatctggttattcagagtgtctccccagttttgcccttggcatcaggaaaccaagcaaggtgatcttctgaggcccctacaatctctgacattccatgagtcatggagtcaaaggctcccatttactgtcctcagtatgccttctctgagaatataggttgcttttgcagacttaaaaaaaaatagcctatcagtggaatgtttttatgctggtgctgtctactaatttcaagaaaaactacaagtctggctagactctgctaccgcctagcactgaggtgtggtcctttatctgttattacattcttcgtgataatgaaattctgaaacacatgctccaggcacctttgtaaatgttaaggtgaataaagtatttgtttgttgtctgaaaagagatctttgaaatgttaagttgccacagacccagaccaaggagcctgctgagagttttaaaggctcttattggatgacagtagattctttccttgaaatgtctataatgaatattcaagaatgctcattctgcatgaaatttgcaattttaattatcagtgaaagaaaagattacacagtgctaaatgattgccatggaaaagttatggctacctcttggagtagagaaaatctcaaaggccacttctggcattagacttgctttcttgtttggtagggaacactggagttcccaggagagctgctggatggatggaggctagcagcttcacatagtgttaccagatgtgcagaacagcggcaaggggggcaagatacaaagcacatgctttctctaggctgctgttgataattggggcccaaccccagagacaggtgggcacagtgacagacagtggcagaggcatggggaagggctgttagggcctgtcgatagaagtgtttcaaagtagccttgtcctatgtggatggctaagcctgctaacaggcctccgccagccttctaaatgttagatagtggttacattctcaccattaacttgtaccctttggattgaacttggggcttatttctggaaagcccccgtgagaatgtaactatagtaaaagtgcaggagaatatgcctaggctctggagccagactactttagatccagtcccaactctgccacttaccagctgtgaccctggacaaatgactgaaccttcctgtgcctcagtttcctcatacacaaaacagaaagcaatagtattagtacctcctcaaagagttgttaaaaggattagatgaataatgaatgtaaagtgcttggaacagtctctggcacatggtaagcattcaataaatgctagctgttattaccagaatgcaggcaacacaaggtcagggacttggtcatgttcacggctctatcttaggttcttaaaaatagtgcctggcacacagtaggaaatcagtaagtatttgataggtggtggtagtgaggatagatggacagacaaagacaaatgaatattatctgggagggaagattgagctctgaagacatcttccaaccttctcctgaaagcatttcttagataaggaggttgttcagtgtgactttatacaagacatttaacgtctctgaacctcagaaggaatacaaacaaacctacctaatggagtttctgcaaggattaaatgacttggctccgtgtatttaaaaattggttgctgctagtaggagccaacctagaggaggggacttgtgggcaggatcaggagggaggacaatggggagcataggttgaaggcggatcagacaggaagcagctgcctacctattccagctgatggatgtgccctgcgagttctaatgaatcatacccactttgtattgtgaactaatggagatgctgacatcagggtcagatgctgatttttaaaaaataatgggcttatgcctagtaaaattggattaggacacctagcgaggacccaaggacaaaatagagttcttactgatgttcactcacctatctggttcccaagtcactcttccctccctgggtacagcgatgggtagagagaaggtcaggaacactcaacatttccaggaaggaggagggttcctctttatgagcccctgtgggaaccagaggagagggaaagaaaggttcctcctgcagcaggctccccaattcatgtgggctccccctgtgggaggagagagggtcttatagtttctggctagcaggtacctgtgtcacctagacacagagccagcatgtaagggacaaagagggaagccagtaagaggggcagcagagttcacgattacttcacagggtcacaggtaattggggtccttgaaatgggacagcacgaagatgaaggccacatttatcctcacaacctgtggagttaccaggctggctgataggggctcccaaacccccctcactttgagatctttctaccctggtgctcccactgtggtgtcctagggaagtgagaggagggcagaaaatggggcagaattaacccaggagcagtcttccttgctccctagacagggttgccagagaaaatactaaaccctcaattaaatgtgaaatttagattaacaacaaaattttttttagtataaatatgtccctaatattgcatgggacatattagaccctttattttattttttgagacgggtagcctctgttgcccaggctagagtgcagtggtgtgatctcagctcactgcaatctccacctcctgggttcaagccattctcctgcctcagcctcccaagtagctgggattatgggtgcatgccatcacacccggctaattttttttttttttttttgtatttttagtagagatgggtttcaccatgttggccaggctggtcttcaactcctgacctcaagtggtccaccaacctcagcctcccaaagtactgggatgtcaggcatgagctaccatgcccagtcctagacctttttgttttttttaaagctattcaaatttaactaggcctcctgtatttttgtttactaaatctgactcatggccttcttatcacatatcttcttctgagcactttacctatcaccatccccgcctggggagcagggtggctcctcacaaccaaaatgtggagtggtgttctcattcttcctaatttttaaaaatcataagccgtttgtatttggcctttctgatgggtcaatttaattgaaccagtttttccagagaaatacaccagaaaagaaactaataattcttccagactgctgcaaccatctgaatatggtgttcccgatgggctggactacactattctttgttccttaactggtctaatttcctttatgttttctttacagccagaagaaaaatgccagtcagaggtaaggaacagctttctggttggatttcctctttaagtattgtcaattatttgaccctgctcaccttggaaatggacccccaaagcatgtaaccctctcccttgtcatctttagattcgcaagctgcggcgggaactggatgcctcccaggagaaagtttcagctttgaccacccagctgacagcaaatgtaagtacagacatagggcagtagcatcgggacaggaagcaccatccttgccttctgaacagcctcaagtcctcctgtgctgaacaaatagaagtagcacattataaagaaaaagacacaggctttggcatcatgggtgtgaatgtcagtttggacacttactggctttgtgactttgggtaagttcttgaatctcagcctgcgtgtccttatctgtgtaacgagggtgatagtatttacatctcagtattggcccacagtcaatgcttgcaatatgcgaagtgcttattaaaatcttaatttctcttcctctttctgaaaattttgattttaagggtgggaaaaagaagcaaaaaggaaagaagggggaagaaaagaaatgtagggcttttcaatatctaggtagctgctctgtcattgtgatatacacgattatgagtttaggagatgctgccaaccagcattcaattcaacaactgtttgagtgccagctatgccccgggcactgtgggttcaacagcagagcaagcacagtgactgacatcttaacattcagtctctgggacagcagagaaacaaaacaaacaattttgctataacatgataactgttaagataaagggaggaggtggcagtgggaatatctagggggagcacctagctcactcttggtgggggatgaaaaaggggacagctcatctgatattgaaaataagaaaaaaattttttaaaagggggacaggaaggacttcctggaggaggtgacatctaatggatgctaggtaggggagaatgcatagggatgacagcattctaaccaaagagaataatttgcacaaaggttaaggagaaagatcttggtgtattttgaactctcagtaggtgggtgtaattagtgtctatggcttggatgtggaggagaggtaagggtggagaggggacagaagtagggaggaagaaggcagcgaagaaagccaggggtcagatcacagtgtctgagctgttggggtgagcatccgggcttcctcctgaagttagcagacacctctcagtgcgttttaagtaagcagtgggtgggctggtttgcactttagatagaggatcagagtagaggcagaggtgcctcttcccccacccccatcagccatgtctgtattggagccctgatgcacagctgtgaccaggtgaaggatgaagctcagagggcagagcctgagatatcgaaaggtgctaaggtgcctctgaggcaaggcttgctgcccaggagttcaccacccagcctgagcccgttgataaacgtgttcaagccagacagaaagcaacctgcatgaccacagcatgtcgttaaaatggaaaccaacttcaagaggctgtcttccctcaactagaaaactgagccagtcccccacatcagtcattcgcccggagtttttgccatggtattcccagcttgagccttagtttactcaagggaaccatttctctttaaggtcggcatgtgacatacctagtacagtgcttgaccttagttattagctcagtaactggtagctgcccccattaatatgtagtctcctaagttctctttcttttctggaaatctttgatttttttaaaaaccctaacgtaggagaccacaacgtgttttgtaatcttttattttctttacctcttctgccaccagtaatgctatcaaaagaactttaaaaactgacatgagaacttaattctgaggcgtaggtcctgttcagaaaaacagtattctatagacaggttctatcccgtgggcagattcttcatctggataactagatgtgtagatttgaatccagaacaaaccctagacccagcaagtcagggtcttctgagtgtaatccaaatgtgtggtttgacagcaaacccctgtcaaaccacagtgattctgagctactctcctagtttaagagttacagatgccaattgttgcctttactaatcaacaaatagtagttaacttactttccggtgaacttgggttaattgttccagtgacctcgtgctgccacaggagcctcaccttgggccatttggaactctgctctctgttctagaagagtcagagtgagatcccttatattattccagaagagtgttttgttcctcataaaaggcactgaatccagtattgttttaaagtaaatatttagtcttaccgcacactgctggaagggtgaacatgttttattgtctgccatctttctcgcaaaccaagctgtgtttgtttttctagggcaaactactcaaaaccaccttctctgagtgtttttataccacttgtgtttgttttccctgggaatgtgagcgtggcacttgatgagtaggctgttgtgtgtggctctgaaccaggcttggaacagcctccacagtctgtattttcatagttgtgctaatgacacaaaggcaacccttttgtttagcagaaaaatgggatcctctggatctccagagcaaatgtgttttctttttaagcttgcaaaaacaccttctcaatagcagtcttcatggggtcaggttttttaaattttttttttattatactttaagttctggggtacatgtgcagaatgtgcaggttcgttacgtacgtatacatgtgccatggtggtttgctgcacccatcaactcgtcatctacattaggcatttctcctaatactatccctcccctagccccccaccccccgacaggccctggtgtctgatgttcccctccatgtatccatgtgccatgtgttctcattgttcaactcccacttatgaatgagaacatccagtgtttggtttttggttcttgtgttagtttgctgagaatgatggtttccagcttcatccatgtccctgaaaaggacatgaactcatcctttttatggctgcatagaattccatggtgtatatgtgccacatgtctttatccactctatcattgatgggcatttgggttggttccaaatctttgctattgtgaacagtgctgcaataaacatacgtgtgcatgcgtctttatagtaaaatgatttataatcctttgggggtatatacccagtaatgggattgctgggtcaaatggtatttctagttctagatccttgaggaattgccacactgtcttacataatggttgaactaatttacactctcatcaacagtataaaagtgttcctatttctccacatcctctccagcatctgttgttccttgactttttaatgattgccattctaactgacatgagatggtatctcattgtggttttgatttgcatttcttcatatgtttgttggctgcataaatgtcttcttttgaaaagtgtctgttcatatccttcacccactaaatgggtgggtgggtgtttttttcttgtaaatttgtttaagttctttataaatttgtttaagttctggatattagccctttgtcagatggatagattgcaaaaattttcttcaatgttgtaggttgcctgttcactctgatgaagtttcttttgctgtgcagaagctctttaattagatcccttttgtctattttggttttgttcccattgcttttgatattttagtcatgaaggctttgcccatgcctatgtcctgaatagtattgcctaggttttcttctaaggtttttatgattttaggtcttaggtttaattctttaatccatcttgggttaatttttgtatgaggtgtaaggaaggggtccagtttcagctttctgcatatggctagccagttttgccaacaccatttattaaatagggaatcctttccccattgcttgtttttgtcaggtttgtcaaagatcagatggttgtagatgtgtggcattatttctgaggcctctgttctgtcccattggtctatatatctgttttggtaccagtaccatgctgttttggttactgtagccttgtagtatagtttgaagtcagtgtgatgtctccagctttgttctttttgcttaagattgtcttggctaggcagactcttttttggttccatatgaaatttaaagtagtttttttacaattctgtgaagaaagtcattggtagcttgatggggatagcattgaatctataaattactttgggcagtatggccattttcatgatattgattcttactatccatgaacatggaatgtttttgcatttgtttatgtcctctcttatttccttgagcagtggtttgtagttctccttcaagaggtccttcacgtcccttgtaagttgtattcctaggtattttattctctttgtagcaattgtgaatgggagttcactcatgatttggttctctgtttttctgttattggcgtataggaatgcttgtgatttttgcacattgattttgtatcctgagatgttgctgaagttgcttatcaggttaaggagattttgggctgagaagatggggttttctaaacatacaatcatgttatctgcaaacagagacaatttgacttcctgttttcccaattgaataccctttatttccttctcttgcttgattgccctggccagaacttccaatactatgttgaataggagcggtgagagagggcatccttgtcttgtgccagttttcaaagggaatgcttccagtctttgcccattcagtatgatattggctgtgggtttgtcataaatagctcttattattttgagatacattccatcaatatctagtttattaagagtgtttagcatgaagggctgttgaatttgtccaaggccttttctgcatctattgagataatcatgtggtttttgtctttggttctgtttatgtgatggattacatttattgattttcttatgttgaaccagccttgcatcccagggatgaagcccacttgatcatggtggataagctttttgatgtgctgctggatttggtttgccagtattttaccgaggattttcacattgatgttcatcaaggatattggcctgaaattttctttttttgttttgtctttgccaggttttggtatcaggatgatgctggcctcataaaatgagccagggaggattccttctttttctattatttggaatagtttcacaaggaatggtactagatcctctttgtacctctggtaaaatttggatgtgaatccatctagttctggactttttttggttggtaggctattaattgctgcctcaatgtcagaacttcttattggtcttctcagggatttgacttcttcctggtttagtcttgggagggtgtatgtgtccaggaatttatccatttcttctagattttctagtttgcttacgtagagctgtttatagtattctctgatggtagtttgtatttctgtgggattggtggtgatatcccctttatcattttctattgcatcttatttgattcttttctcttttcttctgtattagtctggctagcagtctattttgttgatcttttcaaaaaacgacctcctggattcactgattttttgaagggttttttgtgtctctatctccttcagttctgctctgatcttagttatttcttgtcttctgctagcttttgaatttgtttgctcttgcttctctagttcttttaattgtgatctcagggtgtcgattttagatctttcctgctttctcttgtgggcatttagtgctataaatttccctctacacactgctttaaatgtgtcccagatattctagtatgttgtatctttgttctcattggtttcaaagaacatctttatttctgccttcatttccttatgtacccagtagtcattcaggagcaggttgttcagtttccatgtagttgtgtggttttgagtgagtttcttattcatgagttctaatttgattgcactgtggtctgagagtctgtttgctatgatttccattcttttgcatttgctgaggagtgttttacttccgattatgtggtcaattttagaataagtgtgatgtggtgctgagaagaacatattttctgttgatgtggggttgagagttctgtagatgtctattaggtgtgcttggtccagagatgagctcaagtcctggatatccttgttaattttctgttttgttcatctgtctaatattgacagtagggtgttaaagtctcccactgttattgtgtgggagtctaagtctctttgtaggtctctaaggacttgctttatgaatctgggtgctcctgttttgggtgcatatatatttaggatagtgagctcttcttgttgcattgatctctttaccgtcatgtaatggccttctttgtatctttttatctttcttggtttaaagtctgttttattggagactaggattgcaactctgcttttttttttttttttgctttccatttgcttggtaaatattccttcatccctttattttgagcctatgtctgtctttgcacgtgagatgggtctcctgaatacagcacactgaagggtctgggctctttatccaatttgtcagtctgtgtcttttgattggggcatttagcctgtttacaataggaatgcccgtaagtggagtcatgggtgacaatcaaatgcagaactgaaatcaatggaaatccaatcatttacatttaactttgtcattcatttgcaatatgaggatagtaaatgttctttgaaacatccaggccctggcctgtttcctttgtcaactatgtgactgtcataaattgattggcttttgttttgccacactctccagggcagactaaagcatatctctttattttaaaatgcagaggcactgtctccatgttttttgtttttttgttttgttttttttttttttgagacagagtctcatcccgctctgttgcccaggctggagtgcagtggcacaatcttggctcactgcaagctccgcctcccgggttcacgccattctcctgcctcagcctcccgagtagctgggactacaggtgcccaccaccatgcccagctagttttttgtttgtttgtttgtttttgtatttttagtagagacggggtttcaccgtgttagccaggatagtctcgatctcctgacctcagggtccgcccgccttagcctcccaaagtgctgggattacaggcatgagctaccacgcctggcctgtctccatttttaatagagagagggagtgcaatgagagagaagctaactattccacttaacatttctactacaagtagaaatgctccctgccagcggttgattctagagatgtcttagcctccaccatccctgtttaatgaagtctaataacaggcctctctttacccctcacatctctccttagattgaaatgtcactgtgcctcctcacagtgcacggcaaaagcatctccccacccaccccccatgcttatccagcgttgattcctcactgtgtgtgtcagtcatctcctcctctcgaatttcacagcatgatcaaatctcacatctcccaagctcctcccatatatcctctgcccttctcatccctcttgcagcccactgtgtttctactccccctgtctacacctgtgttctcaggtagtctcactcctctcatagtttctcttgtcactttctcattcccaaacctccttttttccccacaagtgtccatgcattcctgtgttttgcagtacctgaacagttcatagaccattttcaccggccttgtttcatttagctgaaaataaccctgggaggaaaatagatattggtaccatttcatatatgaagctgaggctgctaggatcaggtgatttgctctgttatgggtattcagaaggaactacagggagagctgaagacctctaactctaaatcctgttcccttcccctgtactacactgcctccttcatctaagtgcttttcttttcaatcctttaattgctcatccaacatatatgattgagtggctgtttttgtaccagcagtgtggatacagtaaggagcaaggtagacatggtgtcagtcctcatcaaatgcacaatctggtgatccttctcatctgctgctcaaatgcctctcactcttggacatgccactattccattatacaagtagagattggagattagaagatcctagctgcctaatggcttcttcagtctattgctggaaattccttagcatgactgtttgaaacagctccattctttatttttggctttaataacattaccaggattctcattcaatcaactaatatatcacctactactctgcttcacagtcaaaagcttagtgttagggcacaaagttacctcttacccttgaagagagttgcagagcaagtggcagtcaggaaaatgccacatttccccattcttaaacttactctttttttgtattttaacatctctgaaaattagatgctattttacttataactggaagcatttaaaaaattcttagaaatataaaataatggtacatcttatgtcatattctaacagaagtgtataaaactacgtgaaagcctgtgggaaagtggtaaccccctggaggaactgggaaacatttctctgaggaggtagcagatgggcctttcagtggctttttattaaccaggattataacaagcaaactacgccaaccattttgtttgttcattctactaacatgcttaatatgagcctctattgtgagcttagcacttggtgaacagaagatcatcctccattgtagtagagaagacagacatacattaccaattacaagactgcatgtatttttaactatgatatctcaaagtgtatatcagaagtacagtttgcttgtgagagtgcatatgagggtgtcgtgaaagtacgagccgagagctctttacacagacaggtaaaaattattaggcaaggaatgggagaaagggttgagagggaagaacatttcaggtagaggggaaaagatgtacaagggccctaagatgggaaggagcacgggttgtttgagcaagtagaagactggagtgactggatcccaaagagtggtggggagtgggattcaagaggaggctgaaaaagtagcctagatcaatggacccacaggattttcatctttaagagccagacaccttctaagcactcttgccttgcaaggtaatataactgaggttgtgtcttcccctccaggctcaccttgtggcagcctttgaacagagtcttggtaacatgacaatcaggctccagagtctgaccatgacagctgagcagaaggtaaggcagaaaggatactttaaccctccctacttggagttaacaacaaacttgaaaatactattctttcatttcagatcattgtgtggatgttaatgtatttcttgaactgttaaagtttaattgtaaggagtccaatctgttgagtgaaaatatgacagattgataatggcatcaatgatagatcttgtagttataatcctacttttatgtgtttgttcatgcctgttgatccatctgaaaggttttgttgagctacttcattcccgctcctcctgtgttgaagccaagttgtacttcagttgaactctgtacagaatgattttaggctgaccaataattttttctgttccctaggactcagaactgaatgagttaagaaaaaccattgagctgctaaagaaacagaacgcagctgcccaggctgccattaatggagtaattaacacacctgagctcaactgcaaaggtaaagtaagggaaacagcctttagccagaagacctgcctgcccttaggagccctcccctgacatcatatgatgcaacctccttgctagaagacagtgtctgcgtaattcagctccatgtcaggcaagcaggaactggaaggcaaacacctttaatcaagtcacttctggcctctacaaagatggctatggtagttcatcttcttctctgatatatctgaaaaatggaagaaaacatgtttctattggcagagtgttaaagtattttacaacccttaatttcactagcactttgatatttgcatgctgatatatggcataagctgaactgagttcctcccttatttgtccaagaaaagatttctttttttttctgagacactcttgctctgtcacccaggttgaagtgcagtggtgcaatcttggctcactgcaacctctacttcccgggttcaagtgattctcctgcctcagcctcccaagtagctgggattacaggcatgtgccagcatgcctggctaatttatgtattcttagtagagacaggtcttgccatgttggctgggctggtcttgaactcctgtcctcaagcaatccgctcacctcggcctccgaaagtgctaggattacgagcatgagccaccatgcccagcctaggaaaacatttctaagtgaattattttgtccttgtgtatcttggggtaatgtaggagtgcaggtgacttagctcttataacaataatattaacagtaatagtaatcacagaagtaatatggagagctaggatttatggaatacttactacgttctaagggcagtgctaagtgtttcaatgatttcattatctggttttctttctacaacaatcttgtgagtgtgattctgttctttcctgcttgtactgatgaggacactagtgttcatagatgagagtcacttcctttttctttttttgagacggagtttcactctgttgcccaggctggagtgcactggcatgatctccgctcactgtaacctctgcctcctgcgttcaagtgattctcctgcctccacctcctgagtagctgggactacaggcgcatgcgaacacgcctggctggtttttgtatttttagtagagacagggtttcaccatgttggccaggctggtctcgaacttctgacctcaagtggtctgcctgctttggcttcctaaagtgctgggattacaggcatgatccactacacccggccgagggtcactttttaaggtcagggattagggagaaactgaagtggggctagaacctgatgagttggtttgaccctacaactagtgttctcaaagaccagcctttaggtgtagttctgtcctcatgagaaaaactatctgcaaactttatgtcagatatcacacattttcaatatcggtgttgtttagtctattgggcctcccgaaaaagtgataatagctttgaaatgggaaggatttgcaaatgagttggctggacagagtcaagggaaaagaatatccagatagagggatagcacatggaagggccctagatgaggcaggcatggcacttccagagggctgcaagaaggccactgtgacaggagcccagagagcaggagagggagggggctagcaatgaaggtgccaactgctcagttcacaagcacatttccacacctatctaaagcttaagagctggtgttggggaaattctccctacacctcccttgacttctgttttgtaaagtggggagagatagacctcatttaattgaccaaagagggcaatgcactcacctattcaaggatcttagaaacagctgtagggatcagagttgatgtatatgtggaaaacacccagtagtcctcaggtgggtgggttttgcttaaagggcaaaatcctgagataaagaatagggctcaggttggcagctgctgaaacaccctgccttggtctccaggaaacggcactgcccagtctgcagacctccgcatccgcaggcagcactcctcagacagcgtctccagcatcaacagtgccaccagccactccagcgtgggcagcaacatagagagtgactcaaagaagaagaagcggaagaactgggtgagtgcacatccactctcctggggactgacggacagagtcagttgcagaactggctgctgcatctccccagataaagtccagcccagctactatctgtggaacatagcactttgggcgtagatcccaggaaatggtttgtggatgggtttttactaaaatcaatattgtactcagcaaaacactagaatctgtaacatccctaccactttgtatttttttctctttcatgagacttttcataaagtactcatctttcatttcatatgtgtgtcatttcttcctcattatatgttggccacaaagtttcaggtactagaggaaagttattcttaaatggtttcttcatagatccaaaatatttttttgagcatattgctagttatcccatctttagccgtaatctttatctatttatttacacaaatgcctagggatatcatcaaaccaaccctctctttgaaaactttttgaccatgtcctataaataaaagtgtcctaatgtcagtgttagaagttagcaagtagttctaaaccaggggttgtacctcaaatagcaagtttaatagaatcagtctccattacagtgtttctccatgtttcataatcccagtgagttatttgaatttctggacagtggtgccttgagtggttttttccactctcccagaaaaattccacccctcactctccatccagttttttaattcttctttaaaggctacagagctctgactgagatttgctatcccttgtcttcagtgcaagaatatctcaagttgatctggagttgaccagtggccccgttccccatttgtgctgacggcatcctgtttcactagtagcttcagtgtcctcattcattctgtacacttctcactcattttgtgttatcttggatgggtggcgaggtctagtgatacagacatcaggggtttagtaattttggttgtcaatgacttgcattggaagcaagctaaaaagccagtctagtgtgaccctctcatctttctgattaaattttcttttttaagttactaatggctcttagtcaacttatttgttatgactaaacacagataggattaattcatattgctgtctctaatatgcaatcgataaacatggtcagctttgattttcaaagtgacgagagagatattttctacgaaaaatagtggttattccattttcttcaagaaataaaacgtgcttatgttgctttaagacaactcccgcttatcagtcaaatcagggaagatggataattggcatcctcagctaatcccaaagcttagctctgtctgatctttgtaatctcctcttccacctggcttttcaccagaggtagaggcaaggatttcaggtgatggcttgtgtccctaatccttctgtttctgtgactgctctctggaaatattatcagaggtaggaaatgggagagaaaagggatctagatttgcccacaagctggacatgtggtttattatagatgaaacctgttgatgggagaaaaatctcatcagtttttagaatggcctgttttctgaatttttcagtggctaagaaaacccctggaacgtattttcacaaggaaaaaagactttagaaaaaggaaattacttttaaaaggcctgttttcaagatgaaacattagtttttggcctagaaaaatctgattatggctttcagagaagacattgcattttaattctttatgttctcattaaaatgtttaggtatccatttcctgcaacagaggcgggggggaaagaattttcagatccatctcatgatttggggaaattgtaatatactagttccttttccccccatatggttaataaatttctttaaaataaccattttctgagtaacaagtgacatggctaatttgctgcttattagattatcttcttatatacacaaatagctgaaactcctaagtggataggttaaggagctatacagccatccagggccagtgtgacagtgaagctagaattgctcaaaaagaagacatcctctccaacctcccccaaaatttaaagcacagagaggtgactgacaagaaaaaagaagagaatgagaagcacaggaaggtgggaggcagccatttcagccagacagggaaaagctggaagaactggaattgtagaggactccccaacctgctattcccttcctttcagaagggaggaacatgcccccagtgcttttaaagatttgtgttcctactggaaacctcccctgtgtgtggtgtttattattagccatgttgtgtctgaaagtccgaagctttccctgtcactggctttctctgttaaaaaattgtcttttttcctcccccttccccatttttgcttgcgttttctctggcaggtcaatgaggtaagcaagaccaactttaatatcagataccaagctaacccatccattgatatgactaacctcatccgcatccatcaccgtgtctgagcatcctgctttgttgctgtgtaacctcatcttcccaacatccatctgctgagccagactctgtgttgctgttggcatctagtcttgaaccaagagtaggcatggaatgttacccacagatgcagtccctcaagctggcaacaccagataactcttcctcccttaatgcactgattcaaaagagctcttgggaacctcttccattggtggggggaaaaacatgggagaattaatcgcttttttgtgtgcatgtctctgttttgccaaggcctaagcattggttgcccccgctgtgagactgacagtcttgtatattcagttacgcagctccttcaagcaagctttcgggaagaagaagtccccaaaatctgcgtcctctcattcagatattgaggagatgacggattcttctttgccttcctcaccaaagttaccgcacaatgggtccacaggttccaccccactgctgaggaattctcactccaactctctgtaagtctgtctgtctagtcagataacatctttggcccctgagaaccttctccagtaggaatggctaggagtcctgttatgacacatctgctccttgggatcctttatgctttgctttaataggactgtgcatgttctttcaatgctttaggactgggaaagttgaaagagaaaagaaacttaggttttcgttctgatggtgtcaatatccataactaactggttggccttaagcgggttacttaaattctctttgtttccatacctctatatatcaatttgggataatggtttttgtgtacgtatcctagccctaagaattggacgagataaatggatatacaggagcttgcttcctgcagcagtaagaaaggctggccctgctcagtagggctgaatttcttttgaaaccatggtgttccaggtctagaattaaagaactggagcacaggtagtctgcaaggaaagttgtcagagagatgagacagtgcatgggagaagagggaagtcatggccagggtcaggacagccactgagatagggttagagaaagaagtttggttgtataaacttcagtttcctcactagtaaaaatagggttcattacatctacttcactggattcttgggaaggccaagttaaatactatgcatgaagggccttttccatgctgttccatctttcttcattctcagggggccaggtctgtgccgctgaccctaagtccacttaaccagccagcccactgaagacagcataagtgtcttaaggccctgccttagcagcttaccagatgggtagagggagtacaggcaaaatcagcctgtccagaggccagatctttgtagtataccaactgcatgggagtggaagagaggaaacagaggatagtagggttatgaccttcttttggttttggttttggttttgtttttgagatggagtcttgctctgttgcccaggctggagtgcagaggcatgatctcggctcactgcaacttctgctgcccaggtgcaagcaattctcctgtctcagcctcctgaatagctgggactacaggcgcatgccaccatgcccagctaatttttgtagttttagtagagacgaggtttcaccgtattggtcaatctggtctcgaactcctgacctcaggtgatccacctgcttcagcctcccaaagtgcttggattacaggcatgagccactgcacccaaccagggttatgacttttaagcaacctcacccactattgaaacatggccctgtcagggtctctactttactgagttagatgatcaattcctcttttcttggagaacaccctagtaagaggtagccacaggggtgtgtacttcctactgctatgggtgagggtaaaattgaatgggggaaggaagaaggacactgagggactggacttcggtttggccctgcagtgcccagcccagtgtcctgtgttattttgagtgaagaattagacaaattactgagagagtgtgtcctcctccatctgcagagtgcctaaggaaagagtaaagaaccagttgcctgtgactctcacacatgccatcatcccaaagcatcccaactcagttgtctcctgaccaggagaaaaaggaactcatcatgtcttctttatttattgatttaaactttttgtatagcaacctgtgtgagcagagcactattccagatgctctgaagagaccaaaaaggggttaaccaagccaggtgcagttactgtcgcctgtaatcccagcgctttgggaggccaaggagggaggattgcttgaggccaagagctggcaaccagcctggtcaatatagtgagactctgtctctacaaaaaaaaattttttttaatcggtcaggcatggtgttgcatacttgtagtcccagctacttgggaggctgaggcaggagggtcacttgagcccaggaatttgagactccagtgagctgtgatcaccctgtactccagcctgggtgacagagtaaggccatgtctctatttaaaaaaaaaaaaaaagttaaacagattctccacccctgagaagagtaaatactagtggagacatgacatagtacagttcattctactcctgaactttcactctgaaggccccattctcagttgtggttacgataaagtacaacacaaagttcctactcatggaccctgtataccaagagaggagatgaatgttaaacaaataaatcctgaataaactaggaaaattagagagtgctaagggctaatgctgtgaattaaaacagtgctgagatacagagtaccttggcagcaactttagatggggtggtcagaaaagagccctctgagtaggtgacatttcagctgaatctgcatgccagggggagccactgggttagtttcagcgggtaacattagctgctgtaacaaactcagcccaacgctcagcagctttacatatgactgtttatttcttgctcactccaaacccagtgcagatagtcctagtcagcaggtggcctgccctctagtgatgtaggcactgaggctcccgccatccacagggcccagtccactgctcaacattctgtgtccagccagtgggcgtgggggtttggagagtgcagaggaacctgcaggagggttttaaggaccaggcctagaagaggcttatgtcgcctcttcccacagtccactgaccaggactcaaagccataccacctgcagcagaagaagtgaaggaggaaatgggctttggtgaacacatagcagcctctgccaccccagcctcccaatgagcagggcagtcttcctgacccaaaaaataaataacacaaggagcctgatgtagaaacaggttcgatatgtctgaaagagagagggatggacagcgtgacttcccacatatgcgagtaggctacagccacagacatagtcagggcctagaacacgcaaggctttgaagtgaattcgcatccaatttcatgtataatgggtgggtgtggtggagtttgaaacaggaatatgagataatctgaatttacaaagatcagtctctgttctgtgtataaggaatatggggaagggagatcacccaggggctcttagccactctggcccacttgttctttgaacattccaatcacactctccacctcaaggcctgtgtccttcctgtgtcctctgcctggtgtgctcttccctcagatatttatttccttaggtctctgctcaatgtgacttaatgaataaggccttgcccattcacttgcataaaccaacattctaccatgagccagtgctccccatggtccctttgcccctgcttcatttttccccattgcacatgttgccccctgacacctgacatagaggttttccttgattatttgttctctgtcccccaccccaaccccagatctacagtagaagctccatggaggtaagtactgtattggttttgcaggcactcaaatatttggtggaatgaatgagccactgataacagtagtgagttctggatgtatttaggagatattcttgaagaaaagttgacagtgtatggtgatggatcagatgtgagtgcaagggaaagaggagagccatcctgggatattcctagatttacaacttgagtacctgggatgagtgggagacacagaggggggcagagtggggagtcggagcactactttggttccattaaatttgagatgccagcagacatccatatccaggtcaaccagcctggacttcctagaggtgtagatttgggagacacagacttattggtggtgtcgaaagctgggcaactggaagagttctccaaggggttgaatgaagacgaagatgatcagagggcaagagggcaagaggactgagctctggtgcactctgatatttgaagttcagaaagagggagttacagctgccggccagcaaggtgggaggaaacctgggagcagagaggagaaactgttgctggagggagtaggaacggggccagatgctgctgggcggccaagtaagatgagcagagagaggcggtgatgcactcagctgtgcaggaccatggcagaactatcctccaagccactttccccagaggaatcgggtggggttggctcctggctccccagcccttttcttacattccacagcatccatgcacactggagatgtttgtttttggtctcgttttccaaagggtaggctgagagcaaatgcttgtttccaacctcgaagggtttgtaagaatgtgcaaatctagatgtgagagggagttcaaagacaaaaccataggcagaggagttgggcttaggaaattccccaatccgtgggcaaaaggaatggtagttgtggtaaggcaacgttttcccacactcgaggcattttaaaattaggtatgccaccagccctgactgtggacaagacagtggaaaaaggcttgaatcacagttaagggactgagtagggaaaaacacacataaggtgtcttcagtaagcagtttatgaagtggacaagcatgtattgagcgcctagtgggtatagttcaggaacacaggctctagagctgagcagacctgccaggtttgaatctgcctctatcatttttacatggtgcagtcttgggcctgcttgtgtccatgtctctgcctccccattttaaaactggagataattacagtacctcttcatggagtgagtaatgtacaaaggaaatggaataatatacttcaaatacctagcccatttgtttaggtattccataagcatttgttaggtacccattatgtaaatgtgatcagatgccagaaatgatgcagagaataaccctggtccctgaggagccagcagccaagcagaggtaacatgttaagttgaaatgaaattatcagcgatacagcataagtctagtcagggaaggaactaggggagaaggctctgtcttgggcattaggattagggactaaagcttagttaaggctgctgcaaaagaatgtgttttcttttttgttttgagactgagtttcgctcttgcctcccaggctgtagtgcagtggcgcgatcttggctcactgcaacctcgacctctcaggttcaagcgattctcctgcctcagcctcctgagtagccgggattacaagtgcccgccaccaaagctacaccacccagctaatttgtgtatttttagtagagacggggtttcgccgtgttggccaggcttgtctcgaactccccacctcagatgatccacctgcctcagctgggattacaggcgtgagccgccaacccgggccaagaatgtgttttcaacatcatgtctacgttatagggcatctgtctcatgaggcctcatcattgtgtgtttctgagagctggctgattctggaggagcatagggaggacaaagtcctcccaacacagactttcttcatttcagtttggtaccgtttgtaaagtcaagggtttaggccaagctctgcaaagtaacccatgtgatacgttccacaacgtgagtgccaagaaggtattttctctcttgctgagagctttctgggaaaagggtgcagatcaggtgaagatgacttgagcaaggtgccttatcgtggagtgctggacagacgagcctcacatggtgtcagccagaacagactgttctctgcagtgaatctgagccttcaagattcatgtaggacatgatttggctaagaagggagtatcacagtgaaattttgttcagactttacactccatttaaaccaagaaaccatagtcttctcaagatagaaccagtttttgcaagctcctcctgcaaacctcccaaaccgaagaaaaaaaaaaaaagcatggttctatcagtaaacctcacaaaccacaggctattcaaagtacagagagctgagaaagaaaggatgttgcaaattctaaagacatttctgtctcgcccttttagtcctgaatctattggcttcagtctctcaaaagtgtgagatggaaataattagatcattttcaggagttctttgggtttttcaataagattttgaagctaagaatcttccttggtgactggtaacttttaaaaacataaggtggttttaccgtgtctctcaaatcaaaaaagttcaggttcaggtcaagaaaagagcaacagaaacatttggctattcaagtgttaaatttttcttccagttctttctgcccccgaaatacaatttcatctcttttaacaattttataaatcattttcctttgggaattaaaatttccacaccctcacccagttttacaggtcaggttttgtttggccccaaacccatagcttgggtcttggagagccagactcatgtgatcatttatttctgcagagaccacatgctcatcatctcctttagacataatcagcttcagctttgtaactttatgaacttgagagtgggggtgtttggggttgtttttctgtcttcagtccaagaaatgtcaaagctttctattctggatcacccagtaacccagatgctaagatcgtcgaaactcacagaactattttttttaagagaactatctttcctaacattgcaattcatcacgacttgtatgatcttctactttgtgctgatttgccaggtgtttgaagagcaaacctaagtaactaaggagcctaagctagaagaaccacctcttcagaaagaggaactcaacagggtcccatggtgaccttgacctggtgtgcagcagggaaaagaagataattagccaggctgttgcagagttttcagatacaactttggcttgcctgtcacaccatcccgtctgttctctaactccctgaagaggtttcccttcttgccctgagtgtgttaagcagtgtgggggctgagagaactaaagaaggttgatctgtctagacacttttaggggagtgagttttcagaatgtgatcaggaacagattaacaccttccacgcatatctttaggtttcatccccattttggcaaataaaaatcacccctcagttgtttaataaagaagtttctaatctttaaaactgtaagctgaccctgcttctctgagtcggtttggaactcaagggcgtgtggtgtcatggaagcccagctgtgtacacatggtgggggagggggttatcaaactggaaggttactactcccttttgccagctcctgcttatccttatattcctggaattttgctgaaaggcacaccaaagccattctgattgccagagctcagcaaagaaagaatgtagagaatgaaatcttgtctctaaaaataaaaataaaaataaaatttaaaaagtgaaaccacaaaaagcaggaaaagagtgaaagacaaaagtaggaactcaggaaaagagtgaaagacaaaaataggaacaaagaaaaaggacaacaaatagaaaagtaacaatacagtaaataataatctaactatattaacgattttaaacatcagtggtctaaataaaccaatttaaagaagaaaaaaagaatacagagaaggaataaaatctgttttcaggtgcttttggcattgtcacccacaggaagcaccaggcagctggttattcacagttactgctaaacaaacctgatgattgatgtggaccagtgttcagtaggggactaaaaggagctgctttcatcagtaacattcctctttccctagaatttcagaatgcatggatagtgaagctgagaccgtcatgcagctccgaaatgagttaagagacaaggagatgaagctgacggatatccgcttagaagctctcagttctgcccaccagctggaccagctccgggaggccatgaacaggatgcaggtgagagcccaggagcatgggctgagctcaaggctgtctatgaaggagctcccagaggctgctctccactaagccctgagggctgcatcagaatctggtggcggccctcgctttcccagcctttatctcttttcagtccctcccacacattgctcaaagacccagtcttttggaagaataagagtacccatgctcttcctttacgtaatacttttggtgactcccctggtgcctgtggcatgtggtacagtctccttcagctggccttcaaggccttctgcagggtcgtttccactgttaatccacaccaccctccccagctcctcttcccagaatctactcgccagccagatggagtcgctgactgccccctttgcatccttggaaattcctctttcatattgttccctccactgggtatattcctctgcacatccaagttagacccttcccttaatgctcggcctgattcctttccaagtcttgcagctggagagttagtacccttatctgagtattcctgtagatttgttcttacagcccctcccaccttctgccatggagtgaagacatttgggtcttctgggctttttgcatacctttctgtggacatagcaccaatgccttgcacattgtaggttcttcatgaatattcgtagaatgaaagatacctctagagtctgctgggatcttaatggagtcagtgtttcacaaaggaggttccctgaaacactctttccatgagaagctctatgaaaggagaataccttgatcaaatatgtttggaaaatgctgcacaccatgtgcctctgttcaattcatggcgtagaggagctcattaaagattctgagaagtcctgcaggaaagaagcctgtaaaagccagagttgcacaaacctcttagatcataagactctttttcacttaaccctcaagcagcagactctgggaagcatttcagaggtcttttcaaaggcctgttctctgaatggatggacctcccatggcagcatgtcttatgtctaccgcagggttagcaaacactgctaaatctctctgagggtgttgttcgccttgggtggaagaccagcctggtttctgcagggaactttcagatccttccttcagaaaaatcttgttcacattacttctgcctactaagggagcttctccattactctttgcagagtgaaatagagaagctgaaagctgagaatgatcggctgaagtcagagtctcaaggcagtggctgcagccgggctccttcccaagtgtccatctctgcctccccgaggcagtccatgggcctctcccagcacagcttgaacctcactgagtcaaccagcctgggtgagtggcctacagggtttgggggcaggaatggacctacagctggcaccctgatctctaagcgagaaccccaaaataagcagatcaacagatcaaatggagaggcaacaggcgtgtgtgcacttggggtgtgtatgtgtctgggtgtgagtctgctaccaacatgagcccagccgttagactgctctcatgctttgctccagcaccccaaattctccaagccctgagcttggatcccctcgcccaccatgctgagtttgtttgatccattttaagaggctgacctgcaagctgaatgctgtacacaaaccccatagtagcaggtctcagttgaggcagtggcttggtctatgatcttcctgccttcaggatggattccaggctggtgcaaccatcagtgaacacaatctaggttttctttgtaagcgtattaaggctgatgcttttattttttatccatgatgctgctgctgttgttgttttggttgagtctctccctcgcacttccatccggcaaggtgcattgtcagcctactggttctttggttggtccaccattggtttctgtgattgcattctccattttgccctctcctcttcccctacccccccaccccctgcaccctgacacctgtttgtcccgctgctgtgccaacctgcagcgggggtgtcaggaagctggctttgctgtccccatgtgcctaaggctgttgatgttttccattcgcagacatgttgctggatgacactggtgaatgctcggctcggaaggaaggaggcaggcatgttaagatagttgtcagctttcaggaggaaatgaagtggaaggaggttagttggatccctttccctgctttgcctgtccctcccccaggtagaactacctagcttagtgatctaattgtaaaacctctatcaccttggagcctaaggtgatttggaaatactactaacccttctcttaactaaccataatcccttgcagcattctgacacaagtaaagtgtgcgaacggcatttccctttctcgtgtgcttgaaagtctaataaagaatactaaaaatggtcccacgtttcactttcatgtaattaactaaacactaacatccattggaaagggcctttctgaatgtaatatactcccaaagcacttcagaggcagctatgcacattcagcatgtaaggtacagaaataaactgaccacatgcagccgaccaagagcaccagttttatcggtcatcagtcaccaagagtacacatcttggtagacatcaagggatggagatgccaagccctgggagcatgcaggtggctgaaaatagagctagtggggcgtcctgactccccaaggctggggaatccgagttttcctagtacggtttctgttcacttccaaagtctaggaacttccagagtctataccactgccagagactattttgggatgggggctagagctgatattgaaagttgaattttagccagtgattaaaacccagtgatgctttgaatgactgtttctcgaataaatgtaaaaaggcctcatgagtcaccatttcaagttcccttgagttttttgtttgttatttcttagtatttctagccaacatgctattgtagtttcagacagctagggaacccacagaacaaagcgtctgcagccagacctttcttaggggattcagctttgcggctggcttgctagcctcactatagggggtaagctcagcattttggcacttccattagcgtcatctagccatgaaatatatagtagatagctccgttttcaaaacatagctagtaaagtgatggactgttaggggaaactcgttcttttttcttttctttatctttttttttttttttttttttttggaggcagagtctcactctgttgcccaggctggagtgcagtggtgcgatcttggctcactgcaacctctgcctcccaggttcaagcgattcttctgcctcagccttccaagtagctgggactataggtacctgccaccatgcccggctaatttttgtatttttagtagagatggggtttcaccatattggccaggctggtctcaaactcccgaccttgtgatccacctgcctcggcctcccaaagtgttgggattataggcgtgaaccaccacagccggctgggaaactcattcttacagtaaatgcaggttacaccttgtggattatttattctagtgattgtcaatatgaacacatagagcataccttttacaaaagtttacaagtcaccttcaaaagttatattattctgcatcactacagcatccaggtgaggttggttgaccagggattattatcctcattatacaattgagaaacccgagaccccaaacattacttatttgaagccaggggcaagtggtggggtcagatcatgtcactgcaagactgctgctcttttctctgctgattttgcttagccgccatatgacacctcccccacctccacccaaccacgctcctgactctgatccttatgagcatgtaaaaacccaatattatggcatgttctatcagcttttcttttatcactgtgatctggttagctgccactacgcaaagccctgtgaacagagatgcaaaagagttagaaaaagatgttttgagagtattcttcccagagttttactagttttctgagttgcacatgttttaagttttaacaagaataaaaacaataaatgttatttaaaaacaagatagaagaaaaaatagaaacacattttgtcctgacaatgtttaagatctagtaaggaggtaaacttgatatgcaaaaatatgacagaaatacctaaaactaaatataaattagtacagaatatatcattatataagttacgtacagaattgccgaagcaatttaagctctgagcctgatggggttaatcactgaaggcttcctggaagaggtgagtttataagcaaggtttgaaaagagagagatgctagacagatgtggagagagttccatacaaggaatatgtgatttatgccctgtctgacacatttacttagcaaaagtttccatattccagagaggaaatcctcttttcctgactcttggaccgctgttttagcagtaaagcagggaaaggtattaagactattacttccacctaagttatacctggttttaatacaaataggacttttattcccctctcaaaccattggcggagttctaaggcaacctgagtcctctgctgaactgagtcagaaaagatccacctgtttttcacctgtgtacatttccttacccttaggattccagaccacatctctttcttattggctgcattggagttagtggcaagacgaagtgggatgtgctcgatggggtggttagacggctgttcaaagtaagtgtttcaagacaacggctacagcatactacctaacatgggcatccgggcctggggaggaaaagagaggttgatgtcctgagcttggccatttctcagacctgtccccttccctacatgttaatgttgctggaacttgttccctggctctcaagggaatggaaggacaatggtaagtacagactggtcatcggccaaattcttgccgtctgccctttgcagtggtgggccagctagtgagtgtgatctgagcaactctttgatcctctcacagtgaactgctaatgtccaactctcttttcaccttagaattgtgtcttaggacatatgcttcggagtatgtaatctgtggccagggcttagacaccagatttctagccttcattttgggggatttgatctgattttcccggtatcctgtgccaacacttcagagtctttgatttgttttacgagtgacattaatgtctgatcgatggccaggctcaaggatgttgccatacttatttctctattctttttaatcacatcattagattgggtgtttgccatgggataaataactaatgagtaccagggtgaaccttgaaacacatggtgatttgaaggaagcttttggtacattttttctattgtcctgaagtaagtcaacaactataagggctcattaatcatattccctgagtagtaataatagtccacgttttttgtgccagacactatgccaagccccttatattatcccatttaaaggtgaagaaagtgagggtcaggttgggcactttttcaaggtcatggatctagaattagaccccgttggtccagtttagttggtctgacttcaaaacctaacttaactattatgttggttcaaaagtaattgcaccaccataattacttttgcaacaacctaatagtacactatagtttctttctaacagctagatccaggtagcctcatacagagaaaattctgttttttgactggagattggtccccatcctggtaagccagcctatagaaatgagaccagagaagacatatgaatggcttagatggaccgattctccgacctaggccaaaaacttatctctggtgatggacagttgggacatccttggattagaataacagtttgggctgaaaagagacacattggcatcatagtaagtgaggaaatgagaccatgcaaagcctgttactgggattccacctaagtcatcgtgcagtcacctcctagtacatggaccttagttctacatttactaacctaaaaccttttgttcactcaactaagagggaacactttccaaattaaacacacgttttccttctcaaagatctagagctgattttttctagcagtctgcattttaatctctttgtatgatctttgagccaaaagaaggggatggaagagagatttcctgtcaaaattactttttcgtgaattttccagcaccattcacaggccctgatgtcttcaagacttcagccgaacttaggaaaagcagcctagcttttccgtgcttggttcatccagactaaacgttcacaaccttgttaggggtttgttttttttcttccactgctaaccaaataaatctgtattttaagaggcctgtggtactcgggctttatccccttagaaagtcagtttttctccccctcatcccacagctcaatttcaactcagacatctgagaaagaagagaatatgatcataaatcacccagggaaaacatgagtcatgggcagattttagccacatctttgatggggtctttattttttattttttccaggaatacatcattcatgtcgacccagtgagtcagctagggctgaattcagacagcgttcttggctacagcattggagaaatcaagcgcagcaacacttccgaaacaccggagctgcttccttgtggctatctggttggagagaacacgaccatctcagtgactgtgaaaggtaattgagcttgttgcagaagtcggagctttcaggaattgcagtgtttgttttgtgacttggcataggcacttgtggccccagttttgtttgtgcatgtatttgtgggctgcttgtctcccttctaccacagttactctatgcaagttgaaccgtcttttgctttttcaaccaccttaggaaacaaaatcattttagtttattgctgcaattatctaacaaaagatcccattagccttatgactctgagatgatggaatcttaataaccctgttgaaatagggctttactaatactgatgaattactcttgccagcaagctttggatgcagtcccgttctacagatgggaaaaccacgacttgcaataggctgtaggagtcactctgagcatcctgatgaaactgctgaagcttgtgcccacgcatgatgctgctagagcttccagtttctcattacctagtgatattaagccccaggccagtggattccttagaactccaggcccacaaagttcactgaggaaaaaaaaagcttcactgccatgcaattctgggaaactacatcgttatccccatttgtgtttaggggacaggagtgcactggtacatcaaaggctctgtcattcagtgtcctaactcctgctgttaaaaaggctgtttaatccagtctgtcccaaatgtatttgattgtaaaaccctatcatttcctatatgttatggaccacttgaatatagactttcataaatactgtactaggctcattcttttgtgttgtctcatttcttacttccctgaaaggcactgctcttgactgcagttttgcagttgtttgatgcaaggtgtatttcctggttggtagaatttccacaagcaccccaccattttccatcagcaggaattaagatcttgctctgcaggtggcaagtggtacatattgcttgagcctcacacagcctcctcctgctagcaagtgaaattccacaattgtgcctttggactaaaagtgacagaaacagactcaaaagtagctgtaacaaaaaaggaaatgtatgggctcatggccttgggcaatccaggggtacacctcaagcacagctggatccaggtggtcagacagtgaatcaggaccaggcctgcctcagctttgcccatcggctgtgcttatttattgagctctttgtacctggttgatgaaatggcccctggtagcccaattccttcttctagcttaggaacctgaaggaaagaggggtttttgggaaaatgtaacagataattcctagggatgactctggcccactataggtcaaatgcccatcactgaattggtcattatgaccagggagaggatttgtccgagcctgggcaccagcccatccatttgggttggtggaagagctggaccagtggaggagaattggtggagttgctggattggttccacttgaaccaccaggaatgagctccccatgggaaagaagagttctaccatgaggggaagcaggaaggagtatcagacccactggaacaatcatcctcgacaagaaccctttaaggagagccttttatgtcctgagttcaaattgcatttcatccctcctgccaagcatgcgttgttcacttgctggttttacctgtgagcattacaaaggactgaggagtaaaaggaatggcctattgctgagaccaggccaagcctctctagaaagtaacaagattacctgcctctagtggagcgtgccacccctctgcagaccctgatccatcgctgctgtcagcacgtcaagttttagcacctcaagggatcagctcaggtttatttttcagtgacacctgactcttctctttcctagagtacttaaaacttatgccttcaagacactaaaaaccactcaaggatttgagctgaaagagttgcctgagctgcagtgattcacttcagtggtaccaggggaagggggtttgactttgcatttcctcaagtgagctcttgtgcaaaatagtcacttcctgtggggtttatggcagaagaccgaaacagagcagtacatatatatacagagagggtgttctagtggttttttcctgtgtttattattattattaaatttagagaccctacactccatactttgcattgaggtttgagcaagtgtacactacatcaagctcagtagcaggaaaatcttaggcttgtccctagcagataagacatctgggggcctttgtcatgttcattctggaagagtcattgtacacttagatatagatgcattggggggatctgctagcagtgactgagtacgtagaaggaatatgctattataaaacagtacatactcttcagtttactttttattaattttgctggtttcttgagagtaccttttaacaatgacctgaggttctggacagctaaccttggatggatcttctcttagagacagtatccaaaagataccccttttgaagccaacaaccctgattaatgacattgtcccagataggaaaggagaaggataagtttccacttgatgttgttgaggaccaagagtcccagctaacaacatttcaggctaggtctgccagtattcacattccggaatcaaatgatcccgccttgcatttttcctccttttaaagataaaagtggtgttgccttcatggcacatcttagtgtggatagcagtggtacctggtatgtgggagggagcagggtgaagaggcaacctcagggttgtgacagacaggactcaggtttggtttgggcagatgccataggtatagtatactagaggggtgtgtgtgtgtgtgtgtgtgtgtgtgtgtgtgtgtgtgtgtgtgtagtaagtatagtaaatccagacaggcaaatagagcccagagcctcatgaattctgcagaggacagatagggactgagagccaaaatgttcaaggtgagtttgaatctgggaagttagccaagacaggagacagaagcacatggcgttgatgaacagggaggtgacttcctagagcagcagcactttgctctcagcctccagtgttcctgggtgtgcaggagtctcaggtgagtggactgccgaggagaggaatcacctcaggtcttggcagtcccagttaggcaagcacagagagctgccttttctacagggcttcagatgattcctgtctctctcaaatgcagggctcgcagaaaacagcctggactcactggtgtttgagtccttgattcccaagcccatcctgcagcgctacgtctccctcctgatagagcaccgtcggatcattctctctggccccagcggcactgggaaaacctacctggccaaccggctgtctgagtatatagtgcttcgagagggacgggagttgacagacggggttatcgccacctttaacgtggaccataagtccagcaaggtgaggaggtcattctgagtctgctgtattttttggccctttcaaaactgatgatatcaccactagcctgaagggaaagcagcatttcctatcaacaatccttgggtggttttagaaagccaagtgaaagaggtccagagggggctagcagaaaagaagttccatctgtggttaagctgatcgagctcatttatgatgctcagtgctggtagttctttaatgttatccacgatacatctgttgcaatttaccaagaatttatcatgtgcgtactgggtgttactgattttccaaagtaaaatattttgtggaacaacgataataacaccaataacaaaaataacaataataaaaataatagaagcccacatttatagactgtttgccccatcaccagcaaacaccttctcacagcaataccttcacgggagtagttgtcaccatccccattttacagagaaggaaacagaggcttgaagcagattggtcctgcacctaagaccactcagatggtactaagtggtagaactgaagctcaagtcaaagtcttggactctagagccctgtggccagcaaatagattggctcctgcttcacggtgagcaacggaaacctgtttgaatggagcctgacctggtcccagccgagagttggaaagtgctttctcagacctgttcatgcatgcattagtgagcattgatggataattcactctagctggccctatgcaaaggggccagagaatcaaaggtggattggaaatgactccttcgccttaaggatcacctagtgtgcttgaagatacaggttcctagacctcacttcttgatgacctatttcactaggttgtttgaggctgggtatctgcaccatctacaagttccccaagtaacttgatgtaggtgcaggacaagagagaagtacccagagctcttctgttgagagcctttgtgtgagttagggaacttctcctgggaccagtaagtgaaggctccgcaggcatggggagccacatgcctggggcccagagatcacggtgaagagggactaagagaactagccactttaaaaggtgggctttttctactgctaacaagacatattttgacttaaaatggaggcccagggtgggtgggtgctggtaggagatggagaagatgttaccccctgagcaagcaggctagcatctaagacaggccagtgtggtgaagacacagactggggcaggcacccaggtctgacccatgcccgctgcttacccgctgtgcactctcaggccaggcaccttatcataccatgcctcagcttctccttctgtaaaatggacgtaatcatagtactcaccttctaggttattgtgggactacagaagttcctgtgtgtaaggcccttaaagccctgcctggctctaagtgatgccagctatcattatgacagtaatggcaggcagccatcctaggttctctgccagctccttatcttgccgtttcagccttttccactgatgcaccattattcttcctcttccatttttgacatgcatcccttaccccaggcatgcagggctgtgttctagtccctgttgagccaatgccccacccgttctccaaggttaaatacaaagcttgccctttcagcaggacttccccaagcccggtgcatatagacttgtctccccaatgctgtgtgttgtgtctgccacagcactactcagcatgacttaagtgtgtgtctggctcctctgctgctctgatgtgtagagggcttctgtgtatgtagctctcaggctacacacataaagagcacagtgctgtgcttttaccccaggctcaaggtttccactcatcaggtgaatactggaagtcaggacccagtcctaactcatcccatgcccactctgcatcccctgaggaccaagccagtgccctgtaataggcaggcacccagaatgtgtttacagcgcagaatcatgaagggcctttctgcctccactggcctgggtgaggcaaaggccctgagcggtgtgtcttcactgagtgcattcacccacttgttctccttcggccttcctggccaccataggaattgcgccagtacctgtccaaccttgctgaccagtgcaacagtgagaacaatgctgtggacatgcccctcgtcatcatcctggacaacctacaccacgtgagctctctgggagagatcttcaatgggctgctcaactgcaagtaccacaaatggtaaaggctggttctggacctcatagccccccgggagagagtgctgccagctgatggggcactgtgcacacaggtggcccggggccgttgtgggagtgaagctgtgcacacgcatagggttgggagtgggaggcagccagctgtccactggcctggaagcacagggccatgggcctctgtgaccaccttgttctctagcttggcttggaatcacagctttcttttcctttattttatccgcagcccttacataattggcacaatgaaccaggctacctcttcgactcccaacctgcagcttcaccataacttcaggtcagttttcccttcccttgtccagttaaacaatggaatcacaaagaagaaaagcaagaaggggcgggtagagatgcctgtgttgagtatgtgttgtatgctaggtattgttaagcatttttctcagcttaatccatttaattttaacttcagcctcaagtaattacattcaccactctcagtttaccaatggggaaactaaggcccagagacttaagtgacttgggtgaggtcacacactggtcagtggcagagtggaacttgcaatcaagtctctgcctctgagtcttgctgtcatagggtcaagggggcagctctggaagggactgcaggtgaccctgctgccctgcttgtttccagtggcgtctctctgtcccaagtgaacatgagcaatgacagcttttacctaaaatgtccccacctagctgggtctgtgggccctcgagtcccagctgctgtgactccctaccagcttgtcttccctgccccgctgccatagcaccacgctggtgctctctcatggccaggatgtgggaggggctgttcacctcggttgtgctagattgcattgctgcctgattgacatcaccaaacaccccttgccccatattgaatctcagttgactccacctctcctgcctgggcccttagaggtggatgtgaaggtgtctcctgggctaggacccccggctcatttccactggccattctatgggcatctctgagggagatctattgaaagtgggtctgtatgtaattaccagagaaatgttgactcctccagcacactgagagcatggctcacctctgcatttaggctgtcctggtcttgttcatgctttcccctaattatccctcaagtccatcgtcctcctctttccccctatcactgccccatcatcacccagcacaccattgccatcacctagctggtacgtctgcttgcagctttccccctgcactctgtagccaatcctctgcactgtggcagccagaccagagtgagcattctagagtacacatctgaccatagaactctcgtgcttaaagtccttcagtagctccagctccctatggcctgcaggatgaaatccagactccgttggttggcaggtcaagtatgaacttcagctacactaaacctctggtagtttccccaaacatccatgctatttcccatgcctttgcaaaggctgcagcatcaccccactcctgaccccaacaactgctcctgcctttccttatgttgctgcccattatctgtccagtctcagcccagacatcccctcctctaaggagccttccctgattcccttaggcttcatcatatttcatttctttctttgcctgtctgcctcctccaccagactgtgagctcctgggaaccaggacggtgtcttagtcatagtgatagttccatagcctagcaccgggcctgacatcaagcacaagaggcagtttgtctcagtggttagagcctagcctctggagccaggcttcttggttctcatcttagctcttcaattaactagctgtttgatcctggaaaagttacatgacctgtctgttcctcagcatttctgtccgtaaaacggaggtggagataatatctatgttagagggttggtatcaggaactgtgagttaatacatagttacaatgtttagaagagtgttcggtgcatagctaatccaatttgttgcattagcatatacaccttctgtttctaacgtgctttggttcctgaggtcagccatcatttggatcaccatcatcagcttgaaaagtgtttctgacttcctccagatgggtgctttgtgccaaccacacggagcctgtgaagggtttccttggccgattcctgaggaggaagctcatggaaacagagatcagtgggcgggtgcgcaatatggagctggtaaaaatcattgactggattcccaaggtctggcatcacctcaaccgcttcctggaggctcacagttcctcggacgtcaccatcggtgggtgggagactggggtcaggggggcgggctggcatcctcaggtgcccatcctctgggccctggccaggacagcactttgcaggcacagtcagcagaagctggactgtccataaagatagaaagtggggcagagggacagtcacagaccaggtagaccccaaattgctagtggtctgcagaagagagatgtgtccagcctggcccaatgtagaaactgctggctcactaaagagctcccacctcaaggttcccccaagctgaagctaccctctgggattggctttgcttgaaaaataaaattttatcagcatttctgaaagctggacatttagaacagagaaaaaagatcactaaccatcccaccatcttgacataattttaatttgagcttagtttttctgtccttgttcatatgtgtgtgtgtgtatatatatatatatatatatgtgtgtgtatatatatatatatatatatatatatatatatatatatatatatatgctttatgaagtggcaatcatagcatacatataacatgttccttttggccgggcatggtggctcatgcctgtaatctcagcactttgggaggccaaggcatatggatcacctcaagttaagagttcgaaaccagcctggccaacatggtgaaaccctgtctctactaaaaatacaaaaaattagctgggtgtggtggcatgcacctgtaatcccagctactcaggaggctgaggcaggagaatcgcttgaacccaggaggcggaggctgctgtgagccgagattgcgccattgcactccagcctggggaacagagtgagactccaaaaaaaaaaaaaaaaaaaatcctttttcatttagcactatctcatgagcattctttgttgctactcagttgttgtttttgtttttgtttttgtttttgttttttgagacagagttttgctcttgttgcccaggctggagtgcaatggtgtgatcttggctcactgcaacctctgcctcccaggttcaagtgattctcctgccttggcctcccaagtagctgggattacaggtgcccaccaccacacccagctaatttttttgtattttttagtagagaaggggtttcttcatgttggctaggctgatctcgaactcctgacctcaggtgttccaccggcctcggcctcccaaagtgctgggattacaggtgtgagccaccatgcccagccaattactcagttttaaaaattatttttaaaggctacaaaatgatcaaatgtagatgtaccctcatttgcttaactgtttctgttcttttggacttgcagtcatgggcttccattttttttttttttttttttttttttttttttttttttaggacggagtctcgctctgttgcccaggctggagtgcagtggcgcaatctcggctcactgcaagctctgcctcccaggttcacgccattctcctgcctcagcctcccgagtagctgggactacaggcacccaccaccacgcctggctagtttttttttttttttgtatttttagtagatacggtgtttcaccgtgttagccaggatggtctcgatctcctgaccttgtgatccacccgcctcagcctcccaaagtgctgggattataggcgtgagccactgcgcatgggcttccatttttaaaaatcaagattagtgatgccacagtgagcatcttccccataaagcctttcctggaggagggagacccccaggtggaatcagggatcagagtgtccttctctgtggccaccatccagggctagtatacctgcgttcaggcctcagccctgccatccctcagaacgtctagggtccctcctgtgaagggtgctcggaccatggcttcacctgatgccccatcacccatgcccatttgagtgctaatgtattttcactgtggtctccaggcccccggctcttcctgtcatgccccatcgatgtggacggctcgagagtgtggttcaccgacttgtggaactattccattatcccctatctcctggaagccgtcagagaaggactccaggtgagaagacacccctgctggcttccttgaagctgagggggactgttctggtgaccagatgagttgtctttatctcctcctccaggaatctgactgacatggggtgacaacccctcacctgggagttcatcagtgtagtccagtgtagggacacacctggctgcaagtcctggctcttccacccattagcattgtgaccccaggccagctggttagcctttctgtgcctcagagccctcattgatattctgccacaaagagtttgttgcaaggatgaaatggaagtgctcagcatcgtgagtgcctgagaagtagaaccatacacatgtgtagtacttcacagtttgcaaaatattctcctatctgccttttgggttaagccttggattagtcctggaacttggacagaaatttggttttttactccatttttaagagaaaaaatgaggctcaaagagaataaatgatgtgcttaaggttataaaagggaagcttgaaaggtctgggatttgaatccatgccttctgggtcaaattccaggttcttagccctgaggctggtggcattctttccctgacatcagcacccctaccctcttaggaacttcggggcccataaggctgccagttcctcctgcctgacagcagttggaaagcacaaattctttttatttttttttagacagagtcttgttctgtcacccagactggagtacagtggcacaatctcagctcactgcaacctccacctcctgggttcaagcagttctcgtgcctcagcctcccaagtagctgggattacaggcgtgtgctaccacacctggcttttttttttttttttttggattttagtagatacggtgtttcaccatgttggccaggctggtcttgaacttctggcctcaagcaattcacccaccttggcctcccaaagtactgggattacaggcatgagccactgtgcccagcccggaaagcaaaaattctttacttctcacttgacccagggtttaactggaagcttaccattaatttggaacttgggatagttttattgttgagcctggaggcagcctaagaagttctgtaggcttttaacactcacagttagtaatcagcagacatcacatgtggctgaataatccagaaaccagtttggtagccaggtttccaagagtttttttgtttccttggtactggacagtgggagacacaagatgctatcgtaggcctgtggagggtgcagggactggtgtgcacccacaggcacgtgtgtgacaaatgcaagttaatggctgcagtcagtgtttgtcatttctggtagggctgaactgaggagtattcaactattttctatctatgatttatagcagcaatgatggtcttcagaggcattcaggacaaagggagcttgaaaaggaaagtattttgcctcttgtgatatatttcactaaactggagcatacgcattgcaaattcaagtcagcatatttaataaagtgtattgtgaaagcaggaaaaaagcaagaaattaggcaacttttggccagcctaaaatcattggttagcagagctctatcaactgttgctttcatacaagaaggtatgaatgattttagatctttgcagtagaacctccctaggtaggtaaagtcactggcgtggataaattgaccataatttagtccttaatcaaatggttttgttaagaccacagacccaaacaaccactcagtcattcctattttgggaccagtggaagcatctcctacctgctggattcttgcagtctgtctcatttcagaagcttctctcctctgttctcattgatggcttccagggagtgtgatatgcccagcacctctgggaaacccaagctgcttaagaaaagtaaagagaattgcaggcagatgaggtggactgtttgcccctgattccacctcaccttctcccatttgcttcatctttgctctaaatgtggtcttctggtgtaggaaggggagtgaacctcagagtcactgggaagaactcacgggctctgctgaataaaggcctcccctgccctggaaggcattaaccaggaagcagggagcctgtctgtgctccagccttgcgctgcacttgagcaggcccctcactggttaacagtggttggcggtgccaaggccctgctcctttggacctgaacctaaaggaaggctttctgggcatggctggaaaggaactccccttcccacctaggagaggttgctgatggagctgatcatagaggatcattgggcgtccttcccaccatgggaaagtgaggccccagccatctggggcagggagcagagacatgctcccatctcaagactcactagttcagtgtgaggcaggaaaagtcatcactgctttgtgcttagaggtcatttgaaggttagtctttcaagagtgtggagctgcaaagggaggcggccagagtttgcatcccactaagtggctcaaaagtgagtcactatgccccaaacttgtgacctcgccatcctgatcagcccaggagactgtatagactgcggattcctgcggaagcttgctgtgttcttcatgcctctggttttgaaggaacatttggtgatgttttttgagggcctgctacttgacaggcaccattaggggcccgacgtgcatgatctcatttagttctgacagcccagtgagtctcttaacagatgaggaaactgaggctcacggacgttcttgccccgtaccatgtccactcagcagggtatggtggagtgcgtgttggtgcccaggactagctggccccttggctacttctgttattttcaggctatcctgaggacacccatcactccactgagaagccacaggtggcttggggaaccaaatactgaattttatagagtggagttctccctatgatttcatttgacaaaaggattcctttatttttaaaaaattaaaattccctactctcctttgtgttactttgagtccacacctactctagggtcacctgcccctcacctaacccgggtaagtggccatgaagtgagcacattgcagttcagagtgaggttctaggctgagaacaggtggagtccctagaatgggttctgacagggctaccgtgcaccaggagctgggatggagcgctgcccatggtagtatggatttggtgggaacgtaaggagacctgctgtcatcaggggatgaggatggcttccaggtagcccctcccacaggtacacccgtgccaggaggaaacatgatatcgccctctagtgagcataaggtagcactgcaagggcgtgtaagtgcagatgcacttgtggaactgcttggaggaccttcctgaatgtgcagccgatgcatccttctgtgatgtgcacaccctcccaggagccccctgcatcccacagtcagaaggctcacagtggcccaggttttagttttcaatgtctcagctccctgttgtcctgctcccatttttcctgacccagtggggatgccaggttccttctcctgccttagggaaagtgaatgtcctcccctctgtgtctgtctgtccagatgtctctgctgctgccctcggggcctgcagtggagctgaggagctttatgatgtttcctttgcttaccacagtacttacccagccattcatcacccagacttgaacatgtccagtgacaagtgaggaggcttgtaaaaatattttctgttcttgcagatgatgttaacatgtacctaatgtgcatttgtcttatgactcagtcctgagccctgcttccctttggagctgtcattggaaacacttgccaaagtgtctaaagtctgcagggtaactcaaaaggcctttctctgtgcccagggcaggcttggtgcctgcagggaacaggaacagtgcagagtcagtgtggggccatttatcggattatccagcctgctctgagaccccagacaggtctcccgtctcttggccttgggttctccatctataaattgacaagtttggactagaagagtgttttttcaggctggtttctatgaagcccaaaagttccccagtctactcagttgaggaccagagatgaagagcaaatgtttgaaaaccatggtgccagataatctctgaggacatgttcagctccaggagttctagcctctgtgattctgcagccctgagcatgtcctcatccaggctgtagagtggagacagaagcagtagctgtcacagaagcagtagctgtgagggtttggttcagcctcatgtgaggtctggcttgggaaatgcagcccagtttccacagggaaagacctcagagggagaaacttctcaaaattgcacaaatggttctaatgtggagcagccttcttctgctccaaatatcccacttttgcattctcttctgccctgagacacatgcccacatacacacaaactcatgcccctcacacgattccttcctgctcacacaataattgcttttcaaatgccagactgagctcctaggcctgagactcactcctgccccaggttaaggaagacttagcaacagactgggccagagcgcaggacgggaggagtgctggtgtctgggaaggcaatgagtcataggaggctgcatgacttaagcagagggggtgatagccacgaatacagagagatgggcccatctgagaaggggcagggtgggcagcttccctgacagaaatcatagctagaggtcccagatggcacagacagtcatgggagtatgggcactgctggcagggacaatgagcccagcaggctgtcacactgatatctggccaacagcctgctccgcgtctccctgctctgggtctggctgagtcacgtggctcacatgactcagagttgttcaaggtggtgtcagtcaggaggggtggagaggaaaaaggcctggcaaaggaagctgaggttctaggttcaaatcgggctctgcctgacagcctttctcagcgggctctgctcttcaggccttgattggcccatctggtaaatgagggggtggggctaggtggccccagctccttccccttggaaagacgtggttttgttggttcagagctcagcttcacactgttgtcagcaccttgctctctgtaccctctccacggcaggattcgcgggagggcagggagagcagacagacagacagacagccgtggccaccctagagacacactgcagccgtggtggcccacaggactctttagtctctgtgctctaaggccccctgcagagtcctctctgcagaactacaggtgacactgccctggctgtgagcatgtcctgccacatggaccaagtgggccaaactagtgggccgtggaattgaacatacttagtttccaattctggcttctctcctccctgggcctatttcctcatctgtaaatcacggatattagtacttcctcttggagttgcacggtggttaagcaaggtattcgtaaagcatttctcacggtacctggcacaaagtcagctggaagatgtggtggtgttaaaggagaaaaatataaagcctatacctagctgtgtaatatacagagcctcgtgttgggccagtctaggtttctgttcttcaaagaatgtatgtatttcttgaaattgctagtaatggtcactaaaatcattttaccattagataattgaggcttaagaaaaggagcttggaggcatggtgttgatcttaccataaaattaagtgataatatagtttactgttttaagagccaattagctattatggaattttgagaaatacatgacaagagagaagccctcataatttcactgcctatgtgcaacctctgttagcaatttgctgttttgaaaaggagtagcacttctatataggggctgtaagagtcagacccatttcaagaaacggggttttattgagccaggaccagcccagcacagtggctcacacctataatcccagacctttgggagaccaaggcacgaggattgtttgagcccagaagttcaagaccagcctgggcaatatagagagatcccatctcttaaaaaaaaatgttttaaaaattagccagacatggtggcacacaagtagtctcagctacttgggaggctgaggcaggagcatcacttgagcccgggagattgaggccacagggagcatgatcatgccactatactccagcctgagcaacattgcaaaaccttgtctcaatacaaaatcaaagtaaatattaagccagggccattgtgacctctgcctgcagtgttggtgcccagaacccaaggtatgtaggcagtattctttgggtagatgcaccaaatggagtactagagctggctcttgaaagctgatagcacctttttccaactccacatccagtgacatcatgtcagtggtttgaagtcagtcatggtgggattgtaccatggatgttggcaaatgcttcaaatcaggtcattgtttttccccaaaagccagtttttcaaattggattatcaaggctcagagtttagggtcacacggtgagtcagtggcagagctgagacatgaacctagatcagcctgactccaaagcctgtattctagaccactgggtcatgctgccttcagccttagcacctcgaactgtctgcatcttggatgacttcctgagcatggaatagaagtggaattactccatcagggaaggcatgatgctggatttggggagtttttcagaaagctgcaaaactggggctacgagagagatctgggccacttccagactgttccttctttgcctgttttcagctctatggaaggcgcgccccctgggaggatcctgccaagtgggtgatggacacatatccatgggcagccagcccacaacagcacgagtggcctcccctgctgcagttacggcctgaggatgtcggcttcgacggctactccatgcctcgggagggatcgacaagcaagcagatgccccccagtgatgctgaaggtgacccgctggtgagtcctcagccaccagagcagctcagcattcctttagcacttactgtgtgttgggtatgatgcagagcctctggaaatacaaaggtgactaaatccagccttgctttggaaggctggacccaaatgactgggccatttttgccaatattttcttccatggttttagtttttcactaaaaacttctcctctgaaatttttttctggtattagataacagattaagaattgatttttccccttaaatgttcttatacctactgtctctatacaacactttgccctctgatttgggatgccacctctattacctactatcctattactttgatctctcctaccgatagcagagcagaggaagagattgctaaggaccagaagcccaaggcaaatgatagggtaaacagggagaggtctgagggcaggagggactcacagaggggaggaggcctgaatatgagtcccatggccattgagatgagctaagtctttcacactgtttaagcttcttatttattcggctgttgctaaaacaataaaggccctttaagaagcacccaggctggggtggctcacacctgtaatcccagcactttgagaggccaaggcgggtggatcgaggtcaggagatcgagaccatcctggctaacatggtgaaacaccgtctctactaaaaatataaaaatttagctgggcgtggtggcaggcacctgtagtcccagctactcgggaggctgaggcaggagaatggcgtgaacccgggaggtggagcttgcagtgagacgagatcgcgccactgcactccagcctgggcaacagagcaagactccgtctcaaaaaaaaaaaaaaaaaaaaaaaagcacccgggctgggtgtggtggctcatgcctgtagtcccagcacttttggtgggcagttacagcctgggcaacgtaacaaaacctcttctctacaaaaaatacaaaaattaactgggcatggtggcacatgcctatagtcccagctactcaggaggctgaggtgggaggagggcttgagcctgggaggcagagtttgcagtgagccaagattgtgccactgcactccagcctggttgatagaaccaaaccttgtctcaaacaaacaaaagaaacacccgggccaataacagtagtatttctaatcgattgtagtactctaccaatataagacccacacagagtcacactgctaaattagacctaacaaatcaaaagcccagtaaaataaaaaggaagcaaatataccaaaacctcccatggttaaaggactattatcatgccttaaatttagccccaagctttcttggcaggcatagcaaaaagaaaacataacagagaatattatttacattacctaatgaaagaaaatattataagagatgtagcaggattaaaagacaactgatttactgttctattcctagcagctaattaagtccctagattaaaaaaataataataatattaataggcgattcaggttgtctgccatcctactgtttggtgggatgtagctgtggttctgttgaagattgcagtgggaactgtattttttaaggatttattatttgtgttgccatgtacaacctagtttgcaatatttataacagtagtcttacaaaggaaagaagcatactttaaacagccgtttgcaacgttaaccattgctgaaagccaaagtcacggaggtattttttgcaggggcaaactcatgaggtcttaacttacatagaaaatagaatttagtatatttagaggaaagaatggccagcccatccctaaacaatcttttctgagccagtaacatttgtatcactggttggacacagaaggtgtgtaggtaagacccaggattcttggaaatgcagaaacagatttctccttccaaccccaggcccccagaagtgagctgtgccagtccagccacttccattaccgagttagatatttggtatttctcctcagttctgctctttctgcccagggccatatgtctctattatcatagctctcttctgtattaatccttctcactcatgagactgagacttccatgaaaacagaatttacttgcttttgttccagaaccatatactgtggacacactgggagtgtttaatgagtgaataagtaatcccagttgccaaggattgtccattatacttcagctctgcctcttccctagttatggctgtgcagatggacaccagatgatggtgcttctgcagcctggcgcatctgggtagactctgcaaagcatcctgaggggcagctggattgtatgcccagctgcaccacatcttggccctagctcagagaggccccatattcctgacttacttcctatatgaaatataaaatacatacacacaatttacagttataaataaaagtagtttttattccctctcccactcccaaacaagtgacccgtagtatgtaaacaagggcagattcaagaacactgtcgctaaactcttttaagttagatgatgatgacaacagatgacatttattaagcgcttactatatgccaggccagccccttttctaagggtttaatacacattatatcattttattccctacttcaaccctatgagaagtgttgccattctccccattccacagatgacgaactgctggctcagataccttaggtaacttgcccagagattcctgaatcataagcgaaggctctttgcactcggagcctttgcttgtaactggtgctccccctcacctccctgccaaggcttccacaggagctgcagcacagttggctccagtctgacctggccagagcaaggagaagagatgggtttgatgcttgttgaagtgggagggggtccatgtgcttccgatgtcagtgatgctgatgccaagttccaggaacagggatgctcagccacaccttcatccaggccgagggctaggcctgaaaggtgtgcccctcctaaataaaaaataaataagctatgtatagagatcatcattttgttttcagtgctctacgtatattaactcaatccacccataacattatagggcaggtactattattattcacatttgaccagtaaagaaacaagtataaagaggttaagtaatgtgttcaaagtcatgcagctagtaattggtgaagctgggatttgaaccctagaagcctggcccaaagtccatgttcttgtccactgcctccactgtgggctgttatcccaggtgagtctggaggaggtggcatgaccttttaggagtccagggtgggcggccaactagacagaaagcagctcatgcttctccactcttcccctagatgaacatgctgatgaggctgcaggaggcagccaactactccagcccccagagctatgacagcgactccaacagcaacagccatcacgatgacatcttggactcctctttggagtccactctgtgacaggggcccggagcccagcgccctcctcttctcctcaccgcattccacctgcatcccccacatcaccctgaagatgacttcctgagccagcccccagccacagccttagagctgcgggaacaccgagaccccccgtccttcagcctcgacctgggtgcaggcatcccgggccagctgcctgcggaccgcttccttccacagcgagaactgcactaccttctgttgtactttaattattgttttgccttgttgctgtgacctccctaagacactgaagatacttctcgggaaaggatcatcgccgttgaaatgaaaagagagacagagagaaaaaaaaaaagagaacccacatgaagctctgaaaccaaacagcatcctgccatgagcttcccagagacagaagagactggagcaaagtcggaaacacagagaagcacggcttcccctcagcacagaccctccagactgggtctcagagccgtgccacccaccctcccacacagccggccacagggagaactggtgctaaccagggtgcttgctttggtcacgttcaacgcactacagagctacgacacagggaaaccttaggagcaaataaaccgtgctttcatgttttttaaatggtgctttccttacccgagaggtattttgcctgttccaatcaaaccaccccattcaggtccatcagcctctgattaatatccgtgagagtgagtgacggagtgagagtgtgagcgagtggatgtggctgtcagtgcagaacagcatgtgtctctttccttctgatatatgaatgaatcaggtttttttttttttttttctgcaaacactgtgtatagtgagacttgttctactttggagaacaggttaccttttgaaaatgaggttgagtttcttcctttctgatgcattgatttttgaagatttttttttcccccttcccctcttggtcagaatcaatcctttggtgaaagtaagaaccgcaggagttgagttttggtttggtcctgctcagttttggtttttagttgtccatcctcacagtcctacacactcgcctcctcctgctagggctgggggtatctgtgtcctttaaaatggatgaggacctggtcctcgacatgtgggtgagccatggaccttgccttcccttctcgtccttgagggtttagaacacacaccaacacctccagcgtccccgccccagcttccggtggggtgatgcggtcaccctgcaaaagacttgcactttcctcagaaccaacatgacgcagctcaataagggtgagggtcactccctcccagaagccccgtctggacgagccttgcctgacctcttcggtgctgaccttcccaaagtgatgccttactggttttgtactaactgtgttcattttacataagtgtcgtgcctgcctggggtttgttttttttgtcattgttttccccattgaaacaaacagggctaaaaagtcatctgttcattaggagaactcaagttgctgtgacttttctcatccaaaagactcatttgtgtggatgcgtgaccatgggaaaaagaaaaaaaaaaagatccattttttaggttcttttcggtctccagctgacaacccaactggacaatgatctgtctggtgcaggagaaggcaaaagtttctacaagtctacatgaccttgctgatacttgttctaatagaaacccagtctgctgtgtcttcaacatactggtattttcattacaaagtatggtaaatttttgagttgtttgtttctgttttgtaaagagaatccttattggacaccagtgaaggtgtctctgttttaatgatcagggtttttattccatcttttgcatttcttctatttctgaaggtttgtctcttggcatctttttttagtttcttaccataagagtttgacccgaaactgctcacttcacattggatgacaccatgttcttcctctttgaaaagaaaaggggaatgtgtcccactagtgaaaggaaaacttttcaacactatccctgctttagtctcagcaaactcagactattctgcttagccttcattagtcatctgggtgtgagtgtgtcttgttctgtttttctttttaataaaacttttaaaccatatatttagcctgtgaccaggggggccaaaccctaagatttctggtaaacctgaagggtggccctcctcagacaatttatctcccagcaatgaccctactacactcgcgtactgtgaatttgggaggaggtaaagttgacttctcctcgtgggcagttttccaatcaccttgtgagtagacacctgccaatattgtttgaaacctttttttaatatgacatcctctcttgtcattctcttctcccctttcccacagacttccctcctgggtccaggttcagaaccaagacttctgtacctagtgctgcctgattggtgaacattgacttcaagtagcatagcccttgtgtgactcacaactccgtgtccttcctaaagtttcgggaagcagggttgtctaatatgcacatttcttattttggtcatatttttactttagtgtcactcaccttttacaaagtgactttgtactcatttagggctctatcggaaatgcttccattttgccttttctacagttaggccaattttgaaatatataaattctatgcaacatttatgttgagttaccaatggaagccaaaagttctcttcccaaactgccaagaatgatacaggccataattgaaatgggaataccttttaagtttcattaggggtggggtgggagtgggacaggaacaagacttgcctagatctttgttgtatcttggggacttttactttgttgtttgatgcttaaacttcaaaattctctgtattcaaatttgattgtggcgaatctacttcaaaaaggaaaaataatccaactttgtggatattaaatggaaggtttgctgttttgatctagttgtttccagtggagcagttttatgaaatatgttctataagatgtacattttttcattgtaacatagaaattgtaaataattgattaaagtgctgcattttgatgaattttttctagccatttttaaagagaaaactaggaattgagtattttgtgtacggtatgtttccatcctccctccccttcctcctcccctcctctctctctcttcctacctatttaattttcatttgtcatgaggtttttggatttgccaatgatctgctggacatcatgccccatgtcatagagaataaagctgatgattgtaccagtcttaaattattcatgattcaataaaattgatgcttatttattcagattagtggtttggcttgtctgtgctagagcaagtcctcataggagttttatttcatgctaagagcaagtcagtcttatctggatgcagcaaatgcagggaaaaccccaaacctttgcaaacccatcttggctagtatgccatcaatatcccacatcttctcagtttctcaggtcttcttgccactcctgtggagcttgttagaactgtagaatttcagatcctctcagactttatgaatcaccagggatctagtggatcctcaatttctaacaaactcctaggcaataccagtgctctagtgcctggaccacacattgagtggcaagcaacatcagtgtccagccagccccctaagtcgatcccttggcatgaaaaggatttttttttaatgtattgagtacctactaatttccaaatgctttcccaaatactcagtataatgcaaaatgatgccagagaggtattcttactcccattttacaagtggaaaaaaaaaaaaaaaaacagagaaaatgacgtgccaaggaacctatagccaagaagtgagttggagtttcagccccatcttctgaccgtcctgccttgccaggctgccttctaatcttgggggcctcctgtcacattgcagctcacatccatagcagacacaggcagtgggagatgaccttacatctcagcattcactttgaatagcaacaacaaaaaaggcatggtttggagtcctgtgggttcacagtgaaattgatcccacatggctggctcaactgctcacgacatgaagtgtctaactcttaacatacaacagtggcccaaccagggaggaggtaaagaatccagatatttagcataggcagttttaatccctgtcaaaaaaataataaagaaggggtagtacaagtctgacgactagatgtcctgaattccaagattctatgtcaaacattctatcccattgctccatgatatattctgaggttacctaggaaatatgatcagcatacataaaggggatggtggacagatggctttttaaagagcagggaagagccaggtgcggtggctcacgcctgtaatcccaacactttgggaggccaaggcaggtggattacctgagcccaggagttcaagaccatcctggcaacatggtgaaagcccctctctactaaaaatacaaaaaattagctgggcgtggtggcacgtgcctgtagtcccagctactcaggaggccgaggcacgagaatcacttgaaccaaggaggcggaggttgcagtgagccaagaatcacgtcactgcactccagcctgggcaacagagcaagactctgtcaaaaaaaaaaaaaaaaaaaaaaaaaagaagaagggaaggacaggaactgcataactgcatttacgtactcactgggtaccagacgtatagaaaatttcactctatcacatataattacagcacctctaagaggcaggtgtgattatctccattttatagttaagaaaactgagg
